United States Patent Application Publication US 2006/0134663 A1 - sequence listing, part 72

SEQ ID NO: 187731 - DNA, 2120 bp, Homo Sapiens
  misc_feature (292)..(335): n is a, c, g, or t
  misc_feature (439)..(453): n is a, c, g, or t
  misc_feature (547)..(565): n is a, c, g, or t
  misc_feature (595)..(833): n is a, c, g, or t
  misc_feature (857)..(876): n is a, c, g, or t
  misc_feature (1148)..(1208): n is a, c, g, or t
catcctcgacatagttgtatgaagtgtgatgcctggagttatgacagccattcttgcaaccatgagaagataaggctgtggatgaaaaccaatataccaagaatggttgtgttaaaagatgaaaagagcttgggtcttgaatgtcatcactgaacacttcaccagttttcaaacagccctatttctgaactcttgtgatgtgagattactaatgtcctcattatttaagctacattagtagttggatttcttgtcacatgtagctgaaaatatcctagttaatacatcaacnnnnnnnnnnnnnnnnnnnnnnnnnnnnnnnnnnnnnnnnnnnntgagctctatacatattgtatgcatgtatcaaaatctcacttgtactctataaatatgttcaactattatggatccattttttaaacatacaaatttgaactcnnnnnnnnnnnnnnnatgtttctgccagcaggaagtcaaaatttgaactctttttgtgtttatatgcatccgttttttaaatgacctgatgaaattaaaactgttgagnnnnnnnnnnnnnnnnnnngaaatgagtgggccgggcgcagtggctcannnnnnnnnnnnnnnnnnnnnnnnnnnnnnnnnnnnnnnnnnnnnnnnnnnnnnnnnnnnnnnnnnnnnnnnnnnnnnnnnnnnnnnnnnnnnnnnnnnnnnnnnnnnnnnnnnnnnnnnnnnnnnnnnnnnnnnnnnnnnnnnnnnnnnnnnnnnnnnnnnnnnnnnnnnnnnnnnnnnnnnnnnnnnnnnnnnnnnnnnnnnnnnnnnnnnnnnnnnnnnnnnnnnnnnnnnnnnnnatgacacagcaagaccccatttcnnnnnnnnnnnnnnnnnnnngaaaggagtaaatagaaaatgaaagtagaggatacaaacctcttggaaaagagacccaagagacggcatgtaactagaaatggcaggagagacaaaagatatattctgaggagaaacagaaagagtgatagcaaacatgccaaaacatgtgaaggtgatattccacaggaggtgggtaagggtagctaggagctgggagtattagctttagaaacacagaagtaaaaactcctttaaaatcaaaaagaggccgggcgtggtggctcacactnnnnnnnnnnnnnnnnnnnnnnnnnnnnnnnnnnnnnnnnnnnnnnnnnnnnnnnnnnnnnaataataatacattctcacctcttcaagggaagattccaaattcattccaaaagcaactcccattagtccaaagagcgaaagagagaaggttcccatggtcagctgtagattcaacctcatcatcacgtttcggtggctgtccagattaatgaaaataatactttgtgaatcatcaatcagcaccctaagctcacgagctgcattggagagatcgtcagccaatcggtagtagttttccaacagcaactccatctcttctgcatggtcaatcccagcactgctcttttcaaagacttgtgggtcactccattttgatacacagagctcttctagcaactcttcctcatccaagatctccaaaattgactctttgaaaattttaatatctgtttctaactctgatagacttttgccattctgtagtaaaatgtgcagtttgcttctgtctacagaagaatgtttggggtccaccaaagcatccaaggtctcaaggatcagtggctgcaaaatgctaagtttcccctgaagggtgttgatccaatattgcaggagtgcttctatagctctaaactcaaaaggtaaagggtatgtaacgagttgaccctctccagacaactgtgaagggagttcccggaacagccattgctctaagtttaaattacgataatctaatatcagaagacactctggagttatcacagctttcaaatactccattctcatgataatcctattgtttctgactgtgatactcattacatgctgaaatctcaaatctctggcttgaagacctaactcttggtataattcagttttcttcctttcaaaagaagtaacgtttccctgtttgtcaaattttgtcacagtaaatactggggctacactggctaaagtggcttgagagacgccaa

SEQ ID NO: 187732 - DNA, 1434 bp, Homo Sapiens
ttggggccaaagcctcactgtttcaattgtggttctgaagaacaccaaatgaaagattgcccaatgcctcggaatgctgctcgaataagtgaaaagagaaaagagtatatggatgcctgtggagaagcaaacaatcagaatttccagcagcgataccacgcagaagaagtagaagaaagatttggaagattcaagccaggagttattagtgaggaacttcaagatgcactaggtgtgacagacaagagtcttccaccttttatctatcggatgcgccagctagggtacccaccagggtggctcaaagaggctgaattggagaattcggggcttgcactctatgatggaaaagatggcactgatggggaaacagaagttggagaaatacaacagaataaaagtgtcacttacgatctctcaaaattggtcaactatcctggttttaatatatctactcccagaggaattccagacgaatggaggatctttggttccataccaatgcaggcatgtcagcagaaggatgtgtttgccaattaccttacttctaacttccaagcgccaggtgtgaagtctggcaacaagaggtcttcatctcactctagcccaggtagtccaaagaagcagaagaatgaaagcaactcagcgggatctcccgccgacatggagctcgattcagatatggaggtaccacatggttctcagagcagcgaaagttttcagtttcaaccaccattacctcctgacactcctccactcccccggggaactcctccacccgtcttcacccctccactcccaaagggcaccccgccgctgactcccagtgactcaccccagaccagaacagcatctggagctgtggatgaggacgcactgactctagaagaacttgaagaacagcagaggcggatctgggcagctcttgagcaggccgagagcgtaaacagcgactccgacgttcctgtggacacacctttaactggcaattccgttgcctcatcaccttgtccaaatgagctagacctccctgtcccggagggaaaaacatctgaaaagcagacgctggatgagcctgaggtaccagagatttttacaaagaaatcagaagctggacatgcctccagtccagactctgaggtgacatcactttgtcagaaggaaaaagcagagttggctccggtaaacactgaaggtgcccttcttgataatggcagtgtcgtaccaaactgtgacatcagcaatgggggcagccagaagctctttcctgcagacaccagtccttcaacggccactaaaattcatagccctatacctgacatgagcaaatttgcaactggaatcacgccatttgaatttgagaatatggcagaatctactggaatgtacctcacgataagaagcttgttaaagaactcaccccgaaaccagcag

SEQ ID NO: 187733 - DNA, 2084 bp, Homo Sapiens
ttggctgaagttcttattgggaacctgggtgataaattaatccctccacaagacatccttcgtgacgtcagtgacctcaaagccttggccaacatgcatgaaagcctggaatggttggcaagtcgaacaaagtcagctttctccaatctttctacatcccagatgctttctcctgctcaagacagccacacgaacacggatctccccccagtgtcagagcagatcatgcagactctcagtgaacttgccaaatcgttccaggatatggctgaccgctgcttgcttgtcttacatctggaagtgagggttcactgtttccactatcttatccctcttgcaaaggaggggaactatgccattgtggctaatgtggaaagtatggattatgaccccctggtggtcaagctcaacaaagatatcagcgccattgaagaggccatgagcgccagccttcagcagcacaagttccagtatatcttcgaaggcctgggccacctgatctcctgcatcctcattaatggtgcccagtacttcaggcgcatcagtgagtctggcatcaagaaaatgtgtaggaacatttttgttcttcagcagaatttgaccaacatcaccatgtcgcgggaggcagacctggactttgcaaggcagtactacgagatgctttacaacacagctgacgagctcctgaacctggtggtggaccagggtgtgaagtacacggagctggagtacatccacgctctgaccctgctgcaccgcagccaaactggggtgggggaactgaccacccagaacacgaggctgcagaggctcaaagagatcatctgcgagcaggctgccatcaagcaagccaccaaggacaagaagataactaccgtttagcagggcgtactgcggttggtgacgggggtcccctcagtcacactcacttttttccttggtatgttattgagtatattctgagcttagttttctctacagtgatactttagtggagaggaggtgtaaggattctttctctctggttttggcttttcatataaatgctaaaggaaggcgacagtacagagtgttttggttgaacaactactttaatgcagtcaaatctaacgggactagggtgggatagggaggaaggtggtatcaaattgttggactctgaaaaacaagtggatggattactaatatttgatttattactcaatatatatataattccagccttggaaagtaggaaagtaggctgctacctaacttttagtcccttccaaaaccatttagtagggttctattacataaacagtagggtttttcctctcctgaccttatccgtttacagttcaatgaaataagtgtatgtgcattgctgtctgtctctattgccaaaatcaaataaatggcttctcagctgctgtttacaacaaacttccctaaccaaaacagaacctctaatttagggctaggaatagaagtcttttgatcccagtccgtgggacagttttgtatgctgtatcttgtacacaggttgtaggttggtttattgccattttgttttatttctgctatataaaaaccaagagccagacaattagacaactatggaggaatgaaaggcaattcaaacatctgcttgattcccgccccgccacccctaatttctgagagaataatggttagagaacattgcatctcacttgaaacatcctttgggggtaaatgattcttaggtgctcacttggtctgagctcagctgaatgcagggaagatgggacagagtgacatttctcctctgtgcggcctccagctgagcctgtctctgaattgttccctcccccgcaatgtgggcacttaccatgttcctggcacactggacctcaccatgtcccccggtcaccagtcctcttgctgcccatggttcataggtcatagaaagcagcaatgcactgactgggccacatcttgaaaactcctggaaagggaaaggggaggagatgggactttgaccacacacggtgatgcctccacaccctgaagtgggggattttgtacctgtttgtacaactttggtcctgatgggaaaatgg

SEQ ID NO: 187734 - DNA, 1121 bp, Homo Sapiens
actttgtacaaaaaagttggggtgataatggaaagtcaagttaaattttaaatattaagaattctgatttattgagattgaattatgccaccacgtttatgtaaaaatgaaggtggcaccgtggtgagacctaatgagaaatagttactcagttgtaaaaattttgatttattctctttcttctgacctccttgcctcttgtcttgaaccatagcaaaaggatactgcatctctcattactgtagtgctgaggttattgaagttatacaaaacacatctcagtctctgtttcttggaaaggtatctattacatcctgctagctgactgacaaaactaagcagggagaataaagataattgtattttatgttttgcacacaaacgcagaatttgtataaccatatgacttcatagttgtgatctcaaaaaagaaggaatttctcctttgtttcttgcagttaatgtaagaatactttaaatctctaagcttctgaagtgttagaggtagagatggtctagtaaagatgtagtagtaatgttttatccatttagcatgtgtttattttttcatatgtactcaaaggtgacttattggttcacctcagtgatattacagctaaaaaaatcattcattagcaaaaggaaaagtggtctcaacctaacatcagaagtgtttcttattattattttatattgagttgaatattgaactctaacagttttctacatacaaaacacagtgtcatgaaggttattcataattgcattatagaggaatgtagtatgtcataagtactttgtaaagatttgacattcaactgtagtatccatatgttgcttaaatttccttatgagccccatgatggaaagacttaaagatgaatttgagaaaaattgaaagaaattagattatcacgttctgttaaattgttacatgtatcttgcttaaatttctgtttattaatttatatccacccaagtacataaaagcaaatttgggaggaaacaactgaagttgtgcaatattttcctgataattgctttttttattcttgtgttttctacctaaacataatgtctgtgtcatcaggtattatagtcagacttttcctttttttcta

SEQ ID NO: 187735 - DNA, 1883 bp, Homo Sapiens
ttggcgccatatcaggaacaagttccagttccagtctaccacccaacacctagccagactcggctagcaactcagctgactgaagaggaacaaattaggatagctcaaagaataggtcttatacaacatctgcctaaaggagtttatgaccctggaagagatggatcagaaaaaaagatccgggagtgtgtgatctgtatgatggactttgtttatggggacccaattcgatttctgccgtgcatgcacatctatcacctggactgtatagatgactggttgatgagatccttcacgtgcccctcctgcatggagccagttgatgcagcactgctttcatcctatgagactaattgagccagggtctcttatctgacttcaagtgaaccaccattttggtggttttgatcttttgtcactgagcccaaagagccagggattaggaattaagatcgtgcacaaaagtttccttaaaattcctggatggctgcagatgttgggggaaaaagtacgtgatattttagaaacttagtgggaaaagtaggatggtatttttatgtaaagccttgacccaatgtttaaaaatataattgtatttagatcttgttattgctccagtacataggaattgtgtaaagtgttaacagcagctgtatttgtttaaattgtgtgtattgaagattaggaaaaagatagtagttatttttcctaaatgaaataactttcttctcttccccttccccacccgaattcttttctgaagttgctggcatttgggtcaaggttttattaaaagctacattttataacactggcacacacaaaaaagtagttttaagcttgtttgcacagttctttttttccattggaaatggaattcattgccttaggtctttttaaatagtgtattattatcgttggggctggctctatgcttgaaaaccagtttatttataacctgttataagtgctatattctgtttgcagttaggaaatgcagaattcaaagtgatctcctagcttgtaagcaaactgagatgcactatcccttttctataaaaaataagttaatgtgtcaagaaaccaactctattaaggtggggtttaatattaccctttcctatgtgttttatctaattattttggttgttaatatggtgataatggaaagtcaagttaaattttaaatattaagaattctgatttattgagattgaattatgccaccacgtttatgtaaaaatgaaggtggcaccgtggtgagacctaatgagaaatagttactcagttgtaaaaattttgatttattctctttcttctgacctccttgcctcttgtcttgaaccatagcaaaaggatactgcatctctcattactgtagtgctgaggttattgaagttatacaaaacacatctcagtctctgtttcttggaaaggtatctattacatcctgctagctgactgacaaaactaagcagggagaataaagataattgtattttatgttttgcacacaaacgcagaatttgtataaccatatgacttcatagttgtgatctcaaaaaagaaggaatttctcctttgtttcttgcagttaatgtaagaatactttaaatctctaagcttctgaagtgttagaggtagagatggtctagtaaagatgtagtagtaatgttttatccatttagcatgtgtttattttttcatatgtactcaaaggtgacttattggttcacctcagtgatattacagctaaaaaaatcattcattagcaaaggaaaagtggtctcaacctaacatcagaagtgtttcttattattattttatattgagttgaatattgactctaacagttttctaatacaaaaacacagtgtcatgaa

SEQ ID NO: 187736 - DNA, 1606 bp, Homo Sapiens
ttggagacatttaacctgccagttctggaagcactgttcagcgatgtcaacatgcaggaataccccgatttaattcacatttataaaggctttgaaaatgtaatccatgacaaattgcctctccaagaaagtgaagaagaagagagggaggagaggtctggcctccaactaagtcttgaacaaggaactggtgaaaactcttttcgaagcctgacttggccaccttcgggttccccatctcatgctggtacaaccccacctgaaaatggactctcagagcacccctgtgaaacagaacagataaatgcaaagagaaaagatacaaccagtgacaaagatgattcgctaggaagccaacaaacaaatgaacaatgtgctcaaaaggctgagccaacagagtcctgcgaacaaattgctgtccaagtgaataatggggatgctggaagggagatgccctgcccgttgccctgtgatgaagaaagcccagaggcagagctacacaaccatggaatccaaattaattcctgttctgtgcgactggtggatataaaaaaggaaaagccattttctaattcaaaagttgagtgccaagcccaagcaagaactcatcataaccaggcatctgacataatagtcatcagcagtgaggactctgaaggatccactgacgttgatgagcccttagaagtcttcatctcagcaccgagaagtgagcctgtgatcaataatgacaaccctttagaatcaaatgatgaaaaggagggccaagaagccacttgctcacgaccccagattgtaccagagcccatggatttcagaaaattatctacattcagagaaagttttaagaaaagagtgataggacaagaccacgacttttcagaatccagtgaggaggaggcgcccgcagaagcctcgagcggggcactgagaagcaagcatggtgagaaggctcctatgacttctagaagtacatctacttggagaatacccagcaggaagagacgtttcagcagtagtgacttttcagacctgagtaatggagaagagcttcaggaaacctgcagctcatccctaagaagagggtcaggtgtgccaagaagccaagaagcaaggactgaaagtagtcaagcatctgacatgatggataccatggatgttgaaaacaattctactttggaaaaacacagtgggaaaagaagaaaaaagagaaggcatagatctaaagtaaatggtctccaaagagggagaaagaaagacagacctagaaaacatttaactctgaataacaaagtccaaaagaaaagatggcaacaaagaggaagaaaagccaacactagacctttgaaaagaagaagaaaaagaggtccaagaattcccaaaagatgaaaatattaattttaaacaatctgaacttcctgtgacctgtggtgaggtgaagggcactctatataaggagcgattcaaacaaagaaacctcaaagaagtgtatacagagtgaggataaaagtggttcactcccagggaatttgaaaattgaaaggagaccgcggagcatccaagaactggagctaagtatacgctgcggtggatataccctgaaagt

SEQ ID NO: 187737 - DNA, 1310 bp, Homo Sapiens
cattggtcagtacacaggtcaggagctcacgccagggccttgaggacaggctgaccctcctccccggggtggcgtggggctggggcaccctccgacggcagagcctccttcagaaagtgcagctcaagtcttaaagacaccaaaactgagccatgggcacgcgccgtctccgggccatggcgttcactgcagggcgggggcggcaccgctcccctgtgactgcatcccgcctccctggggacctgcctgtggcaggaaggaatggggggccccagccccaggccgggaaggagccagcggccgacaaagcagaaacacccgctgctccacgtagcccctgctcgctgtccttgctctcagaagtcccggtcccatgtagatagaggggggcgcatcttaccaaagcatttcctcctggaggctacgccgctgtgctcccagtcaggcggctggtagggagctttgcctgccccggggataccctctgccagccgctggaagtgggaatgctggcgacagactgtgtcctctttcccaccttcatagcaggaatcacccggacccgactggctgggcttcgtgctagcgagggttctgggggtgggtcttggtgatcttgtcctatggggagtctgcagtggtctcagccacatcctatgtattttggctctggaggagcaaagctgtatcctggagttggtctgtgatttgccgacagccttgcaggctgggctcagggacaaagtcccccccaaaacccgcaggtcctcatgtccagacgctgcccagtcctgtcctgaaaacagcacgccccaggcccacagaaccccccaccctacatttgccttgggtggagctgggggtggtcctaggactgcgggtgcccttagctgaagggggtggggagaagcgtggactgggcagcctgtgggtaattggaggttcattgagaattgagtctttggaaacactaagaaaatcaaatttttaaaagttatttatggcctgggaaacaatttgcatttgtccccaaatacgcttagctgtgtgccgcttagaacgatgcgaaaccatccctctgtgtaagcccgtgccgtgtgactcgaagcctagcgccctccctgcgaagcatcagacgccacccagccctggggggaggcccacgcctgctggaccaacgcgggttctggggtgcacagcgccaggttaacgctgaagcctgccccgctgagcccaggagccgggaggcctgcgggctgacccagaatccgatcatgcacctgtcctcatgccagcggctttggctgggg

SEQ ID NO: 187738 - DNA, 1930 bp, Homo Sapiens
  misc_feature (509)..(531): n is a, c, g, or t
  misc_feature (988)..(1024): n is a, c, g, or t
  misc_feature (1488)..(1517): n is a, c, g, or t
ttttaggattatttggcttatttcatcaaggaagtttggtgtaagaactgttactaatgagtgccccctccgtgtaagttcatatttcaagttacatggtcatgccataaataaaccacacttgctttaacatcgttcagaatggtacattaaacaattggacatacagcactgtaaacaattcaaagtccattgagcttaccatgaaagaactgaaacgtatgtaggaactgtgtccgctgcagacaagcagctgctctggctctggtgcggtgcggtgcagtgaggtgaggtgggcaggtgtggaagggagaattcctgaggccagtcacaattattgaagctaaattaatttcttcctgacactttagcattaattctaagtagttctaagttctaaaccattaactgtatagttaatttttttaaatcaaagaagaaaaaggctttcacacagatgaatgtataggaaaacacaagtaatgacaattttcaagagccttattgtnnnnnnnnnnnnnnnnnnnnnnngacaattatttttggagttactgtctataattcttaaaaagtaagtacagtgtctgtatctctaagttttagtgctatacagcactaaatgtactttatgaatttggggtaggtaaagtttgtattttatcttaaacatgttttctatgatgaaaaggaacaaaattgtaaaaaatgaggatcttccctctaaaggtttcaaagcgttagaggacatgcaattaaatgttgttacaccttgaacaatgagcctcttgagtttgtaggaagggcagaccggctccattaccaacaactttggggtagaaagcacagctctcctcttttacccagcacaaatgcaatcctgattataaaactatttgtgtttctaaatacaaccaaaggaaatcttagagaaacataaattagaaacctcttttattaaggggaaacaacaaaaaaaggtgcttttttnnnnnnnnnnnnnnnnnnnnnnnnnnnnnnnnnnnnncaagctgtaaaaccatgaagttaaagagctgggtctggagcagatgtgcataataactagttagttgctcccagcaggatcagaaacagctttgggggagcagaggaatatgggttggtgtgtttcagaagaggcaccagttaatactcttccaataaaaatgatgtgtcaacagtgttcagcctcaaccagtgctttctcacagaatctgcttggtaagttcagttcacaatgtgtttacctttcatggcaatgcacgatgcaattactgggtaggtcactgtcaagcaaaaacgagatataattacagagaaggcattaatgcccaaagagtacataaagcagtaagtagcttctgaggctggttcaatgcagaagtaaaactaacaggtttgctaacagctaaagacttttaattgcctcatattttctgcagctctgaccagcatccttcttacacgacnnnnnnnnnnnnnnnnnnnnnnnnnnnnnngtgtgcagctccaacagagtgaaaatgacaacacttttcttttgcctcagaagaagactggtgcttggtgtgctggattttccactgactccaaatgacaagaatatttgggcaaacaattggtcaaaagtgggtttaaatattactattgaaaaaggaaggctaaaactaaaaagaaagatcacttgctatcattattaaggattaatttttgtgtttcattttggttttaaggtaaaatttgtcaaggctacaaggggttgagtaatttaggataaaccattactgccctgtctgcaagccatttgttgttttaatggtagatgttagatacccaagcacatgtagaaaaaacaaccttccttttttggtaggttgtaaagaaatatttcaaaagacagtttctgacccaa

SEQ ID NO: 187739 - DNA, 1572 bp, Homo Sapiens
  misc_feature (218)..(233): n is a, c, g, or t
  misc_feature (556)..(601): n is a, c, g, or t
  misc_feature (916)..(964): n is a, c, g, or t
ggaaaaatccctaaaagaactggcagggtacacatgctgggatgtgggtatgtcaatactgttcttcctcacagtatgctgtttaaaattattttttaaaaaaggtcaggtatgatgtatcttcagaaaaatacccactgtaaactaggttacatttccatgtatcttcaggatttgtttttctctttgacaatatcacaatgctctgtttgaaaggnnnnnnnnnnnnnnnngacataaaaatatatgtgtaaacaatatgctaaatgctgttattagccctctaggaatggaggcatcatctctaaccacagctcagcagcaatgtccaagctgtccacacttacaaatcaacttccccatcagaacatggtttaaaaaacaaaacattttagaattgaagagttacagagaacaatgtaagagtctgaatttcctttcctttatttcaaaaaaagtaaagaattatcccaggttcttgggcatctcaacgattttttccaaacaaatgcctcaaagagagagaaacagcgagagcgagcaagcgagacagacnnnnnnnnnnnnnnnnnnnnnnnnnnnnnnnnnnnnnnnnnnnnnncacacatcagcaaaaaaggaaagagactgggtaaagtctacctacttgcccaagaatgccacgttctacaacctgctttatgtgcagggagaagggcgtatcttttgtcaaagtggagtaaactttaaggatgagtaatttatttggaaaaaaagtatgttcaagatgctcaatggggaaaaagtgttcacttaaaagcaaaatgtgagatggtggagaggaaagaaacatttattcaaatcagccaggccactctgtttcccttatagcaaaagccaaagagcagctcaaattttgtgaacactattctctttnnnnnnnnnnnnnnnnnnnnnnnnnnnnnnnnnnnnnnnnnnnnnnnnncacacacaatcccccaccccaaaactttaaaaatcaaagagcctctcctgagccatctcaatactgaaactgttctttctctcttccgatcagtaagtgcaggcaatgaactaataaaacatttacttttcaatgtaatgatcctctccatattctctacttgtatctactaaggtagagttgaagtaaatgttctggctatagcccatccagggggaactggtgccaacatcattatttcgtaagtcgcctgctagtagcaagtgagcaaggaatacaacggacagctttgcagtagccaaatgcagatgattacctcgctctggcaaatgatttcattaaagattcagagaactggatggaaggatggataggaaaggaatctttcaggacactgaagtctctgggttagtaaggaactcctctccctcttccccctcttggtgggactcttgtaggcccccgatagagttttccataagcagaagactgagttgggcccccccagtgaaggcctgctcctgagctgctggccccagtggttcctggccccagctccccatagttttgcaatttggtctctgcatgtaccacagaattgctgccaa

SEQ ID NO: 187740 - DNA, 1458 bp, Homo Sapiens
ttggcctgagatacccattgctcaccaggcctcactgggcccacagctgggcaacaagaaaaatgtttgaattggaccaactgctggtgatggggccagggccctgggccctgtgctgtcagaattctgccttgggaaatgatcctatagctgctgctttttcttggtccttggggctggcagacccatagaccatggcctgttaggaggcgtcctgtctgtaaaggaaattcatctcttgtgacagcctggggctacctagctcccaaacccagaagttggagacatcaggctgtttaaatgatcatagcctagcaggattggattaaaaccacaggcttttgcagctggaatggggttcagtgaacatctcccccattcctctcttgctacaaataaggaaacaggcccaggagattaagtgacttggctaaagtcacatagcaaattagtagcagagccgggactatcccttatccctgtgggttgggcaacactatttagtcctgaaaccgaatggcagataaaccccatgaggggtcaggctgatgtgccctccagcagtatctgagaagctgctaccttcaggggtgtgtcagggatgaggacgggtgcctgagcttaggttgtggagtggctgagagggcccaggagggctcgggacagctgtgtgctgcatggggttgggtgtctgcctggctcgcacttggtacccatggccacctccccattttctgtgccttatctcactgtttcagctgagtccaagttgtttactctgttcctctccagaggggctctctgtcccagttgggcagctcacctttgggacataagcctttgccccacaagctgtggagagggccaaaaccaagctgcttgagcccactctcttgctgagagtccaggcctgcctgcctgccagccagaggtgccccttatgcacatccagtcctaccagcctgcttccaggagcctagagtgggaaaggcacctgggggagccctggtgaagggctggacctgacccatggaggcaggaggaagacctggctttcttggtttgtccggccctggggagcagccttccctactcactttccccttgcggcaccaaatggtcactccttccagagcaaaaactggcactcatagcaagccagaacccccatccccatcctcatgggtctgtggctgggtgcaggccatcaaaatggacaccacgagacagaagtggggactgcctggccacctagcgccttcccactccttaagcaagcacaaagaagatgaggcagagaattgtcagagctgaaagttcctttgggttgctcacaactcaatatgcacccatgtggcagccaggcagcggagccctactagactgccagtctcatgcacccagacctgtggtcagattgtggtcttctggctgcctcaggcattttcctctttgcat

SEQ ID NO: 187741 - DNA, 2217 bp, Homo Sapiens
ttgggccctggtggcggctgtggtgctcctctccagcagtgtgaatgacatccagcgactgctcttctgcctccggagacccagctccacggtgaccatgccagatgtcaccgagaccctgtactgcatagccgtgcttctctacgccatgagggagaaggggattaacatcagcaataggattcactacaacattttctattgcctatatcttcaggagaattcctgcactcaggccacaaaagttaaagaggagccatctgtctggccaggcaagaaaaccatccaacttacacatgaacaacagctgattctgaatcacaagatggaacctctccaggtggtgaaaattatggcctttgccggcactgggaagacctcaacgctggtcaagtatgcagagaagtggtctcagagcaggtttctgtatgtgacattcaacaagagcatcgcaaagcaggccgaacgcgtcttccccagcaacgtcatctgcaaaaccttccactccatggcctacgggcacatagggcggaagtaccagtcaaagaagaagttgaatctcttcaagttaacacccttcatggtcaactccgtccttgctgaagggaagggtggattcataagagccaagcttgtgtgtaagactctagaaaacttctttgcctcggctgacgaagagctgaccattgatcacgtgcctatttggtgtaagaacagccaaggacagagagtcatggttgagcagagtgaaaaactgaatggtgtccttgaagcgagccgcctctgggataacatgcggaagctgggggagtgcacagaagaggcgcaccagatgactcatgacggctacttgaaactctggcagctgagcaagccttcgctggcctcttttgacgccatctttgtggatgaggcccaggactgcacaccagctatcatgaacatagttctgtctcagccatgtgggaaaatctttgtaggggacccgcaccagcagatctataccttccggggtgcggtcaacgccctgttcacagtgccccacacccacgtcttctatctcacgcagagttttcggtttggtgtggaaatagcttatgtgggagctactatcttggatgtttgcaagagagtcaggaaaaagactttggttggaggaaaccatcagagtggcattagaggtgacgcaaaggggcaagtggccttgttgtcccggaccaacgccaacgtgtttgatgaggccgtacgggtgacggaaggggaattcccttcaaggatacatttgattggggggattaaatcatttggattggacagaatcattgatatttggatccttcttcagccagaggaagaacggaggaaacaaaacctcgtcattaaagacaaatttatcagaagatgggtgcacaaagaaggctttagtggcttcaagaggtatgtgaccgctgccgaggacaaggagcttgaagccaagatcgcagttgttgaaaagtataacatcaggattccagagctggtgcaaaggatagaaaaatgccatatagaagatttggactttgcagagtacattctgggcactgtgcacaaagccaaaggcctggagtttgacactgtgcatgttttggatgattttgtgaaagtgccttgtgcccggcataacctgccccagcttccgcacttcagagttgagtcattttctgaggatgaatggaatttactgtatgttgcagtaactcgagccaagaagcgtctcatcatgaccaaatcattggaaaacattttgactttggctggggagtacttcttgcaagcagagctgacaagcaacgtcttaaaaacaggcgtggtgcgctgctgcgtgggacagtgcaacaatgccatccctgttgacaccgtccttaccatgaagaagctgcccatcacctatagcaacaggaaggaaaacaaggggggctacctctgccactcctgtgcggagcagcgcatcgggcccctggcgttcctgacagcctccccggagcaggtgcgcgccatggagcgcactgtggagaacatcgtactgccccggcatgaggccctgctcttcctcgtcttctgaggacaaagcgcacgttctccgcagtgcagagcagcttgccgaggaccccgcgtgaagaaagccagcgaaggggggcttctgctccctgagactctgggttcacccacagcactttc

SEQ ID NO: 187742 - DNA, 1610 bp, Homo Sapiens
gccaactttgtacaaaaaagttggcctcggacgacgagaacagcgacaacagcaacgagtgtgtggtgtgcctgtccgacctgcgggacacgctgatcctgccctgccgccacctgtgcctctgtacctcctgcgccgacacgctgcgctaccaggccaacaactgccccatctgccggctgcaactctgacagcgtcccacctggctacgagcccatctcgctgctcgaggcgctcaacggcctccgggctgtctccccggccatcccctcggcccctctttatgaagaaatcacctattcaggcatctcggacggcctgtcccaggccagctgtcccctcgcggctatcgaccacatcctggacagcagccgccagaagggcaggccgcagagcaaggcccccgacagcaccctacggtccccgtcttcccccatccacgaagaggatgaggagaagctctccgaggacgtggcgcccctcccccactgggtggcgcagagctggccctgcgggaaagcagctcccctgagagtttcataacagaagaggttgatgagtcgtcgtcaccacagcaagggacccgagcagcttccattgagaatgtcctgcaggacagcagccccgagcactgtggccgaggcccacctgctgacatctacctgccaggacggcccacctccatggagacggcccacggcctcgccaccaccagccccacctggcctccacttggtggccccagccccgatcccagcgccgccgagctgaccccactctgagagcctggccgagctggcagcatggagccctcggctccccagactttgccgaggggctgctccggaccccgttgtgagccggcctcctgtctgcatgccccctgtggccaccaggctccgaggggccgtggtgactcttgatcaaagagcacagtgaactgtcccttctgagtctcccttttctacagttgatatatttgtaactggtacaagatgaaggacagcagctttccatccctagttcagagcccccgttccccagggtcctgtgggctgagcggctggggctggggctgcccacgtgtggcctccgctggctctgcctgctcctgcaacagtgcggtccctgcccggagaactcaggaggcctgcagaagagaactgattggtggtcgaagcaccatcttcacagatgttcaggggcagtggggggctccaggcacggtcaatgaaggaaacagtgcctgtccacccaccctgcgtgtcactgtggcggcctggctgtcgctgctttttgtcctctgccgtgtttgcgcggcctcagtgccctccctggtgcgtctgcgctggggccctcagtgctcggggccttggggtgcatgggcgccgccctgggcagctagagtgtctcagcccggtgctgggcctggccgaggggcggaggcacagctgcttccagcagccagcattcagtggccttgtcaccaagctccacacctcctcctggtgctggctttggtgacatcacaaggcccctccaggtgcaggggcttctgtttggcaggcccctgccagggaggacctggtggcctcctcattctcttttgc

SEQ ID NO: 187743 - DNA, 1033 bp, Homo Sapiens
  misc_feature (854)..(894): n is a, c, g, or t
cccgggacacggtgggcatggagagcccctcgttcccgccgccccccgtcccttgaccttgtccgacgatgtggcgatctctgccaaagaccacagtttgggcttggcgagcaccgcaggaggcggcggcggaggcgggcgaatggataaccgagggcccgccgggacccggaggcacctcgcccgcggctggatgcgggccgggcgccggcgctccggcggggtagtgaggggccgggtcctccgccagccgcgccgccgctggcccagccggggagggcccgccggtgcggggggggccctgcagcgcgtcgaggcggccctccgagggcgtctccttaaaatccgagtcgctgaggctgccctccgtctccttgcctgcaggggtgggtggtccctgaagccgttcgcagcccgaagccgccttctgctcagctcctcctgcttcggggccctcggggtcgcccttgtcctcgggcttctggggctcgtcctcgtcgttcttctccaggtcaatgttctcctcctcttcctcgtcctcgctgcggttccgcggcgtccacgtcattttattctctttcttgaggcgccggcgcgcgttggcgaaccaggtggacacctgggtgagggtcatcttggtgatgatggccagcatgatcttctcgcccttggtggggtaggggttcttgcggtgctcgttgagccaggccttgagggtagccgtggcgtcccttgtggcgttcttccggtacgctgggtccccgtaagggtacgatcccaggggcgccgcgtaaggatggtaccccaaggagcccgccatgccgggtgtgtggtcgtagggagcccccacgtannnnnnnnnnnnnnnnnnnnnnnnnnnnnnnnnnnnnnnnncgtactggaggtgcgagttgtagcccggcgagggcgccgtgaaggcagtcgagccagcgtagggcgagaacgcggagcccgaagaagagcggccgagctcatccgtgcggggccccgaaatgacgctggtgctgtccaa

SEQ ID NO: 187744 - DNA, 1060 bp, Homo Sapiens
  misc_feature (232)..(279): n is a, c, g, or t
  misc_feature (707)..(729): n is a, c, g, or t
ttggccctaccccaccaagggcgagaagatcatgctggccatcatcaccaagatgaccctcacccaggtgtccacctggttcgccaacgcgcgccggcgcctcaagaaggagaataagatgacttgggcgcctcgcagccgcactgacgaggagggaaacgcttatgggagcgagcgcgaggaggaagacgaagaggaggacgaggaggacggcaaacgcgagctagagctnnnnnnnnnnnnnnnnnnnnnnnnnnnnnnnnnnnnnnnnnnnnnnnncctggctgacgacgacgaggacgaggagatcgatttggagaacttagacggcgcggccaccgagcctgagctgtccctggctggggcggcgcgcagggatggcgacctaggcctgggacccatttcggactccaaaaatagcgactcggaagatagctctgagggcttagaggaccggccactaccggtcctgagtctggctccagcgccaccaccagtggccgtggcctcgccgtctctgccgtcgccccccgtgagcctggacccctgcgctcccgcaccagcccccgcctccgccctgcagaagcccaagatctggtccctcgcggagactgccacaagcccggacaacccgcgccgctcgcctcccggcgcgggggggtctccaccgggggcagcggtcgcgccttccgccctgcagctctctnnnnnnnnnnnnnnnnnnnnnnntcacagactggtctcagcgccgctgggcaagttcccggcttggaccaaccggccgtttccaggcccaccgcccggcccccgcccgcacccgctctccctgctgggctctgcccctccgcacctgctgggacttcccggagccgcgggccacccggctgccgccgccgccttcgctcggccagcggagcccgaaggcggaacagatcgctgtagtgccttggaagtggagaaaaagttactcaagacagctttccagcccgtgcccaggcggccccagaaccatctggacgccgccctggtcttatcggctctctcctcatcctagttcttt

SEQ ID NO: 187745 - DNA, 1897 bp, Homo Sapiens
gctttcccttataatggccaactttgtacaaaaaagttggcggaaagcgtcgaaaagagaacattggttcttagagaccgaaatctctctggcatggctgaaaggaagacccagccgagcatggtgagtaatccaggcagctgcagcgacccccagcccagccccgagatgaagccgcattcctacctggatgccatcaggagtggccttgatgacgtggaggccagcagctcctacagcaacgagcagcagctgtgcccctacgcagctgctggggagtgccggtttggggatgcctgtgtctacctgcacggggaggtgtgtgaaatctgtaggctgcaagtcttgcacccattcgacccacagcagaagaaggctcatgaaaagatctgcatgttgacgttcgaacacgagatggaaaaggcctttgccttccaggcaagccaggacaaagtgtgcagtatctgcatggaagtgatcctggagaaggcctctgcttctgagaggagatttgggattctctccaattgcaatcacacgtactgtttgtcctgcatccggcagtggcggtgtgccaaacagtttgaaaacccaatcattaagtcttgtccagaatgccgtgtgatatcagagtttgtaattccaagtgtgtattgggtggaagatcagaataaaaagaacgagttgattgaagctttcaaacaggggatggggaaaaaagcctgtaaatactttgagcaaggcaaggggacctgcccatttggaagcaaatgtctttatcgccatgcttaccccgatgggcggctagcagagcctgagaaacctcggaaacagctcagttctcaaggcactgtgaggttctttaattcagtgcggctctgggatttcatcgagaaccgagaaagccggcatgtccccaacaatgaagatgtcgacatgacagagctcggggacctcttcatgcacctttctggagtggaatcatcagaaccctaaagagtagatggttgccctgcatcttgggctccatcggccgaaactttcccaagccagggtgtgcggagcttccctgtactgcagccaaggtgacgtgtgacttggatttgagtggagttgggcttagccttagtctcattcaatctccattattacagccatggggaagagtgaaagatataaagtaacctaattaaatgtatggaattgctatttttatagctgatatagttacacctcaagcccctcaggggtaacaactaacaaacacccaaactgtttggattgattgctttaaaaaacaaacctggctcttacctttgatcttttcttccccagaaatagtaaacttgcagctgcccctaatgcagcatatttttcttaccaaaggagtcttcagccctataaaaggattcctctatagtgtatttctctagtgtatttagtgtgtcgtcaaaattttgatttatacagagctttcaagaacacacaatgcaaagtgagcgcagcatagctgttaacaaacatacaacttttttctagggctttaagggtggtcatttttttcaagttctctcaagtgtcccaaatcagggtagcaatcttgttgccacatgtgcagcaaacaaagtggaagtatagatcttcttctcccttagggaggctcttgaaggagcaggaggtacagtactgggtagcagtctggccctcctgtcgtctggttggtgttggggcctccagccagggccctctatgggaaccaagcctctgctctcacctgtgggttcttgcccatcagggtaattgtattgagaactcaaatatacgtgcacttacatgtgtggttcgtactcaagtgatctattatctagctgcaaagcctggctttgatttgaaattt

SEQ ID NO: 187746 - DNA, 974 bp, Homo Sapiens
ttggcgacgtcgcagccgagggaacaagccccaaccggatcctggacaggcaccccggcttggcgctgtctctccccctcggctcggagaggcccttcggcctgagggagcctcgccgcccgtccccggcacacgcgcagccccggcctctcggcctctgccggagaaacagttgggacccctgattttagcaggatggcccaatggaatcagctacagcagcttgacacacggtacctggagcagctccatcagctctacagtgacagcttcccaatggagctgcggcagtttctggccccttggattgagagtcaagattgggcatatgcggccagcaaagaatcacatgccactttggtgtttcataatctcctgggagagattgaccagcagtatagccgcttcctgcaagagtcgaatgttctctatcagcacaatctacgaagaatcaagcagtttcttcagagcaggtatcttgagaagccaatggagattgcccggattgtggcccggtgcctgtgggaagaatcacgccttctacagactgcagccactgcggcccagcaagggggccaggccaaccaccccacagcagccgtggtgacggagaagcagcagatgctggagcagcaccttcaggatgtccggaagagagtgcaggatctagaacagaaaatgaaagtggtagagaatctccaggatgactttgatttcaactataaaaccctcaagagtcaaggagacatgcaagatctgaatggaaacaaccagtcagtgaccaggcagaagatgcagcagctggaacagatgctcactgcgctggaccagatgcggagaagcatcgtgagtgagctggcggggcttttgtcagcgatggagtacgtgcagaaaactctcacggacgaggagctggctgactggaagaggcggcaacagattgcctgcattggaggcccgcccaacatctgcct

SEQ ID NO: 187747 - DNA, 732 bp, Homo Sapiens
ctttgtacaaaaaagttggagaagtaatacgattatttttggcaaaaatttcacaagacttattttaatgacaatgtagcttgaaagcgatgaagaatgtctctagaagagaatgaaggattgaagaattcaccattagaggacatttagcgtgatgaaataaagcatctacgtcagcaggccatactgtgttggggcaaaggtgtcccgtgtagcactcagataagtatacagcgacaatcctgttttctacaagaatcctgtctagtaaataggatcatttattgggcagttgggaaatcagctctctgtcctgttgagtgttttcagcagctgctcctaaaccagtcctcctgccagaaaggaccagtgccgtcacatcgctgtctctgattgtccccggcaccagcaggcccttggggggctcacctgaaggctcgaaggcactgcacacttgtatattgtcagtgaagaactgttagttggttgtcagtgaacaataactttattatatgagtttttgtagcatcttaagaattatacatatgtttgaaatattgaaactaagctacggtaccagtaattagatgtagaatcttgtttgtaggctgaattttaatctgtatttattgtcttttgtatctcagaaattagaaacttgctacagacttacccgtaatatttgtcaagatcatagctgactttaaaaacagttgtaataaacttttttga

SEQ ID NO: 187748 - DNA, 1212 bp, Homo Sapiens
ttggcccagacaacagcccaaatctccagaataacccagaagaaccaaatccagaggctccacatgtgcttgatgtgtacctggaggagtaccctccatacccacccccaccatacccatctggggagcctgaagggcccggagaagactcggtgagcatgcgcccgcctgaaatcaccgggcaggtctctctgcctcctggtaaaaggacaaacttgcgtaaaactggctcagagcgtatcgctcatggaatgagggtgaaattcaacccccttgctttactgctagattcgtctttggagggagaatttgaccttgtacagagaattatttatgaggttgatgacccaagcctccccaatgatgaaggcatcacggctcttcacaatgctgtgtgtgcaggccacacagaaatcgttaagttcctggtacagtttggtgtaaatgtaaatgctgctgatagtgatggatggactccattacattgtgctgcctcatgtaacaacgtccaagtgtgtaagtttttggtggagtcaggagccgctgtgtttgccatgacctacagtgacatgcagactgctgcagataagtgcgaggaaatggaggaaggctacactcagtgctcccaatttctttatggagttcaggagaagatgggcataatgaataaaggagtcatttatgcgctttgggattatgaacctcagaatgatgatgagctgcccatgaaagaaggagactgcatgacaatcatccacagggaagacgaagatgaaatcgaatggtggtgggcgcgccttaatgataaggagggatatgttccacgtaacttgctgggactgtacccaagaattaaaccaagacaaaggagcttggcctgaaacttccacacagaattttagtcaatgaagaattaatctctgttaagaagaagtaatacgattatttttggcaaaaatttcacaagacttattttaatgacaatgtagcttgaaagcgatgaagaatgtctctagaagagaatgaaggattgaagaattcaccattagaggacatttagcgtgatgaaaataaagcatctacgtcagcaagccatactgtgttggggcaagggtgtcccgtgtagcactcagataagtatacagcgacaatcctgttttctacaagaatcctgtctagtaaataggatcatttattggggaagttggggaa

SEQ ID NO: 187749 - DNA, 1650 bp, Homo Sapiens
ttggcaaagaaataatttcatctgaaatgttagctacttccattgatggcatggaaagaccaggaaatttaaataaagtagtggagcagagacagaatgttggaacacttgaaagtttctctccaggagattttagaactaatatgaatgttgttcatcaaaacaagcagttagagagctgcaatggtgaaaagcctccttgtctggagattctaacaaatgggtttgcagtgttggaaactgtaaatcctcagggaacagatgatctggacaatgtagctgattcaaagggacggaagcctcttagcactcatagcactgagtataatttagactctgtacctagtcctgctgaggaatttgcagattttgccacattttccaaaaaggaaaggatacaattagaagaaatagaatgtgcagttttaaatgatagagaagcactaaccattcgggaaaacaataaaattaatagagtcaatgaactgaattctgtaaaagaagtggctttgggtagaagcttggataacaaaggagacactgatggagaggatcaggtttgtgtttcagaaataagcatagtgactaacagaggtttcagtgttgaaaaacaaggccttccaacactgcaacaggatgaatttttacagtcaggtgttcagtcaaaggcttggagtttggtagactcagctgataattcagaagccattaggagagaacaatgtaaaactgaagaaaaacttgacttacttacttctaaatgtgctcacctatgcatggattctgttaaaacttctgatgatgaagttggttctcccaaagaagaaagtagaaagtttactaatttccaaagcccaaacattgaccccacagaagaaaatgatttggatgattctttaagtgtaaaaaatggtgatagtagtaatgactttgtgacttgcaatgatatcaatgaagatgattttggtgattttggtgactttggctctgccagtggctcaactccaccttttgttactggtactcaagattcaatgagtgatgccacttttgaagagtcttcagagcactttccacattttagtgaaccaggtgatgactttggagaatttggggatataaatgctgtttcttgccaagaggagacaatattaacaaagtcagacctaaaacagacttctgataatttatcagaagaatgtcaattggcaagaaaatctagtggaacaggcactgaacctgttgcaaaacttaaaaatgggcaagaaggtgagattggacattttgattctgtgccaaatattcaggatgactgcaatggttttcaagactctgatgattttgcagacttcagttcagctggtcctagccaagttgtagattggaatgcttttgaggatgaacaaaaagatagttgttcttgggctgcttttggagaccagcaactactgaatctcatcatcgaaaggaagcctggcagtcacataggacagatgaaaatattgatactccaggaacccccaaaacgcacagtgtaccttcagcaacttccaaaggagcagttgctagtggccatttacaggatcagccacttcagttcagacagctttattaaaccgcctggagcgattttcgaagcatgttttcctt

SEQ ID NO: 187750 - DNA, 1060 bp, Homo Sapiens
gtagagactcctggaactgatcagatgtacatgtgttcatatctggtgacatggtggctgtctgaccgatggaagctattttttctgcagcagaaagggtttcagtggttccttggtgggctctaacatacccaatcctgctgcatacatgggcactataacaggctgcttcttattgcccgtgaagagaatgtttcgggtgtctattcccaaggaggacaaaagcttcttgttgctatgggagccgccccactggtatctcaagccatgtgcatcatggatatcctgtagctcagtccacacatctagcaattccccactttcaggtaaggcctctctcgtttttattggcaaagtgcttgtttccagcaagtgcttcagggaagtaacttcctcttcagcatcagggacaagtatggaaggaaaacatgcttcgaaaattcgctccaggcggtttaataaagctgtctgaactgaagtggctgattcctgtaaatggccactagcaactgctcctttggaagttgctgaaggtacactgtgcgttttgggggttcctggagtatcaatattttcatctgtcctatgtgactgccaggcttcctttcgatgatgagattcagtagcctgctggtctccaaaagcagcccaagaacaactatctttttgttcatcctcaaaagcattccaatctacaacttggctaggaccagctgaactgaagtctgcaaaatcatcagagtcttgaaaaccattgcagtcatcctgaatatttggcacagaatcaaaatgtccaatctcaccttcttgcccatttttaagttttgcaacaggttcagtgcctgttccactagattttcttgccaactgacattcttctgataaattatcagaagtctgttttaggtctgactttgttaatattgtctcctcttggcaagaaacagcatttatatccccaaattctccaaagtcatcacctggttcactaaaatgtggaaagtgctctgaagactcttcaaaagtggccaacttttttgtacaaagttggtttttatag

SEQ ID NO: 187751 - DNA, 1897 bp, Homo Sapiens
taggttcattaaataacgtgatgacagctgtggcaatcaggcatgtggtacccagcaagttatcttctttttcatcagagaagaggctcgcatgcttctgaactggcacagatccactggttgggatgattggatagccatccggagaggcatgggagcagtcgtgaggtccaaagagaacattctccaatctctcagcactgggcagcggtccgctcttcttcactccggctgcaacttcagacttgagcagaggcatctctcgggcctgctggattaaaaggtgcatttcgttgatctgctgccgcacaaggggcggtactgggttgcagcaagctatgatgccctgaggttccttaggcagttcttcagctattttcagcatcatgtggtttggcagtacatatccgtaactttcatcttccctgcgagctgttttatccctccaggcaaacagcagctgaaaggctgtcaactgctgtgtgttaaggtgcttcttctgcttcctatagagttcaaggtaggactcatccgtgaagataggtttgatgaatttcttgaggcagatgtccctgctccgttgccacaccacctgcagctgcacgggctgcccgttgccgcgctcccacatctccagcctcattttgtcatagatatatagcaggtaatgggtgtcatcccgggcgtagctgagcatctcctcgggcagagggcgtattctccaatcagccagctgatattgcttgtttgagtccacgttgcagtagagtttcaggagatgatcgagtgagtgcctgcccaggttaagaaggcgtgctgcctgatgagtatcaaacatgtttactacatacaacccaaagtctttctgtagccattctatgtctgaatcagcaccatgaaagaccttaacgatggctgggtctgtgaggctctcattgagaatgtacatgtcacttcgaagctcgagggtgtcaatgatgaagtcttccgtccgagtagaaatttgcatcaggcaggtcagtcccaggaagctcctgtaagagtggtgctccaagtcaactgcaaattcctgacaattcaagagcttttcgttgagttccacgagttcatccagggaggatatgaaatggcatggtgtctcttctataggtctgtataactggggttgtggcttttgaagcactgcatctgctggggtaaagtgatttagttcatattgataaggatgtgcaaacatgtcttgctcaacctgctgggttctctgctgatggatgaaatcagccagtgcaggggggacgtccaagtcctcaggacgatcctgtgggcgttcccgcctttccttagagagagcttgagggagaggtttctgagcattgggtttgatgaagattttaggaagaaatggtgtgttggaattgtcaatcttctctcgaaacttgagctgaggtcggatgatattttttgcatgaagcagccggaaagtttcagattttgcttttttgccatattctgctgccttacggttccagctggacactaccgttttggggacctgcaagccggcagggaggacaggctgttgattcttgtttacacctgaggcttcatccagtaaaatacccactctctccagaattacatcattggcatcaactagtaaatcaaacttgtcttccagctcagtcactttacttcgatccttaatgttgctgcgacacccatggtactgcattactctgctcatgcactgaagcaacctgtctccctgtgtttcgcaaaatgcttggaagccaggaaaacttcggtaaaaatcatactcatcgccaaactgtggtaggcccccagatgccttggtgactgccaccacggacccaagagcaaagttcacaaagcccaa

SEQ ID NO: 187752 - DNA, 1073 bp, Homo Sapiens
  misc_feature (92)..(102): n is a, c, g, or t
ctttgtacaaaaaagttggatcttagctgcctgaccttgcacttgtcaaaaatgtaaagctgaaaataaaaccagggtttctatttatctgnnnnnnnnnnnaatgttgcacttgtagtttcattacaaaagatcagatcatgaaaggcagtaactctccaggactggaatatctgattgctcagtgttaatagtagttcatgctgtggtgagattgttaaaagggtgcaagactgttgcttctctttttttagatatttttctatctctcacttctcagggatgaaattctttttcaaagttttgaagttccttgcaacttagccatgatgtgagtggttatccctagataaaattaaaaggatttttaaaaagtaattactgcacataaaatgataaataggtaatttgaataattttattttaagctccttggttaattattttgtctattgtctcagctataaattcaaatttatacatactattgagtattaatattctctgatttcagggagaattctgtcagtcacatgatgattatgtttttgtttaacattctttccatgcacttgttattttattaatttgcctgaatgatgagaccagaccagtgtctacagattttcattgtcagaaaaatctataagtctgccctttttacaatgatgatttaaaaaaaacaacagcgtaaatattagcccacaagagcagtcctaaacaatcacaattacactgtactacccaagaagactgtttattgtgaagcatttacctttcaaaaaatcattacatttctatttcttggtggagcagcacattgtggagtgtgattcttaattcttcattgagtttgtcaataggacattgatgctggataggttgtcttttgtttttatgtctcagaccatcttgtgagattgtttgcctatctcataatacagttttatgcagaaaggttgaaactatgtaaatggtttttatggaaattatcaattacaatattttaaaggtgtagaatggcatctttgtttataggagaacatttgtaaataaaagttaaatttctaagt

SEQ ID NO: 187753 - DNA, 946 bp, Homo Sapiens
tgttcttcttttgatttcttaaactccaggaatttagatttgtctttctcgatgtctgtctctgtacactcattttcacagaggatttccagtgcagtcaagacatcctctttctttttctctaggataactgaagaagatccacgggcgggcaaaaaccttcttgatgaccgagtcaccgattttagtttaaggatagtgctgtttaccagttctatatttaaagtggaaatactgtggtttgttagttcatcttccatcttcattcttgtttgtagtagatctttccatcgttgataaatatgtgagtttacagagatacacaacatattttccattcctttgagagcttgatagaaagcccagaaagtttcaatgagtggatctcctgggctttccactgaagagagtaatagaaacactaccaaaaattttcctcttgtcattatattttcatctgtgagaaataaaattagtttcctgacttctgaagctctttctctctgccataaatgtggttctagaggtttatatgtctcgcttttcaggtctgatctgccgttgcagaaaatccagctgggctgttggtaaagattaagagtagaaatcttctcccacatgttagttgtcttgtcttcatattgatttggaaagtgaaggtttgccacccgactttctttgtaagctttgaccactccattgatcatagattcaggatcaaactccaacacagcaaaccatttaatttcttttaaaaaatctaagtgctttatttggtttggatggcatttatttgttacaagaatgtaccagtcatagtatgaattatccagtgagtctcggtttcctatgagaagtttaaccagctttagtccttcactctccttcttcattgccttcattccatactcttcttcagcctcttttctagatgctaccagtccaa

SEQ ID NO: 187754 - DNA, 1351 bp, Homo Sapiens
ttggaaccaccatcattagacaagatcttggaagtccagaaggtatcgctgttgatcaccttggccgcaacatcttctggacagactctaacctggatcgaatagaagtggcgaagctggacggcacgcagcgccgggtgctctttgagactgacctggtgaatcccagaggcattgtaacggattccgtgagagggaacctttactggacagactggaacagagataaccccaagattgaaacttcctacatggacggcacgaaccggaggatccttgtgcaggatgacctgggcttgcccaatggactgaccttcgatgcgttctcatctcagctctgctgggtggatgcaggcaccaatcgggcggaatgcctgaaccccagtcagcccagcagacgcaaggctctcgaagggctccagtatccttttgctgtgacgagctacgggaagaatctgtatttcacagactggaagatgaattccgtggttgctctcgatcttgcaatttccaaggagacggatgctttccaaccccacaagcagacccggctgtatggcatcaccacggccctgtctcagtgtccgcaaggccataactactgctcagtgaacaatggcggctgcacccacctatgcttggccaccccagggagcaggacctgccgttgccctgacaacaccttgggagttgactgtatcgaacggaaatgaagacaagagtgccttatttcctttccaagtatttcacagcaacactctacttgaagcaacttggtccagattgaaaagtgtcctctggctgagtggccactaggcccagacccagcccagcctgagccccaacaacttttccctcactgttccccaaaacatgcaccctggacttctctaatagaaaagtctccacccctacacaaggacagaaccctccacccctacccccaaccctcagacagacttatacacccctgagtgaggattacatgcccatcccagtgtcctaggaccttttcccaatactagccccccagtggtgaacagaacctcccaaatttgagttgcacccttccctgtggccttatgagctcagcctcgctttgaggtacccaccgtcctgtcagctccttgacctatgagccggggcctgactaggaaaagttgggagttaaggaggaaattagcattccttaatgttttgttttggtgctctgaatttcttctttattatagtcctatagttttactcctcagttcctcaccatcatcatcttgtctaagacccccattataatattcatgcgctgctttttcatcaaaacctaccctgtcctagagatctatgggcattt

SEQ ID NO: 187755 - DNA, 1168 bp, Homo Sapiens
ataattccccgccacttcttcgggcccgggagagctgttccagctgggaggcgttccccgcactataggaccgcttcctcacaccacagacattgatctgggatgcagccctttggtttttcagctgtgagaccaactgccttttctcttcttgcaagacagagatctttacctggagcacagggatggttcgcacctgctcctccagctccttcaggcgtttcagagcaatggccatctgctcgcggatgtgctgcaggtgcatggggctcacgttggtcactggggtggagatccctgagctcagggggctgtggcggatggagctccccatggaggaagtggtgggagcagctggggcatagctaccataatccccattaccttggtatccattctgaagctggtgcttggcaggattgtggtttccagaacccacaaaagaagggagggagcttgtggtgcccatgcctccaaaactggccagcctgggccttctgaactcacccggtgtcatctgcatggtggctctctcctgttccagtcttctccgggtctccatcagtgtcttggtgacatgaaggttatgctttgggagttgtggtgagggaggtggcagctgtcgattttctgggatggtaagaaaagggagtgaggtctccagagggggaggtggctttgagattggagttgatgtaacttgacttctggctatgaggaagttggggcactgcttgttgtcatcactgttggaggatgagagggattcagtggaagtccatataccttgctgaccagatgtggtcctgggttctgggcatggcacggacggcttccgcctcttctggatgttcagtcttttgatggtatttcccttctgtatgtcatccacatatttgaggaaatctaagtctagttgataaccatagggggtctccacaaagtaagggtctttctgttccttgtcctggtctccactgagaatatcacctgcttttcatttaacacacaaactccagagcacagggttacctgaggcactgccgttaacctttgtggtgtgagccatgctggcttgagtccaatgagagatccagaaaggagtgaggagtcatgcaaattttatgcatcaagttctcaaaggcattcaaccttcggccgctcccaa

SEQ ID NO: 187756 - DNA, 1749 bp, Homo Sapiens
ttttctctgtcctctgttagtctttagctgagtagactttgatgctgggttgcttttacacccctgagtggagtcatatatacttctttattcttttcatcttcattttggaaagtagttgtagtcaaggtggcatcctgtgctgcttcagcttggtcaccaaattctttatttcctttttctaactgaatcttgattttctccaaagctctcagacatgtcctatcttttacttgctccagaatctcattcaatagaaccagaagatcttttgcaagatggctactgagttctaaagaactcaaggcttttgtatagactcgaatttctggcgagcacggacttgttaagatctcattgcaaattttcatagccaaattgtcatgtactgttaaggcctgataatcttgggaagtcttggcctgaggatttaatccacttggtcttgtcaaatctacaagtaactcagcaacatttgtgatatcaatttcagctaaaggagaagatgcaggggcattggccagtgtttgcagggttggaagaaaagcttcttcaaagcattcctgattagtcctgcttgcataagcaaacacggggaagaacacgcctaggcaatgtcgaagttgaacatcctcttcagtcacaggattgtaccataacaaaataagacgagaaagaatcctgctgctgaccaaaagcccagagaacatcagcttggctagtccttctgcagctccagtcctaagttcagatacctcactatctaagaaatcagaaaggagtttcagaacattcttagctgtagcagtctcttcaacttcttttgattcttgctcatcatcactgtttatttctgtaccttcacaatgaagtgttttgatttttttagttttaaatggttcaatcccgaacgtcatcagttggtcaaagattgcctttaaagcacttatttttattgtgacatcatcaatttgcaaaacctgcaatagtaatacgaagtgtttccttgcaaaatcctgattctgtagtccacagcatcccaagcataaaacagccaggtttcttacaacaggatgaatacttattattccaggaagaatcaaagattcgatgattccattcatggttgcacttaagcctgttgaaatggacatctgcttcaacagttcatagcataaaataagacatttctgcaatgtttcagcatcattctccttctctatgtggacttctttaatttcaagttgctctgtctctttcaaaaggtttattctggcatcttctaatgcttttatttcttcttttaattctgatgcccgattaaaatcctgtaaggtaatgcaattttccaaagcttctttggcttcgataagcttaacttttatttcagccatcttgagttctttctttcttacatcagctggatcgttattaacaccaacagtaacaatgggcgcccgaatctctgagataatttctgtaacaatttgtgttctcttattatcatctataatgatgtggagtagtctttcaacaagaaaagaaaccagggatattgggattgtgggtaaaataagaatctcctgtaaaacagccagcagtttttttcttcctccttcttcactggtatccaaagacttaataattagaatcaattgttgacctatgaattcttttgtcatcaaatttccaatataggaaaaatcacctctgtgttcttcattaacaactggaatgctctggatccaa

SEQ ID NO: 187757 - DNA, 1410 bp, Homo Sapiens
ttggcattggcccgagcgacttctaggagcctggggttcggcgctatggaggagctcgatggcgagccaacagtcactttgattccaggcgtgaattccaagaagaaccaaatgtattttgactggggtccaggggagatgctggtatgtgaaacctccttcaacaaaaaagaaaaatcagagatggtgccaagttgcccctttatctatatcatccgtaaggatgtagatgtttactctcaaatcttgagaaaactcttcaatgaatcccatggaatctttctgggcctccagagaattgacgaagagttgactggaaaatccagaaaatctcaattggttcgagtgagtaaaaactaccgatcagtcatcagagcatgtatggaggaaatgcaccaggttgcaattgctgctaaagatccagccaatggccgccagttcagcagccaggtctccattttgtcagcaatggagctcatctggaacctgtgtgagattctttttattgaagtggccccagctggccctctcctcctccatctccttgactgggtccggctccatgtgtgcgaggtggacagtttgtcggcagatgttctgggcagtgagaatccaagcaaacatgacagcttctggaacttggtgaccatcttggtgctgcagggccggctggatgaggcccgacagatgctctccaaggaagccgatgccagccccgcctctgcaggcatatgccgaatcatgggggacctgatgaggacaatgcccattcttagtcctgggaacacccagacactgacagagctggagctgaagtggcagcactggcacgaggaatgtgagcggtacctccaggacagcacattcgccaccagccctcacctggagtctctcttgaagattatgctgggagacgaagctgccttgttagagcagaaggaacttctgagtaattggtatcatttcctagtgactcggctcttgtactccaatcccacagtaaaacccattgatctgcactactatgcccagtccagcctggacctgtttctgggaggtgagagcagcccagaacccctggacaacatcttgttggcagcctttgagtttgacatccatcaagtaatcaaagagtgcaggaataaaacagatttgagcagaagaagtctgttggatgcagggagtataaaaggggaaagcatcctgctgtttccagtggcagaagagaaagagaagtaccatgaagaggggtgaacaacatcactctcgtgccggacacagacaaggaatgattagcttgcagtcccccagtctcagcctctctccactctcacaagcagaagggatctgagctctgttagtgggaaatcttggagtttgcatttctctgatcacgaggctacctcctat

SEQ ID NO: 187758 - DNA, 990 bp, Homo Sapiens
aaattcctttacaatgtttccagtttaatttatactgaccaagaaggcagttttctaattcagtaaataaatctaatccagttatatgtgaatttaaatttaaacaacataagagatcctctacaaaatcatcttgccacacatatctgacataaaccaagagtgtgggacaacttgcaatatcagtgctctcatcgagttggattgcaaagtctataccggactgcagccgtgtaataagcattgcttccaaatgttttgcaatcgtacagattcgacgagatattgtattatcactaagaggtatagttcttagtttatcagctgatttgtcatcaaaaattgtccgtaccatgtccatacatgctggaaggataattttttcagccgctgtgtgagccattttctcttttgccactctatatgcaactaaatacgatgacaataaggctctctcattcatagttgtagagcgactgagaacttgtggcgatgactctactttgtttctttccttttgaaaatggtcttcttcatcttcctcctccaccttcactatcacgatgccttccatctcctgggtaccccctggagacaaatctgtagtatcccttgattcaggagtcattattcaggttccaggaactggctcacttgatccaaatagggtctgttttgcagggctgtcctttgtgacctaggttttatgagatcaggttttgctatcctgtatccagggacacctctgctgggggacagcgcttgccaccgccgaggctggcgcgaggaacgggggcacggacccgcttccactccgtcccgggcggtcgtggcgaggggattgcaggacacagccatgcacgtccaactctgtccccgcccggagaagtctgggatgctgggatagaaggggttgtgactttggggaccaggagcactagactcacatccaagccccctggccttcagagcccagggaaagcgtcccaa

SEQ ID NO: 187759 - DNA, 1461 bp, Homo Sapiens
gcatcccgctgaaagccggctttgcagtcacagcggtaggagccagggaggttgtggcacacttggccctcaccgcagcggtgcacacctgtctcacactcattcacgtccacacacttggccccatcatcgctggcgtggtagccgcgcgcgcagatcagcgggttcctctggcacgtgtaggagcccaccgtgttgatgcagctgaagcctggccgacatggctcggacagtgacgtgcactcgttgatgtccacacagttgccttcaggatcctgcaggaagccatccatgcagcgctgcctggcctggcagtagaaggagcccttggtgttctggcacaagaagcccggctggcaggtgtgcgtgcccatcgcacactcatccacgtcttcgcactcgccatccttgagggcatagcctggctcacaggtgagtgccttgtagcagtggaaggagcccagtgtgttcacacagtgctcgccccggctgcacgtgtgcaggtccgtcacacactcgttgatgtcttcacaggacacgccatccgccatgatggcatagccgggaaaacaggagcatatggctgagcccccaacagtgctgcacacctgcttgcagggtccattgtctttgcaggtattgggctgcggcagtggcagcgggatggtgttagaggccacctgggaaaattctgacttcagtgcaggctcctgtggggcttccggctgtggagggtgaccctctgggcggcaagtgcggccatcgtcctgcagtgagaagccaggaaagcaggcacagtggtaagaacccacagtattgatgcaaaggtgctggcacagctctcccgggaggagaaggcactcatcctggtcatcgcccggcaggctgttcggcagctcggcctctgtgcccagtgacagggcctctcggcccgccatctctgcctctgaaactctccgtggtgcagctgcgggctctggaggtcggcgaacctcaggtactatgagaggctcttcaccctcacagcaggagagcatgacatgattgcagggatagcccaggttaggattggactcacacgactggccctcggcccgcacgcggaggcccaggccacagcagtcacagcattgctgcagggagagacagttatcactgcccaatctctggccccagcctggagctaggctcaggggagggactgataaatggagatgaattcaccattatcttatctcctctgccagactatgcgctctcccagggcagaggggtcctctgcctctatttcccaagtctggcacaggtaggactaatgtaagtcttttgaaacagataacaagtaaatggcctttagttgaaggaactataaccccccagccacactcattatcccctcatgtttactagcaaaccccaattctattcaagtcaagttaaaagatggccaacttttttgta

SEQ ID NO: 187760 - DNA, 1887 bp, Homo Sapiens
tttgtacaaaaaagttggcagcactgttcctgttgtggctcagccatatgctcctgttttcccggctatgccatcatggcggatggcgtgtcctgtgaagaccaagacgagtgcctgatgggtgctcacgattgtagccggcgacagttctgtgtgaacaccctgggatccttctactgtgtcaaccacacagtgctctgtgccgatggctatatcctcaatgcgcacaggaagtgcgtggacatcaacgagtgtgtgacggacctgcacacgtgcagccggggcgagcactgtgtgaacacactgggctccttccactgctacaaggcactcacctgtgagccaggctatgccctcaaggatggcgagtgcgaagacgtggatgagtgtgcgatgggcacgcacacctgccagccgggcttcttgtgccagaacaccaagggctccttctactgccaggccaggcagcgctgcatggatggcttcctgcaggatcctgaaggcaactgtgtggacatcaacgagtgcacgtcactgtccgagccatgtcggccaggcttcagctgcatcaacacggtgggctcctacacgtgccagaggaacccgctgatctgcgcgcgcggctaccacgccagcgatgatggggccaagtgtgtggacgtgaatgagtgtgagacaggtgtgcaccgctgcggtgagggccaagtgtgccacaacctccctggctcctaccgctgtgactgcaaagccggctttcagcgggatgccttcggccggggctgcatcgacgtgaatgagtgctgggcctcgccaggccgcctgtgccagcacacgtgtgagaacacactcggctcctaccgctgttcctgcgcctccgggttcctgctagcagcggacggcaagcgctgtgaagacgtgaatgagtgtgaggcccagcgctgcagccaggagtgtgccaacatctatggctcctaccagtgctactgccgccagggctaccagctggctgaggatggtgacacctgcacagacatcgacgagtgtgctcaaggcgccggcatcctctgcaccttccgctgtctcaacgtgccagggagctaccagtgtgcatgccctgagcagggctacaccatgacggccaacgggaggtcctgcaaggacgtggatgagtgtgcactgggtacccacaactgttccgaggctgagacctgccacaacatccagggtagcttccgctgcctgcgcttcgagtgtcctcccaactatgtccaagtctccaaaacgaagtgcgagcgcaccacgtgccatgacttcctggagtgccagaactcgccagcgcgcatcacgcactaccagctcaacttccagacgggcctcctggtgcctgcgcatatcttccgcattggccccgcgccagccttcacaggggacaccatcgccctgaacatcatcaagggcaatgaggagggctactttggcacgcgcaggctcaatgcctacacgggtgtggtctacctgcagcgggccgtgctggagccccgggactttgccctggatgtggagatgaagctctggaggcagggctccgtcaccaccttcctggccaagatgcacatcttcttcaccacctttgccctgtgaggtgccagcacgggccacctgcgggtgtggcgcagcccagggctcacactgcgtgggagggactgggtcactattgtggtttttactataactttgtaaattaacttaattttgctgacttgactcctgtggcttctggacccctcctctgccccgcacgaggaagttccacggcaggtggtgcgttcccacgcaggcaccaagtggaagcttgcacggtgggccacggccgtggcgggtgccctg

SEQ ID NO: 187761 - DNA, 752 bp, Homo Sapiens
ttggctttgcctgaccagcaagaccatcagcttcgtgaagctgaactcggaggcagcggccgtggtgctgcagctgatgaacatcaggcgctgtggccactcggaaaacttcttcttcatcgaggtgggccgttctgccgtgacggggcccggagagttctggatgcaggtggatgactctgtggtggcccagaacatgcacgagaccatcctggaggccatgcgggccatgagtgatgagttccgccctcgcagcaagagccagtcctcgtccaactgctctaaccccatcagcgtccccctgcgccggcaccatctcaacaatcccccgcccagccaggtggggctgacccgccgatcacgcactgagagcatcaccgccacctccccgatcagcatggtgggcgggaagccaggctccttccgtgtccgcgcctccagtgacggcgaaggcaccatgtcccgcccagcctcggtggacggcagccctgtgagtcccagcaccaacagaacccacgcccaccggcatcggggcagcgcccggctgcaccccccgctcaaccacagccgctccatccccatgccggcttcccgctgctcgccttcggccaccagcccggtcagtctgtcgtccagtagcaccagtggccatggctccacctcggattgtctcttcccacggcgatctagtgcttcggtgtctggttcccccagcgatggcggtttcatctcctcggatgagtatggcccaa

SEQ ID NO: 187762 - DNA, 1180 bp, Homo Sapiens
gtggaaaggcccaatgcctcgtctgggattcacggccgggcaaagcggcccctccggaacgagacagcacagcggctcacctctgcgcctctagagagtgcagagagagcctcgccctccacgctctctgagggaccgcccgccctagcccccgcctgggcttcgcgggtggacggttgggggccccgggcgccccccagcgcgtagcttttctccttctcgtgggtcttctggtgctcggctagggccaggctgaagtggaaggtcttccagcagccctgacaggcgtagcgcttccggccgccatggctgctgtggtgctccatcaggtgcgagagccacgcgaaggcctccccgcactcgccgcaggcatagggcttcccgcgggacaagcccggctcgtcagccccagggccctgcccggcctccagccctgcgctgtcgccggagctagagacgccctcgaggctctgcccgtccccatcctcggggtgcggcctcttggttcccagtttcgccgtgcccctgtccggggcaggctgctggatgacggactgcctctgcgatccggtggcagagtcggactccgcgtcctgggggtcctgcgggtccggggccttcccaggctgctcttcctcctcctcagtggtgcccgacgggggatcggcaagggcgtccccagggggcgcctccgtaggcagctcaggcagcacccccgcgggggcggcctcctcgcaggcgcacccagcgctctcctgccgcctcccgccttctgggaggctgcttccttgtggatctctttccaccaaccggagttcctcagtgtccagcctggaggcagcgtcaggctgggaaagctgatacccccacaggagcagcttccggtagctcttcaggttctcctcggcagggtccaggtggccccactcccccaggtgctgagggtcctctggaaaggacttcagcttctgctcggtgttggcagggccgtcctcttcggtctttgcttctctgaccctcctctgttccagaaacagggggtccggagaaagccagggtgtctcagaaggtgccgggatctccccagctccaagggcctggctggggctcgcgagctcgcctggtagcagcagagggtccatgtgcctctcgtacactccatcgggaagaattgagccaa

SEQ ID NO: 187763 - DNA, 1470 bp, Homo Sapiens
ctttgtacaaaaaagttggcacttgaggttgcttgaaccacattgctttcctttgtctttggttccaacagaattctgtccatcacctcctgccttgaaagatggatttgttcaagatgaaggtacaatgtttcctgtggggaaaaatgtagtgtactcttgcaatgaaggatactctcttattggaaacccagtggccagatgtggagaagatttacggtggcttgttggggaaatgcattgtcagaaaattgcctgtgttctacctgtactgatggatggcatacagagtcacccccaaaaacctttctacacagttggtgagaaggtgactgtttcctgttcaggtggcatgtccttagaaggtccttcagcatttctctgtggctccagccttaagtggagtcctgagatgaagaatgcccgctgtgtacaaaaagaaaatccgttaacacaggcagtgcctaaatgtcagcgctgggagaaactgcagaattcaagatgtgtttgtaaaatgccctacgaatgtggaccttccttggatgtatgtgctcaagatgagagaagcaaaaggatactgcctctgacagtttgcaagatgcatgttctccactgtcagggtagaaattacacccttactggtagggacagctgtactctgcctgcctcagctgagaaagcttgtggtgcctgcccactgtggggaaaatgtgatgctgagagcagcaaatgtgtctgccgagaagcatcggagtgcgaggaagaagggtttagcatttgtgtggaagtgaacggcaaggagcagacgatgtctgagtgtgaggcgggcgctctgagatgcagagggcagagcatctctgtcaccagcataaggccttgtgctgcggaaacccagtaggctcctggaggccctggtcagcttgcttggaatccagcaggcagctggggctgagtgaaaacatctgcacaactgggcactggacagcttttccttcttctccagtgtctaccttcctcctcaactcccagccatctgtataaacacaatcctttgttctcccaaatctgaatcgaattactcttttgcctcctttttaatgtcagtaaggatatgagcctttgcacaggctggctgcgtgttcttgaaataggtgttaccttctctgggccttggttttttaaaatctgtaaaattagaggattgcactagagaaacttgaatgctccattcaggcctatcattttattaagtatgattgacacagcccatgggccagaacacactctacaaaatgactaggataacagaaagaacgtgatctcctgattagagagggtggttttcctcaatggaaccaaatataaagaggacttgaacaaaaatgacagatacaaaccatttctatcctgagtagtaatctcacacttcatcctatagagtcaaccaccacagataggaattccttattc

SEQ ID NO: 187764 - DNA, 1782 bp, Homo Sapiens
gccaactttgtacaaaaaagttgggttttccgccctggcaggcgcggccatggcgcagctgggaaagctgctcaaggagcagaagtacgaccggcagctgaggttgtggggtgatcatgggcaagaggctttagaatctgctcatgtttgcctaataaatgcaacagccacaggaactgaaattcttaaaaacttggtactaccaggtattggttggtttacaattattgatggaaatcaggtcagcggagaagatgctggaaacaatttcttccttcaaagaagcagtatcggcaagaaccgagctgaagctgccatggaattcttacaagaattaaatagcgatgtctctggaagttttgtggaagagagtccagaaaaccttctagacaatgatccctcatttttctgtaggtttactgttgtagttgcaactcagcttcctgaaagcacttcactacgcttagcagatgtcctctggaattcccagattcctcttttgatctgtaggacatatggactagttggttatatgaggatcattataaaagaacatccagtaatagaatctcatccagataatgcattagaggatctacgactagataagccatttcctgaactgagagaacattttcagtcctatgatttggatcatatggaaaaaaaggaccacagtcatactccatggattgtgatcatagctaaatatttagcacagtggtatagtgaaacaaatggacgaatacctaaaacgtataaagaaaaagaggacttcagagatttgattagacaaggaattctaaaaaatgaaaatggggctccagaagatgaagagaattttgaagaagctattaaaaatgtgaacacagcactaaatacaactcagatcccaagcagtattgaagatatatttaatgatgatcgctgcataaatatcaccaaacagactccatcattttggattttagctcgtgccttaaaggaatttgtggccaaagagggtcaaggaaatttacctgttcgaggcacaattcctgatatgattgcagattcaggcaaatatataaaactgcaaaacgtttaccgtgaaaaagcaaagaaagatgctgccgctgtgggtaatcatgttgccaaattgctgcagtccattggccaggcaccagagtccatttcagagaaagaattaaaattactctgcagcaattctgcatttcttcgagtggtaagatgtcgatccttagctgaagaatatggtttggatacaattaacaaggatgaaattatttctagcatggacaatccagataatgaaatagtgttgtacttaatgttacgggctgttgatagatttcataaacaacagggtagatatccaggagtatctaactatcaagttgaagaagatataggaaagttgaagtcttgtctcactggcttccttcaggaatatggtttatctgtaatggtgaaagatgattatgtccacgaattttgccgatatggagctgctgagccacataccattgctgcattcttggggggagctgctgctcaagaggtcatcaaaataatcaccaaacaatttgtaatttttaataatacttacatttacagtggcatgtcacaaacttcagcaactttccagttgtagagtaagcaagcaccttaagtagtgtgttaatgattgaaactgtaattgccttcgggttgtgctttagtctgtaaaattctaaaggagagctgctaaattgttttcttaataaacatttttctcatttg

SEQ ID NO: 187765 - DNA, 1301 bp, Homo Sapiens
  misc_feature (231)..(265): n is a, c, g, or t
ttggggcatgttttctgttttaaagaccagaagtttgaaggcacccaaatccttgtcgccaatctcctgaagtacagctttaccatattagtggtcattatttatgctttgagagtttcaatattgttcgtcaagttaacttatggcataatttaagctaaagttgtagaaatgaattgttgagtgcaactttcatagtcccaaagataggcagagaacatctccagaaannnnnnnnnnnnnnnnnnnnnnnnnnnnnnnnnnnttaatatgatttagtgacaaccaggaaaacttacttgggattattagcactttcaaacttagggacattattaaattggatggaatgcacttctaaatgtttaaattaaaatttcaaagctctttcgagattcaggttctcaataataatattcaagttttagagtttcactttgtactatttaaatttatggaactagtttccatactgacttgtaaggttttggggtcatatataaggactaaagccaagctaggcaaaacaatgacagcaccgttttttcagtgaagctctcagaatgtccagtacagatgttgcagataattccaagaactccttcagcaggtgttcttcaccattcgtaaacagtattttaagatgttcactttgctcttctttttggttacatacattttaataactggtatgttgaagtagtgtctaaaagtatctagtctttattcacagtacattatattgtgtgatgcactggactaactcttgtttaccattcatgtaacaaaacccagcacattatctgcactataagctcaaagaatgtcacatccgcccagacagctctttgatgagggtgatgggaactgaataaaccatacggactggcagtaacaagggcttttactgttctgttcagtggaaccttcttggtcaaattgtaattagctagcattatatttatatacagggtcttttttctttaccgatgtattttcctactcatagccaaccaataaattcagtatctgtttcaaatattttagaagtgtagtttgtatagctgtagtactgaggtttgaggaaaaataaatgttgatcagcagaccacgtatttaaaattctgaatcttctgggacagggttgtaactcagccttccaagggaagagtgcacggggacggggccatgatatggggaaatggtgtaaactaatgtatttctttattggctgttattctgtataacactcaatatctttgccaaaagttccaatttttatatttaaggcaactgatggt

SEQ ID NO: 187766 - DNA, 1791 bp, Homo Sapiens
ttggcattagtgccgtcccccactggaaaaccgtggcttctgtattatttgccatctttgttgtgtaggagcagggagggcttcctcccggggtcctaggcggcggtgcagtccgtcgtagaagaattagagtagaagttgtcggggtccgctcttaggacgcagccgcctcatgggggtccaggggctctggaagctgctggagtgctccgggcggcaggtcagccccgaagcgctggaagggaagatcctggctgttgatattagcatttggttaaaccaagcacttaaaggagtccgggatcgccacgggaactcaatagaaaatcctcatcttctcactttgtttcatcggctctgcaaactcttattttttcgaattcgtcctatttttgtgtttgatggggatgctccactattgaagaaacagactttggtgaagagaaggcagagaaaggacttagcgtccagtgactccaggaaaacgacagagaagcttctgaaaacatttttgaaaagacaagccatcaaaactgccttcagaagcaaaaggcaagaggaaaattatagtcgtgttagagatgaagttttaaaaaagtgatttttgtcttgatttcctgcgattctctttccctatctaattttgactctcaacagaaaatagagagtgaaatgagacaagtaggctgccatttgacctggtaatttggagttgtggcaattctccgttctgtgagaatcaactttgctaatgagaaaaaaaagctgtcgtgttgcgtcatgtacactttttactttgattatggtcttcttgactctaggtgagcagccccgccacggttccttcctttctctcggctgcatttattttccacagcagtggcctgagagcagccaggtcaggtccctgttcaccatcctgagcagggtctgcataatctgtttaaagatttgtgtactttccagagatgaagcactacccagtcttacccaagttcgaagagaaaacgacctctatgttttgcctcctttacaagaggaagaaaaacacagttcagaagaggaagatgaaaaagaatggcaagaaagaatgaatcaaaaacaagcattacaggaagagttctttcataatcctcaagcgatagatattgagtctgaggacttcagcagcctgccccctgaagtaaagcatgaaatcttgactgatatgaaagagttcaccaagcgcagaagaacattatttgaagcaatgccagaggagtctgatgacttttcacagtaccaactcaaaggcttgcttaaaaagaactatctgaaccagcatatagaacatgtccaaaaggaaatgaatcagcaacattcaggacacatccgaaggcagtatgaagatgaagggggctttctgaaggaggtagagtcaaggagagtggtctctgaagacacttcacattacatcttgataaaaggtattcaagctaagacagttgcagaagtggattcagagtctcttccttcttccagcaaaatgcacggcatgtcttttgacgtgaagtcatctccatgtgaaaaactgaagacagagaaagagcctgatgctacccctccttctccaagaactttactagctatgcaagctgccctgctgggaagtagctcagagaggagctggagagtgaaaatcgaacgcaggcccgtgggaggaacgcacctgctgctgtagacgaaggctccatatcaccccggactctttcagccattagagagctcttgacgatgacgaagatgtaaaag

SEQ ID NO: 187767 - DNA, 1452 bp, Homo Sapiens
  misc_feature (217)..(302): n is a, c, g, or t
  misc_feature (1121)..(1146): n is a, c, g, or t
ttggcttgtagcattgtgagagcatcaccttttccctttcatgttcttggaccttttgtactgaaaatccaggcatctaggttctttttattcctagatggaactgcgacttccgagccatggaagggtggattgatgtttaaagaaacaatacaaagaatatatttttttgttaaaaaccagttgatttaaatatctggtctctctctttggtttnnnnnnnnnnnnnnnnnnnnnnnnnnnnnnnnnnnnnnnnnnnnnnnnnnnnnnnnnnnnnnnnnnnnnnnnnnnnnnnnnnnnnntcgtcattgctggtgactcatgcctttttttaacgggaaaaacaagttcattatattcatattttttatttgtattttcaagactttaaacatttatgtttaaaagtaagaagaaaaataatattcagaactgattcctgaaataatgcaagcttataatgtatcccgataactttgtgatgtttcgggaagatttttttctatagtgaactctgtgggcgtctcccagtattaccctggatgataggaattgactccggcgtgcacacacgtacacacccacacacatctatctatacataatggctgaagccaaacttgtcttgcagatgtagaaattgttgctttgtttctctgataaaactggttttagacaaaaaatagggatgatcactcttagaccatgctaatgttactagagaagaagccttcttttctttcttctatgtgaaacttgaaatgaggaaaagcaattctagtgtaaatcatgcaagcgctctaattcctataaatacgaaactcgagaagattcaatcactgtatagaatggtaaaataccaactcatttcttatatcatattgttaaataaactgtgtgcaacagacaaaaagggtggtccttcttgaattcatgtacatggtattaacacttagtgttcggggttttttgttatgaaaatgctgttttcaacattgtatttggactatgcatgtgttttttccccattgtatataaagtaccgcttaaaattgatataaattactgaggtttttaacatgtattctgttctttaagatccctgtaagaatgtttaaggnnnnnnnnnnnnnnnnnnnnnnnnnngagtctgttctttgtaagacatggttctggttgttcgctcatagcggagaggctggggctgcggttgtggttgtggcggcgtgggtggtggctgggaactgtggcccaggcttagcggccgcccggaggcttttcttcccggagactgagtgggcggctcagcgttggccccacacattcgaggctcacacgtgattgtcgctcacacagttagggtcgtcagttggtctgaactgcatttggcccactcctccatcctccctgtccgtcgtagctgccacccccagaggcgcgcttcttcccgtg

SEQ ID NO: 187768 - DNA, 1428 bp, Homo Sapiens
agtattcttcatggaatgcctcactcagtgccgcttctacaccgctcttctcataggcacgggctgtgtttgcaatagcctgggcagtttgctcctttacaatcacagcatgctcagatgacaagcagcgaaccccatgagaagaggctactgaaggctcttgtgatgtagagtagtcctgtgatgaggagttggtggaggactccatttgagagattttgcaagactgctcttcttcccactcctctacttcctgctcaaaccgccagttatcctcctgaatgtaatgcttgagttccacagatagggcttccacttctgacatttgatctgattcagttggggctgcctctgcattgaagtagggtagtttgtcattaatgtacatcagacagtaagcactaacatttctcaggcctccataggaatctctttcaacttcttcccaggaagattcagtaacagagatgtcattgtacttgagccagctctgtcggggttgattatagatataggcccaatagtgtccagcatttgcttgtccttcatgaacaagaactgcatgcaagcgataaggcacctgacgaaggagaggatcgcagtacatctgttcaatagtctgagtagtacttgcaatacaagtctttaaatcttgtatatcttgttcaatctcactcctccatctctgaagacaggtcttaacaaaatttatctcctcatctgtgactgttcgtggagctggctgtgaaggcatttccatggaagaccgagaagatgtcagtggtttagacttgggtaaagaatcttcaggagaagaaaaggtactttcaacatcctgagaagagctttctgtacttgtactttccttggatgtctggtcagaaaccgagcagtgcactgaagaaagtggtaatgtcatatgtgtgtcactttcaggtggacagctttctgaggcaggttttgtactagcaaattcaataacatatttcagcatgtccgggagcgggaaccgagctgggcctgagccatatttcacatacctttccaatttttgctgcagaatttttatttcctccttcaactttcgaatacactctctcttatttcgaataagctccttgctcctgtacatgtacctgtccatataaataatctgaggaaattccagcttattgtgaattttctctggctgcccaagggactgattaaactcaaatcttgagagttcaaaggtcaacactggaggtagctttgtaaaccaacgctcttgtccatacttcaccgagtgatcggagggaagaagctcaacatcaccctccaccatggccccttccaaacactcgtctaagttgcgataaccgtttacctgaagaggatactggccgaaggtctcattgttacaaaagggccaacttttttgtacaaagt

SEQ ID NO: 187769 - DNA, 2329 bp, Homo Sapiens
ctttgtacaaaaaagttggcggcccggccggtgagcaacggctctgcggccatggcgagcggcgagcattcccccggcagcggcgcggcccggcggccgctgcactccgcgcaggctgtggacgtggcctcggcctccaacttccgggcctttgagctgctgcacttgcacctggacctgcgggctgagttcgggcctccagggcccggcgcagggagccgggggctgagcggcaccgcggtcctggacctgcgctgcctggagcccgagggcgccgccgagctgcggctggactcgcacccgtgcctggaggtgacggcggcggcgctgcggcgggagcggcccggctcggaggagccgcctgcggagcccgtgagcttctacacgcagcccttctcgcactatggccaggccctgtgcgtgtccttcccgcagccctgccgcgccgccgagcgcctccaggtgctgctcacctaccgcgtcggggagggacccggggtttgctggttggctcccgagcagacagcaggaaagaagaagcccttcgtgtacacccagggccaggctgtcctaaaccgggccttcttcccttgcttcgacacgcctgctgttaaatacaagtattcagctcttattgaggtcccagatggcttcacagctgtgatgagtgctagcacctgggagaagagaggtccaaataagttcttcttccagatgtgtcagcccatcccctcctatctgatagctttggccatcggagatctggtttcggctgaagttggacccaggagccgggtgtgggctgagccctgcctgattgatgctgccaaggaggagtacaacggggtgatagaagaatttttggcaacaggagagaagctttttggaccttatgtttggggaaggtatgacttgctcttcatgccaccgtcctttccatttggaggaatggagaacccttgtctgacctttgtcaccccctgcctgctagctggggaccgctccttggcagatgtcatcatccatgagatctcccacagttggtttgggaacctggtcaccaacgccaactggggtgaattctggctcaatgaaggtttcaccatgtacgcccagaggaggatctccaccatcctctttggcgctgcgtacacctgcttggaggctgcaacggggcgggctctgctgcgtcaacacatggacatcactggagaggaaaacccactcaacaagctccgcgtgaagattgaaccaggcgttgacccggacgacacctataatgagaccccctacgagaaaggtttctgctttgtctcatacctggcccacttggtgggtgatcaggatcagtttgacagttttctcaaggcctatgtgcatgaattcaaattccgaagcatcttagccgatgactttctggacttctacttggaatatttccctgagcttaagaaaaagagagtggatatcattccaggttttgagtttgatcgatggctgaatacccccggctggcccccgtacctccctgatctctcccctggggactcactcatgaagcctgctgaagagctagcccaactgtgggcagccgaggagctggacatgaaggccattgaagccgtggccatctctccctggaagacctaccagctggtctacttcctggataagatcctccagaaatcccctctccctcctgggaatgtgaaaaaacttggagacacatacccaagtatctcaaatgcccggaatgcagagctccggctgcgatggggccaaatcgtccttaagaacgaccaccaggaagatttctggaaagtgaaggagttcctgcataaccaggggaagcagaagtatacacttccgctgtaccacgcaatgatgggtggcagtgaggtggcccagaccctcgccaaggagacttttgcatccaccgcctcccagctccacagcaatgttgtcaactatgtccagcagatcgtggcacccaagggcagttagaggctcgtgtgcatggcccctgcctcttcaggctctccaggctttcagaataattgtttgttcccaaattcctgttccctgatcaacttcctggagtttatatcccctcaggataatctattctctagcttaggtatctgtgactcttgggcctctgctctggtgggaacttacttctctatagcccactgagccccgagacagagaacctgcccacagctctccccgctacaggctgcaggcactgcagggcagcgggtattctcctccccacctaagtctctgggaagaatggagaggactgatgctcttcctttttctcttt

SEQ ID NO: 187770 - DNA, 657 bp, Homo Sapiens
acaggtctcccaagcctgaaaatggctccccacttggacccccggctccctctgcagatccctccccatccccagctgtggggcccagagccaacaggggcaggaaagaggcaaggaggttgctgggaggtgctgaaggaggtggaagaaggtctgagggtggtggaggaagcaaggaagccaccaaaagcgaaggcccttcaggctctcctggggctaggggaggaccaggtcctcctggtgggggtagcaggggctcagggggaggttgtcctcctcccccagtcagcacaccaaataaactgtggttgagcaatggagaaggtggaggctgccccagactcagagggagaggcaaggccccaagcatcccagggaagccagctccactcagtgccaggccctgctcagggctggggaaagggaaagcctctccaccagccaggggaggcagagggcaggccgggcctgcccccatccccagtccttcggatgggctttgaagcacagggctggggactactggggctttggaggcagctggtggggcaggggcacctggcacactgctgaggctgccactggtggtcccaggcagggagggctggatggggtgcctgggctggggagggctccctgaggagagggttgggccaa

SEQ ID NO: 187771 - DNA, 919 bp, Homo Sapiens
ttggattctcttcccttctaacttgattaagaatgacccaaaataaattaaagctttgttccaaagccaatgtgtatactgaagtgcctgatggaggatggggctgggcggtagctgtttcatttttcttcgttgaagtcttcacctacggcatcatcaagacatttggtgtcttctttaatgacttaatggacagttttaatgaatccaatagcaggatctcatggataatctcaatctgtgtgtttgtcttaacattttcagctcccctcgccacagtcctgagcaatcgtttcggacaccgtctggtagtgatgttgggggggctacttgtcagcaccgggatggtggccgcctccttctcacaagaggtttctcatatgtacgtcgccatcggcatcatctctggtctgggatactgctttagttttctcccaactgtaaccatcctatcacaatattttggcaaaagacgttccatagtcactgcagttgcttccacaggagaatgtttcgctgtgtttgctttcgcaccagcaatcatggctctgaaggagcgcattggctggagatacagcctcctcttcgtgggcctactacagttaaacattgtcatcttcggagcactgctcagacccatctttatcagaggaccagcgtcaccgaaaatagtcatccaggaaaatcggaaagaagcgcagtatatgcttgaaaatgagaaaacacgaacctcaatagactccattgactcagagtagaactaactacctcacctaaaaatgtgcctactcacactaacctggaactggagccgaagccgacatgcagcagtcctggtgaagaccagccccaggccaagcgaaaagaaagccccgctattagacttctccattttgaaagaaaaagttttatttgttat

SEQ ID NO: 187772 - DNA, 1892 bp, Homo Sapiens
ttgggaaagaacatatggttggaatcatattcagcaggagtaagctgactaacttacaaaaacaggtgtgtgctcatattgtccaagctattcgcatggaagctaccagagtccgtgaagaatgggaacatgctatatcaagcaaagaaaatgccaattctcagccaaatgatgaagatgcctcctctgatgcctactgctttgagctgctctctatggttttagcactgagtggctctaacgttggccggcaatatctggctcaacagctaaccctgcttcaggatctcttctcgctgcttcacacagcctctcctagagtccagagacaggtaacctctttactaagaagagttttgcctgaagtaacccctagtcgtctggccagcatcataggagtgaaatccctccccccagcagatatcagtgatatcattcactcaacagagaaaggagactggaataagctgggtatcttggacatgtttctaggatgcattgccaaagcactcactgtacagctaaaagccaaaggaaccaccatcactggaacagctggtaccactgtgggcaaaggagttacaacagttactcttccgatgattttcaattccagttatctccgacgaggtgaaagtcattggtggatgaagggctcaacccctacccagatctcagagatcatcattaaacttatcaaggatatggcagcaggtcatctgtcagaagcttggtcccgagtgacaaaaaatgctattgcagaaaccatcattgccttgaccaagatggaagaagaatttaggtctccagtgagatgtattgcaacaactagactctggcttgctctcgcatccctatgtgttcttgatcaggaccacgtagatcgtctctcctcggggagatggatgggaaaggatggacaacaaaaacaaatgcctatgtgtgataaccatgatgatggtgaaactgcagcaatcattttatgcaatgtctgtggaaatttatgtacagactgtgacagattccttcaccttcatcgaagaaccaaaactcatcaaagacaggtcttcaaagaagaagaagaagctataaaggttgaccttcatgaaggttgtggtagaaccaaattgttctggttgatggcactggcagattctaaaacaatgaaggcaatggtggaattccgagaacacacaggcaaacccaccacgagtagctcagaagcatgtcgcttctgtggttccaggagtggaacagagttatctgctgttggcagtgtttgttctgatgcagattgccaggaatacgctaagatagcctgtagtaagacgcatccttgtggccatccatgcgggggtgttaaaaacgaagagcactgtctgccctgtctacacggctgtgacaaaagtgccacaagcctgaagcaagacgccgatgacatgtgcatgatatgtttcaccgaagcgctctcggcagcaccagccattcagctggattgtagtcacatattccacttacagtgctgtcggcgagtattagaaaatcgatggcttggcccaaggataacatttggatttatatcttgtcccatttgcaagaacaaaattaatcacatagtactaaaagacctacttgatccaataaaagaactctatgaggatgtcagaagaaaagccttaatgagattggaatatgaaggtctgcataagagtgaagctatcacaactcctggtgtgaggttttataatgacccagctggctatgcaatgaatagatatgcatattatgtgtgctacaaatgcaaaagggcatattttggtggtgaagctcgctgcgatgctgaggctggacggggagatgattatgatcccagagagctcatttgtggtgcc

SEQ ID NO: 187773 - DNA, 1573 bp, Homo Sapiens
ttgggcaaagggaaagaaaccttccaaggaaagattgactgcggatccaggaggctcctcagaaacttccagccaagttctagaaaaccacaccaaaccaaagaccagcaaaggaaccaaacaagaggaaacctttgctaagggcacctgcaggccaagtgccaaagggaagaggaacaagggaggcagaaagaaacggagcaagccctcctccagcgaggaagatgagggcccaggagacaagcaggagaaggcaacccagcgacgtccgcatggccgggagcggcgggtggcctccagggtgtcttataaagaggagagtgggagtgatgaggctggcagcggctctgattttgagctctccagtggagaagcctctgatccctctgatgaggattccgaacctggccctccaaagcagaggaaagcccccgctcctcagaggacaaaggctgggtccaagagtgcctccaggacccatcgtgggagccatcgtaaggacccaagcttgccagcggcatcctcaagctcttcaagcagtaaaagaggcaagaaaatgtgcagcgatggtgagaaggcagaaaaaagaagcatagctggtatagaccagtggctagaggtgttctgtgagcaggaggaaaagtgggtatgtgtagactgtgtgcacggtgtggtgggccagtctctgacctgttacaagtacgccaccaagcccatgacctatgtggtgggcattgacagtgacggctgggtccgagatgtcacacagaggtacgacccagtctggatgacagtgacccgcaagtgccgggttgatgctgagtggtgggccgagaccttgagaccataccagagcccatttatggacagggagaagaaagaagacttggagtttcaggcaaaacacatggaccagcctttgcccactgccattggcttatataagaaccaccctctgtatgccctgaagcggcatctcctgaaatatgaggccatctatcccgagacagctgccatccttgggtattgtcgtggagaagcggtctactccagggattgtgtgcacactctgcattccagggacacgtggctgaagaaagcaagagtggtgaggcttggagaagtaccctacaagatggtgaaaggcttttctaaccgtgctcggaaagcccgacttgctgagccccagctgcgggaagaaaatgacctgggcctgtttggctactggcagacagaggagtatcagcccccagtggccgtggacgggaaggtgccccggaacgagtttgggaatgtgtacctcttcctgcccagcatgatgcctattggctgtgtccagctgaacctgcccaatctacaccgcgtggcccgcaagctggacatcgactgtgtccaggccatcactggctttgatttccatggcggctactcccatcccgtgactgatggatacatcgtctgcgaggaattcaaagacgtgctcctgactgcctgggaaaatgagcaggcagtcatttgaaaggaaggaaaaatgagaaaaaggagaaccgggctctagggaactgggaatttg

SEQ ID NO: 187774 - DNA, 1189 bp, Homo Sapiens
ttgggaatgaacggcaatgaaggtacattttgctgatcaaataaaggatagatgctcactggatgtctgagaactttgagagaccgaaaaagaaggacgtatgctctacaagaaatatcgacagtatatggcaggacttctggctcctccttatggtgttatggaaacgggctctaacaatgacaggattcctgacaaggagaacacacctctcattgaacctcacgttcctcttcgtcctgctaacaccattaccaaggtcccttcagagaagatcctcagagctggaaaaattttacgaaatgccattctctctcgagcacctcacatgataagagatagaaaataccacctaaagacatacagacaatgctgtgtgggaactgaactggtggactggatgatgcagcagacaccatgtgttcactcccggactcaagctgttggcatgtggcaagtcctgttagaagatggtgttctcaaccacgtggaccaggagcaccatttccaagacaaatatttattctatcgatttctggatgatgagcacgaggatgcccctttgcctactgaggaggagaagaaggagtgtgatgaggagctccaggacaccatgctgctgctgtcacagatgggccccgacgcccacatgaggatgatccttcgcaaaccacctggccagaggactgtggatgacctagagattatctatgaggagcttcttcatattaaagccttatcccatctttctaccacagtgaaacgagagttagcaggtgttctcatttttgagtctcacgccaaaggagggactgtgttgtttaaccagggggaagaaggtacctcctggtacattattctaaaaggatcagtgaatgtagtcatttacggcaagggtgtggtctgcaccctgcatgaaggagatgacttcggcaagttagcactagtgaatgatgccccacgagctgcctctatcgtcttacgagaagataactgccatttcttaagagtagacaaggaggatttcaaccggatcctaaggacgtggaggcgaatacagtcagacttaaagaacatgaccaagatgtcttggtgctggagaatgtcccagcaggaacagagcttctaatcaaggaaactcacaggctcagcaaaggtatactgtgatgtcagaacacctgaaaaattt

SEQ ID NO: 187775 - DNA, 1730 bp, Homo Sapiens
ttggattattgcacacgcctgtgttactggtaaacccatcagccaagggggaatccatggacgcatctctgctactggccgtggtgtcttccatgggattgaaaatttcatcaatgaagcttcttacatgagcattttaggaatgacaccagggtttggagataaaacatttgttgttcagggatttggtaatgtgggcctgcactctatgagatatttacatcgttttggtgctaaatgtattgctgttggtgagtctgatgggagtatatggaatccagatggtattgacccaaaggaactggaagacttcaaattgcaacatgggtccattctgggcttccccaaggcaaagccctatgaaggaagcatcttggaggccgactgtgacatactgatcccagctgccagtgagaagcagttgaccaaatccaacgcacccagagtcaaagccaagatcattgctgaaggtgccaatgggccaacaactccagaagctgacaagatcttcctggagagaaacattatggttattccagatctctacttgaatgctggaggagtgacagtatcttactttgagtggctgaagaatctaaatcatgtcagctatggccgtttgaccttcaaatatgaaagggattctaactaccacttgctcatgtctgttcaagagagtttagaaagaaaatttggaaagcatggtggaactattcccattgtacccacggcagagttccaagacaggatatcgggtgcatctgagaaagacatcgtgcactctggcttggcatacacaatggagcgttctgccaggcaaattatgcgcacagccatgaagtataacctgggattggacctgagaacagctgcctatgttaatgccattgagaaagtcttcaaagtgtacaatgaagctggtgtgaccttcacatagatggatcatggctgacttcctcactatcctcttcacatgtaacttctgcagacctatcacaagtttacatgtaaccacagaaatccctttctctcctgactcattaataatggataccattctcaacaagtcaatccaagtcagcccgttaaggagaaagaaattaaggttagcggatcatgtacaagctgagtgtgaaagtagaaatcacctacaccagagagccattttggtattttgcctttaaataaaaagcctcctttatctggctgtgcagccttgctctgtggcttttcccaacacaatcagtgctagtgctggggaggaacagtcaagagcagtcagttgcttgcttattttttctggatgagtctgggacacactgtaactttaacacatttaagaagtaggtgtgtggccttttcagaaggtggcatggtcctcaagtgagttcttagtattttatatcagcaaaataattcaattttgcaggttgcaaacaaatataaaacctgtttctgtttatgaatattattcttttagaatagaataagtacatgctgctgtaataaaattgcctttaatcacttaacaagcctaaccttgactcaaacagtgaatgcctatagaaataataaatgaaaaaaactagtatttttatatcataaaacaatgtcatttatagcttatcattcatgtattgtccagcaagacattaaaagccctgtggatattaagttatcttcatacctgcaaatggtggaggctattttcattaaaactgtccaatttt

SEQ ID NO: 187776 - DNA, 1585 bp, Homo Sapiens
  misc_feature (337)..(397): n is a, c, g, or t
  misc_feature (410)..(425): n is a, c, g, or t
  misc_feature (806)..(814): n is a, c, g, or t
  misc_feature (826)..(861): n is a, c, g, or t
ttggcaataattgaaaaaaaaggcgaactctgccttggagaggtagatgataagaaataaaaaggtgtttataactattttgtattataaagtgggccttagagataggaagaagaatgatggattccttttggatcaatcagaaaggaaacacgaaagaaaagtcaggaaggtagagagagaaaaagggagggaaggagaaagaatgggaataaaataaggaggtaagagatactatttttgctgagcaaccagtgtgtttcaggatgatacaaagaaaaatatagaatagaaataagtgcaggcttggaatcagctacaaatcctaaagatgggnnnnnnnnnnnnnnnnnnnnnnnnnnnnnnnnnnnnnnnnnnnnnnnnnnnnnnnnnnnnntcatgagtaaggnnnnnnnnnnnnnnnnattaaaattccagagtgaccgtggcacttgggtgtacaggtaattcctccagagctgtttgctggcttcaggagtggagtgagaatttcttttttatgaaaagggatataaaggcaccgagctgatgcagtatttgtaatattaagttgacctaacaaggtatttgcatgagtcacaattacaaagttttgagcggttttgtaatttgacatttaggaaagtctcctatttattctcatactttacattcatgcttagtatactatagaggatgccagctttaatctttctgtcatttaaagcaatatgataagggtattcaataattgggtgccctaaatttctggatgagaaaattttcaattctggccatgagaaagnnnnnnnnntaaacagccttnnnnnnnnnnnnnnnnnnnnnnnnnnnnnnnnnnnnaaaaaagcaataattaactcagacctcactaaaaatcatttttgtttttatattgttatgtcataagctctattatgttattctaacaagtagcaatttcacaaaatttgtatgtagatgttaacgcacatttcctttgcttcttttattagactagtgttgactttggggggggacatttattcacaaatgagaagtaggcacaaagtaaaaaatggaaccatctactaacaaggatcctttaaaactgccaagggagctctaacttgaagccacatcctacagatggcagcccaaatagcacatgggcaattggcaccatctttatatggttgagtctcctgaatattttgaatgaattctcaacaaaatgtgctagccactggggacgcaaaacaagtaagatccctgttgcaagaaattcattttatagtgagggaggttggcatggagactaaaattctcaggaaaatgagatccgtgttagattagaagtcctgatgtgaaatgggaggactcaggaaggaggatcgtctttacctgaggatttctagccagaggtcccagatgcctgggctgagaacccagcgataagggggcgttcccaaagcagacacagggataagaacagaggaggcagcagcattgcacagccccaggcacagtggcagttaggatggctggagagtaggatagttctatgggttgcccaaaaaatgtgatg

SEQ ID NO: 187777 - DNA, 1158 bp, Homo Sapiens
  misc_feature (689)..(777): n is a, c, g, or t
ttggatttaattatttttaattgagaacaactcatgatcacaattcataaaatccatattttaagacaatagttcttcatgtcacaaacacaatctattctacatgaggaggctgagaaaggggaagagaaaaacaaaccaaatggatgatgttagctttaggatcgtgtctgcttataatattcactgatctgcagtttatgagaacacattttcacagttatgtttcttcataggaaaactatatttagtgggcaacaactatttttatgatgggatgggggagtatatacacgtatagaatctgtacgcgttgaacaacttggttcaagatggtgggggcatttttagagcggcaataattgaaaaaaaaggcgaactctgccttggagaggtagatgataagaaataaaaaggtgtttataactattttgtattataaagtgggccttagagataggaagaagaatgatggattccttttggatcaatcagaaaggaaacacgaaagaaaagtcaggaaggtagagagagaaaaagggagggaaggagaaagaatgggaataaaataaggaggtaagagatactatttttgctgagcaaccagtgtgtttcaggatgatacaaagaaaaatatagaatagaaataagtgcaggcttggaatcagctacaaatcctaaagatgggnnnnnnnnnnnnnnnnnnnnnnnnnnnnnnnnnnnnnnnnnnnnnnnnnnnnnnnnnnnnnnnnnnnnnnnnnnnnnnnnnnnnnnnnnattaaaattccagagtgaccgtggcacttgggtgtacaggtaattcctccagagctgtttgctggcttcaggagtggagtgagaatttcttttttatgaaaagggatataaaggcaccgagctgatgcagtatttgtaatattaagttgacctaacaaggtatttgcatgagtcacaattacaaagttttgagcggttttgtaatttgacatttaggaaagtctcctatttattctcatactttacattcatgcttagtatactatagaggatgccagctttaatctttctgtcatttaaagcaatatgataagggtattcaataattgggtgccctaaatttctggatgagaaaattttcaattctggcccatgagaaag

SEQ ID NO: 187778 - DNA, 1040 bp, Homo Sapiens
  misc_feature (567)..(627): n is a, c, g, or t
  misc_feature (638)..(655): n is a, c, g, or t
taaaaggcaactttgtacaaaaaagttgggttagctttaggatcgtgtctgcttataatattcactgatctgcagtttatgagaacacattttcacagttatgtttcttcataggaaaactatatttagtgggcaacaactatttttatgatgggatgggggagtatatacacgtatagaatctgtacgcattgaacaacttggttcaagatggtgggggcatttttagagcggcaataattgaaaaaaaaggcgaactctgccttggagaggtagatgataagaaataaaaaggtgtttataactattttgtattataaagtgggccttagagataggaagaagaatgatggattccttttggatcaatcagaaaggaaacacgaaagaaaagtcaggaaggtagagagagaaaaagggagggaaggagaaagaatgggaataaaataaggaggtaagagatactatttttgctgagcaaccagtgtgtttcaggatgatacaaagaaaaatatagaatagaaataagtgcaggcttggaatcagctacaaatcctaaagatgggnnnnnnnnnnnnnnnnnnnnnnnnnnnnnnnnnnnnnnnnnnnnnnnnnnnnnnnnnnnnntcatgagtaannnnnnnnnnnnnnnnnnattaaaattccagagtgaccgtggcacttgggtgtacaggtaattcctccagagctgtttgctggcttcaggagtggagtgagaatttcttttttatgaaaagggatataaaggcaccgagctgatgcagtatttgtaatattaagttgacctaacaaggtatttgcatgagtcacaattacaaagttttgagcggttttgtaatttgacatttaggaaagtctcctattttattctcatactttacattcatgcttagtatactatagaaggatgccagcttttaatctttctgtcatttaaagcaatatgataagggtattcaataatttgggtgccctaaatttctggatgagaaaaattttcatttctggccatgagaaag

SEQ ID NO: 187779 - DNA, 2390 bp, Homo Sapiens
ttggcttgaagtctatatacaggaggctagttctgactggtcacaggtctggattgtagactgtaggaaatgtaagcatccaaggagctgttgggaaaagcttacaaaacacagtggagaaaagcagaagagttgggaaaggcatccttttgtcctggatagctacagttttccccacccaaatatgggaagcttctttgcaagctcaatgtatgagaagtggaagggccaacctctagcctgtctctaaggaaagcagagttgcacccttatgtgatttttgtctcccttttatccagtcggagtctagccagtcagaggcgtctgtccggagggaggaatcacccatggatgtggaccagccatctcccagtgctcaagatactcaatccattgcctccgatggaaccccacagggggagaaggaaaaggaagaaagaccacctgagttacccctgctcagcgagcagctgagtttggacgagctgtgggacatgcttggggagtgtctaaaggaactagaggaatcccatgaccagcatgcggtgctagtgctacagcctgctgtcgaggccttctttctggtccatgccacagagcgggagagcaagcctcctgtccgagacacccgtgagagccagctggcacacatcaaggacgagcctcctccactctcccctgcccccttaaccccagccacgccttcctcccttgacccattcttctcccgggagccctcatctatgcacatctcctcaagcctgccccctgacacacagaagttccttcgctttgcagagactcaccgcactgtgttaaaccagatcctacggcagtccacgacccaccttgctgatgggccttttgctgtcctggtagactacattcgtgtcctcgactttgatgtcaagcgcaaatatttccgccaagagctggagcgtttagatgaggggctccggaaagaagacatggctgtgcatgtccgtcgtgaccatgtgtttgaagactcctatcgtgagctgcatcgcaaatcccccgaagaaatgaagaatcgattgtatatagtatttgaaggagaagaagggcaggatgctggcgggctcctgcgggagtggtatatgatcatctctcgagagatgtttaaccctatgtatgccttgttccgtacctcacctggtgatcgagtcacctacaccatcaatccatcttcccactgcaaccccaaccacctcagctacttcaagtttgtcggacgcattgtggccaaagctgtatatgacaaccgtcttctggagtgctactttactcgatccttttacaaacacatcttgggcaagtcagtcagatatacagatatggagagtgaagattaccacttctaccaaggtctggtttatctgctggaaaatgatgtctccacactaggctatgacctcaccttcagcactgaggtccaagagtttggagtttgtgaagttcgtgacctcaaacccaatggggccaacatcttggtaacagaggagaataagaaggagtatgtacacctggtatgccagatgagaatgacaggagccatccgcaagcagttggcggctttcttagaaggcttctatgagatcattccaaagcgcctcatttccatcttcactgagcaggagttagagctgcttatatcaggactgcccaccattgacatcgatgatctgaaatccaacactgaataccacaagtaccagtccaactctattcagatccagtggttctggagagcattgcgttctttcgatcaagctgaccgtgccaagttcctccagtttgtcacgggtacttccaaggtacccctgcaaggctttgctgccctcgaaggcatgaatggcattcagaagtttcagatccatcgagatgacaggtccacagatcgcctgccttcagctcacacatgttttaatcagctggatctgcctgcctatgagagctttgagaagctccgccacatgctactgttggctatccaggagtgctctgaaggctttgggctggcctaataaggccctgcccaactccgtggggttttttttaccattgttggacctggggaggggggagttaaaaaaagaaccagaaagaaattgtcaaaaaccaataaatgaaatccaccaactcaccgtgtgtgtcccaactgccccatcttccccagcgcatacctgttcctcttctcattctctccccgccgcctgtttcctcaccttctctcccctttccatgccgtccatgatccccaccccatgtgtttttaaaaaggcagtaccctttgcagaggacctgtctgtcccaactgtttaaacagtgtgctcctcagattctgtgttcagaaagatttgctgctttga

SEQ ID NO: 187780 - DNA, 1877 bp, Homo Sapiens
  misc_feature (1213)..(1258): n is a, c, g, or t
tgtacaaaaagttggcgccgagcaagatggcggcgcgagtgctgcgcgcccgcggagcggcctgggccggcggcctcctgcagcgggcggccccctgcagcctcctgcccaggctccggacatggacatcttccagcaacagatctcgagaagacagctggctaaaatccttatttgtccggaaagttgatccaagaaaagatgcccactccaatctcctagccaaaaaggaaacaagcaatctatacaaattacagtttcacaatgttaaaccggaatgcctagaagcatacaacaaaatttgtcaagaggtgttgccaaagattcacgaagataaacactacccttgtactttggtggggacttggaacacgtggtatggcgagcaggaccaagctgtccacctctggaggtatgaaggaggctatccagccctcacagaagtcatgaataaactcagagaaaataaggaatttttggaatttcgtaaggcaagaagtgacatgcttctctccaggaagaatcagctcctgttggagttcagtttctggaatgagcctgtgccaagatccggacctaatatatatgaactcaggtcttaccaactccgaccaggaaccatgattgaatggggcaattactgggctcgtgcaatccgcttcagacaggatggtaacgaagccgtcggaggattcttctctcagattgggcagctgtacatggtgcaccatctttgggcttacagggatcttcagaccagggaagacatacggaatgcagcatggcacaaacatggctgggaggaattggtatattacacagttccacttattcaggaaatggaatccagaatcatgatcccactgaagacctcgcccctccagtaaagctgtagagtttctatgtgcctacatacatttctgtgacaagtatttgtcgtaaattaattttaattgtgtatcaagtgaaaaagaaacactgaggttttaagctgctgtatatagcttgtgagaaacctcttttctttaaaatttacataatcacaagaaaggaaagaattacagttggactgattgtgacagtgccttgtcgtcctctttgaaacaccccgtgttgtccagtataccttataacactgagccacttctccccaccctccagaaggggtccacgttgaattctgaatcatcttgaaaataagattccaaccacnnnnnnnnnnnnnnnnnnnnnnnnnnnnnnnnnnnnnnnnnnnnnntctgttttataatcacagatttttagacaaatttcttgtatcaggaagaaatacaaattttgtcatgtttctcaagcagtttttctgagtagtttctgaggaggaacaaattacaagtgtacccaataactgaaaatgttttaactcactctcatttgtaagcagtccacatagtagacaatgggttttccaagctgggcaaggtacatttaatcagtaaatcagtttcacatcatgtattgtgatgtttcaatgtgagacacaaaaacaatggcttgaaacttgtgtatcatatgtgattttgaaatgaacaccttgaatagcactaatttttatttgtggtatttttctataacaaaacaagtagctctaggaaaagaggttttattttgtaaacgatcatttgtgacctcagacactctctggctaatattttaataagctcacagcagataattctgagatcatgggtgaggggtggtgcatgttgagatttaaattggcataaagctgcatactttttgtctagctgtttgatttcattttttaatatagtatgccaattttgtgactgttaccatgtgaaagtcctgttgaaatgaacaattgtctgccccac

SEQ ID NO: 187781 - DNA, 1691 bp, Homo Sapiens
ttggcagcgaggaagatgaggacgatgtgcacagatgcggccgctgccaggcagagttcaccgccttggaggattttgttcagcacaagattcagaaggcctgccagcgggcccctccggaggccctgcctgccacccctgccaccacagcgttgctgggccaggaggtggtgccggcagcaccaggcccagaggagcccatcactgtggccacatcgtggtggaggcggcctctctggcagcagacatcagccacgcatctgaccttgttggtggtgggcacatcaaagaggtcatcgtggctgctgaggcggagctgggagacggtgagatggccgaggccccgggcagcccccaccagcaggggctggggctcgcaggggagggtgagcaggcccaggtgaagctactggtgaacaaggatggccgctatgtgtgtgcgctgtgccacaagaccttcaagacgggcagcatcctcaaggcccacatggtcactcacagcagccgcaaggaccacgagtgcaagctctgtggggcctccttccgcaccaagggctcactcatccggcaccaccggcggcacacggatgagcgcccctacaagtgctccaagtgtggaaagagcttccgggagtcgggtgcactgacccggcacctcaagtctctcaccccctgcacagagaaaatccgcttcagtgtgagcaaggacgtggttgtcagcaaagaggacgcacgtgcaggttctggagctggagctgccggcttggggacagccacatcatcggtgacaggcgagcctatagagacttcacccgtgattcacctggtgacagatgccaagggcaccgtcatccacgaagtccacgtccagatgcaggagctgtccctgggcatgaaagccctggccccagagccccccgtctcccaggagctcccctgctccagcgagggcagccgtgagaacctgctgcaccaggccatgcagaactccggcatcgtccttgagcgcgctgctggggaggagggtgccctggagccagctcctgctgccgggtccagtccccagcccctggcagtggcagccccgcagctgccggtactggaagtgcagccgctggagacagtggccagcgaggcctcagcggtgcccaggacccacccatgtcctcagtgcagtgagaccttcccgacagcagccaccctggaggcccacaagaggggccacaccgggccgaggccgttcgcctgcgcgcagtgtggcaaggccttccccaaggcctacctgctcaagaagcaccaggaggtgcacgtgcgtgagcgccgcttccgctgtggcgactgcgggaagctctacaagaccattgcccatgtgcgtggccaccggcgcgtccactcagacgagcggccctacccttgtcccaagtgtggcaagcgctacaagactaagaacgcacagcaggtgcacttcaggacacacctggaggagaagccgcacgtgtgccagttctgcagccgtggcttccgagagaagggctcactggtgcggcacgtgcgacaccacacaggcgagaagccgttcaagtgctacaagtgcggccgtggcttcgccgagcacggcacgctgaaccggcacctgcgcaccaaagggggctgcctgctggaggtggaggagttgctggtgtctgaggaca

SEQ ID NO: 187782 - DNA, 1510 bp, Homo Sapiens
ttggctatgttttgaccaatttgtttacaagctagcagaccagatatttgcctattataaggttatggcaggaagtttgcttcttgataaacggttacgatcagaatgcaagaatcagggagccacgatccacctcccgccgtctaaccgctacgagacgctgctgaagcagaggcatgtgcagctcctcggcagatcaatagacctcaatcgtctgatcacccagcgcgtctcagcagccatgtataagtccctagaactggcgattggacgatttgaaagtgaagatttgacctccatagttgagctggatggcctgttggaaatcaaccgcatgacccacaagctgctgagccggtacctgacgctggacagcttcgacgccatgttccgggaggccaaccacaacgtgtcagcgccctacgggaggatcaccctgcacgtcttctgggagctcaactatgacttcctgcccaactactgctacaacggctctaccaaccggtttgttcggacagtgttaccattttctcaggaatttcaaagagataagcagcctaatgcacagcctcagtatctgcatggatccaaggctttgaacttggcctactccagcatttacggcagctaccggaacttcgtgggacctccacactttcaagtcatctgccggcttctcggctaccagggtatcgccgtggtcatggaggagctgctgaaggtcgtcaagagcctgctgcaaggcacaatcctgcagtacgtgaagacgctgatggaggtgatgcccaagatctgccgcctgccccggcacgagtacggctctcctggtatcctggagttcttccaccaccagctgaaggacatcgtggagtacgcagagctgaagacggtgtgcttccagaacctgcgggaggtggggaacgccatcctcttctgcctgctcatcgagcagagcctgtctttagaagaagtgtgtgacctgctgcacgcggctcctttccagaacatcttgccgcgagtccatgtgaaagagggggagagacttgatgccaaaatgaaaagactagaatcaaagtacgccccgctgcatcttgtcccactgattgaaagactggggacccctcagcaaattgccatcgcaagagagggggacctgctgacaaaggagcgcctctgctgcggcctgtccatgtttgaggtcatcctgacacggatccggagctttctggatgaccccatctggcgcgggcctctgcccagcaatggggtcatgcatgtggacgagtgtgtggagtttcacagactgtggagtgccatgcagtttgtctactgcattcccgtgggggacacacgagttcacagtcgagcagtgctttggtgatgggctacactgggctggctgtatgatcatcgtacttcttgggcagcagcggcgttttgctgtgctggatttctgctaccatcctacttaaagtccagaaccttgatgggcaagatgaaattattaaaa

SEQ ID NO: 187783 - DNA, 1449 bp, Homo Sapiens
ttgggaagaaatttaaggaggtggccgaggcatatgaagtgctgtctgacaagcacaagcgggagatttacgaccgctatggccgggaagggctgacagggacaggaactggcccatctcgggcagaagctggcagtggtgggcctggcttcaccttcaccttccgcagccccgaggaggtcttccgggaattctttgggagtggagacccttttgcagagctctttgatgacctgggccccttctcagagcttcagaaccggggttcccgacactcaggccccttctttaccttctcttcctccttccctgggcactccgatttctcctcctcatctttctccttcagtcctggggctggtgcttttcgctctgtttctacatctaccacctttgtccaaggacgccgcatcaccacacgcagaatcatggagaacgggcaggagcgggtggaagtggaggaggatgggcagctgaagtcagtcacaatcaatggtgtcccagatgacctggcactgggcttggagctgagccgtcgcgagcagcagccgtcagtcacttccaggtctgggggcactcaggtccagcagacccctgcctcatgccccttggacagcgacctctctgaggatgaggacctgcagctggccatggcctacagcctgtcagagatggaggcagctgggaagaaacccgcagatgtgttctgagctggatgccgggttccagaatcgctgcacagttccaacaggacagcgccttcccccatgcgctgggaggggaccctccatttctccccctcacccatgctgagtgtagagccggggcctgggtggcgggtgggggccgggtgggaggtggcagtagtcttagcctgtgcactctcttccttgggtgtttggtgctggctcctggggactacaaatcccagagtgcggtgtgcccggcctcatttctgatagatcccgcttgggggaggtggtgtatggttacggagctgtgcatcttgggacatgtagtagcccaggtcggcttgtcactcgctgtgagatggggagattttgtcttttgatttatccctgtagggctggcagggttgtagatgaagggggaatgatctgagccttggttcccctgacacgtcttgctagccccagggttagagtgggcagggcagagccgcgcagcacctgggagcggtacctttcccttgggcagcctggggtcccaggaacaagccagggcgagtggcatgtctgcctgagcagggtgtggccccagaaagctgaggattgtgggctggcagagagcttcaagggcaaggccacccgcgggggcgtgtgtgtggtggggcttgacatgtgatggtttcttcttgcatgccgctgcatgtatggttttcttcgcgccccgaccctgctgccaattctttccatcatcacaaatgaa

SEQ ID NO: 187784 - DNA, 1458 bp, Homo Sapiens
  misc_feature (215)..(264): n is a, c, g, or t
  misc_feature (306)..(356): n is a, c, g, or t
ttggctatttaatggtgagcttttaaatagtactaattattatagaaaatagtcacagacaattataaacacactactgtttcatcttacctctttgtctggtccactcccccatcaatactcagtcttccaacacatatatcaattagtactatttaatggtgagcttttaaaaatgtaggatagagggtacagtggcactgtatatactattnnnnnnnnnnnnnnnnnnnnnnnnnnnnnnnnnnnnnnnnnnnnnnnnnnctcgaggctgtaatgtgccatgatgattgcacctgcgaatannnnnnnnnnnnnnnnnnnnnnnnnnnnnnnnnnnnnnnnnnnnnnnnnnnttttagaacttttttaaaatcaaagtgcagattgcttgtatgtaaaacccaaataaaggtagagtaagtgtgatatatgggagtattaaaatagcttaaaatttctcgtgaaggacatgtggctaaagggtcaaaaaggatgtaagacttggagccagagcatagtatttcctgaaataacaagtttagtgctttaactatggctacatgtgcttaaggaattttgagccacttatttttgaagatgctgaggacatgtagagtgctttttgtagtgagctaaccttgatctctaaggactaactacccaggtccaggtcttcactaggggtactgacagtgtttaagctttactccacctccttacttagaaatcactttacgatttatttccattttccacttttatagaccatccttttgcttatatgctagatttttctggtgagggaagggttgtgttcttcaggggtcttttgttttgaaatactcaggatggggagaggtttatttaagaacgaattataattatggtttacactgttgggagtaaaggagcatttttacaccccttaagggtgcttaattctgttgaaaccaaaaagatttgtctacaaatgctatcttttttagaaactattagaaatgactccctttcaaagtcaatctttggaaaatattgaggaggtcactaattagttggtgcagttaatataattcaagatgatttggatgatgggaagtttgagaccgctgcattttgtttttaaattatgcaccttctgataacccccaaatacagaaatgttctacatctctgaatgacctctgactttaaaaaagtttttatttgcatggctgtatttacattaacactgacattttcttctactcttctcccttctttcatcttggggttgggtagagaaacacaaaggaaactgaagcatgtgccattctatactgtcattcccaattctcatggactattgcctgttgtgaaaatgtttgaaactgcactgaaagctgcatctgtctgtatctttcttttgtaaatgacctcacatgtaaattcaccaaataaatattacattcaagctct

SEQ ID NO: 187785 - DNA, 2174 bp, Homo Sapiens
  misc_feature (1925)..(1933): n is a, c, g, or t
ttggaaagacatacacacttcatgtaatgctacctgcaagtctccctagaaaagcagtttttgtaggtgaaaacaatgaagccaggtaatattgcaaggaggctgtaattttagcagacctaccaacaacactgatgtaggaagctcattattttaatttctggagccttttaattttttctttagaaagtgtataaataattgcagtgctgctttgcttccaaaactgggcagtgagttcaacaacaacgacaacaacagccgcagctcatcctggccgtcatggagtttcttgaaagaacgtatcttgtgaatgataaagctgccaagatgtatgctttcacactagaaagaaggagctgcaaatgaacacttcatagcaatgtggaactccaacagaaaccggtgaataaagatcagtgtcccagagagagaccagaggagctggagtcaggaggcatgtaccactgccacagtggctccaagcccacagaaaagggggcgaatgagtacgcctatgccaagtggaaactctgttctgcttcagcaatatgcttcattttcatgattgcagaggtcgtgggtgggcacattgctgggagtcttgctgttgtcacagatgctgcccacctcttaattgacctgaccagtttcctgctcagtctcttctccctgtggttgtcatcgaagcctccctctaagcggctgacatttggatggcaccgagcagagatccttggtgccctgctctccatcctgtgcatctgggtggtgactggcgtgctagtgtacctggcatgtgagcgcctgctgtatcctgattaccagatccaggcgactgtgatgatcatcgtttccagctgcgcagtggcggccaacattgtactaactgtggttttgcaccagagatgccttggccacaatcacaaggaagtacaagccaatgccagcgtcagagctgcttttgtgcatgcccttggagatctatttcagagtatcagtgtgctaattagtgcacttattatctactttaagccagagtataaaatagccgacccaatctgcacattcatcttttccatcctggtcttggccagcaccatcactatcttaaaggacttctccatcttactcatggaaggtgtgccaaagagcctgaattacagtggtgtgaaagagcttattttagcagtcgacggggtgctgtctgtgcacagcctgcacatctggtctctaacaatgaatcaagtaattctctcagctcatgttgctacagccagctgggacagccaagtggttcggagagaaattgctaaagcccttagcaaaagctttacgatgcactcactcaccattcagatggaatctccagttgaccaggaccccgactgccttttctgtgaagacccctgtgactagctcagtcacaccgtcagtttcccaaatttgacaggccaccttcaaacatgctgctatgcagtttctgcatcatagaaaataaggaaccaaaggaagaaattcatatcatggtgcaatgcatattttatctatttatttagttgcattcaccatgaaggaagaggcactgagatccatcaatcaattggattatatactgatcagtagctgtgttcaattgcaggaatgtgtatatagattattcctgagtggagccgaagtaacagctgtttgtaactatcggcaataccaaattcatctcccttccaataatgcatcttgagaacacataggtaaatttgaactcaggaaagtcttactagaaatcagtggaagggacaaatagtcacaaaattttaccaaaacattagaaacaaaaaataaggagagccaagtcaggaataaaagtgactctgtatgctaacgccacattagaacttggttctctcaccaagctgtaatgtgannnnnnnnnctactctgaattggaaatatgtatgaatatacagagaagtgcttacaactaatttttatttacttgtcacattttggcaataaatccctcttatttctaaattctaacttgtttatttcaaaactttatataatcactgttcaaaaggaaatattttcacctaccagagtgcttaaacactggcaccagccaaagaatgtggttgtagagacccagaagtcttcaagaacagccgacaaaa

SEQ ID NO: 187786 - DNA, 886 bp, Homo Sapiens
tgtacaaaagccacagccagtcaacccactgttccaggacagtcctgacctcggcctggactactatagcggggacagcagcatgtcaccactgccctcacagtcgagggccttcggcgtgggagagcgagacccctgtgacttcataggaccctactccatgaacccgtccacgccttccgatggcacctttggccaaggcttccactgcgactcgcccagcctgggtgctcccgagcttgatggcaagcatttcccaccgctggcccacccacccacggtgtttgacgccggcctgcagaaggcatactcgcccacctgctcgcctacactgggcttcaaggaagagctgcggccaccgcccacaaagctggctgcctgcgagcccctcaagcatggactccagggggccagcctgggccacgcagctgcagcccaggcccacctgagctgccgggacctgccgctgggccagccccactacgattcccccagctgcaagggcacagcctattggtaccctccaggctcagctgcccgcagcccgccctatgaaggcaaggtgggtacagggctgctggctgacttcctgggcaggacggaggccgcgtgcctcagtgcccctcacctggctagcccaccagccacgcccaaggccgacaaggagccactggaaatggcccggccccctggcccaccccgtggccctgctgcagccgctgctggctatggctgcccactccttagtgacttgaccctgtcccccgtgccgagggactcgctgctgcccctgcaggacaccgcctacaggtacccaggctttatgccccaggcgcatcctggcctgggtgggggccccaagagcggcttcctggggcccatggcg

SEQ ID NO: 187787 - DNA, 251 bp, Homo Sapiens
actttgtacaaaaaagttgggaaagagcccaaccctggcgttggggggcccgggcggggagcccctcccgcggtccacagcgacgcctgcccagccctcctccccttccggctccggcacggggccccgaggcgttcggaggccaggcgggtttctgtcaggcccggggaggaggggcgggcggggcggccgctgcctccccgggacgggccgtaccacgcggacggggaggacggggccaggggactgca

SEQ ID NO: 187788 - DNA, 1769 bp, Homo Sapiens
ttgggtttgtttgttttaatcaatgaatgaatgaagggaatcagatgtcactgatgaagaaaacttccataatttcttgtgaataaggtcaaagacaacgtattaggttcttagttgttggggtttttttaagtaaggaatagctgcttttcccctaagcctttagatcaggggcttaattttaatgcagtggtttctaaaatattggcccagtgacagccttgatgaaattttcacttatcctccacaaaaatgataaaagctaggacagtgtaggaaactttttataaaggtaatttgcatacctctgttatgaaattatgttctctctgcttttcccatgtgaaaatgtgttctgttatgaacataggtgataatgataattgtgtgtctacatgtgggtgcttaatgtcctgactgggcaaaatacaaggtggtgaccctctactggtgctctaatttaaaaatatatgtatatttgaactttataatcagttaaactcagaagtatcctctaatcataccgggttaggctttgagtcctggagatagatcctgctctgctggttgaggaccttaatcataaggcacggtattaacagcaaggttccaggataactgtctgcagtgtcacagtgtaaaaggagaaatgtaaatttaaaaatgcttcaagacttttgtctaatacatattattcaaaaatttgaaactgttatttttgccaaatgcttcagctattattgcaattattttttataatcacaaaagatgttactatactggcatttgtttttaaaagctgtcgatattcaaccagcatgccttggactttattgtgggaagaccctattatttaaaaatggctcaactgaaatatatggagaatgtggggtatgcccaagaggacagagaacgaatgcacagaaatattgtcagccttgcacagaatctcctgaactttatgattggctctatcttggatttatggcaatgcttcctctggttttacattggttcttcattgaatggtactcggggaaaaagagttccagcgcacttttccaacacatcactgcattatttgaatgcagcatggcagctattatcaccttacttgtgagtgatccagttggtgttctttatattcgttcatgtcgagtattgatgctttctgactggtacacgatgctttacaacccaagtccagattacgttaccacagtacactgtactcatgaagccgtctacccactatataccattgtatttatctattacgcattctgcttggtattaatgatgctgctccgacctcttctggtgaagaagattgcatgtgggttagggaaatctgatcgatttaaaagtatttatgctgcactttacttcttcccaattttaaccgtgcttcaggcagttggtggaggccttttatattacgccttcccatacattatattagtgttatctttggttactctggctgtgtacatgtctgcttctgaaatagagaactgctatgatcttctggtcagaaagaaaagacttattgttctcttcagccactggttacttcatgcctatggaataatctccatttccagagtgggataaacttgagcaagatttgcccctttggctttggtacctacaccagcccttttttacttgttcactgcaaaatttaccgaaccttcaagatactctcagaagagccaatggacactgagtgtagacatgtgaaatgccaaaacctgagagtgctccta

SEQ ID NO: 187789 - DNA, 1367 bp, Homo Sapiens
agcaatgctttttctataatagccaactttgtacaaaaaagttggcttggatttatggcaatgcttcctctggttttacattggttcttcattgaatggtactcggggaaaaagagttccagcgcacttttccaacacatcactgcattatttgaatgcagcatggcagctattatcaccttacttgtgagtgatccagttggtgttctttatattcgttcatgtcgagtattgatgctttctgactggtacacgatgctttacaacccaagtccagattacgttaccacagtacactgtactcatgaagccgtctacccactatataccattgtatttatctattacgcattctgcttggtattaatgatgctgctccgacctcttctggtgaagaagattgcatgtgggttagggaaatctgatcgatttaaaagtatttatgctgcactttacttcttcccaattttaaccgtgcttcaggcagttggtggaggccttttatattacgccttcccatacattatattagtgttatctttggttactctggctgtgtacatgtctgcttctgaaatagagaactgctatgatcttctggtcagaaagaaaagacttattgttctcttcagccactggttacttcatgcctatggaataatctccatttccagagtggataaacttgagcaagatttgccccttttggctttggtacctacaccagcccttttttacttgttcactgcaaaatttaccgaaccttcaaggatactctcagaaggagccaatggacactgagtgtagacatgtgaaatgccaaaaacctgagaagtgctcctaataaaaaagtaaatcaatcttaacagtgtatgagaactattctatcatatatgggaacaagattgtcagtatatcttaatgtttgggtttgtctttgttttgtttatggttagacttacagacttggaaaatgcaaaactctgtaatactctgttacacagggtaatattatctgctacactggaaggccgctaggaagcccttgcttctctcaacagttcagctgttctttagggcaaaatcatgtttctgtgtacctagcaatgtgttcccattttattaagaaaagctttaacacgtgtaatctgcagtccttaacagtggcgtaattgtacgtacctgttgtgtttcagtttgtttttcacctataatgaattgtaaaaacaaacatacttgtggggtctgatagcaaacatagaaatgatgtatattgttttttgttatctatttattttcatcaatacagtattttgatgtattgcaaaaatagataataatttatataacaggtttttctgtttata

SEQ ID NO: 187790 - DNA, 1859 bp, Homo Sapiens
  misc_feature (1057)..(1308): n is a, c, g, or t
  misc_feature (1317)..(1344): n is a, c, g, or t
  misc_feature (1689)..(1721): n is a, c, g, or t
  misc_feature (1766)..(1775): n is a, c, g, or t
caaaaacttgtctttagtgaaatatgtacagaaaattctttgattatattctggagtacatcctgccaaatagtgccccagtcctccctgacctacatgatggataaagttagggcactgatgttcatccatccaatgcagtgaaaggtactctcttttagggttgaaaaaaatctcttagctttccagggggtgcaagaagccctgcattgagcaaagaaaggaagctaggaagctccggtgtgaggtcagcctgggctgggactccacactactgtcccagggagtcgggcagcctttgtggggctgggcactgcctctttggcttcctgccttactgggcagtgcatctggccatctgccccttggactttggactttacttaagagaaaactcaacaagggcagaaagcccaattcaaaacgtctttctgcctgacagcaggccccaaatagccccagcacagcagtgttctgggtgtccagttcccacatttcccgagcagcctgacgcatgccaggtcctatgcaccagggatattaaagtgactcaaggaggcaggaagccattattcaaggctgtgggtttctagcaggaagcacaaatgatgactaaaccctagtttctgtcttttaagagaggagccacttggagagacaagaagtaaacctaatttcaacacaccatgctaaatgccaggatatgagtgagcactgcagaaagcagagactgggggagaagtggtctttacttccttcacctgtggtgggatccctcaaagacatgaggatttaaacacgccaagaaaagttgcaacaattaaatatgatattatacatatactgagtattattcatgtttatgacctagaaattcttcatgggagggctgaaaagggtgatattttaatttctggttaaatggttgaactgtgtgtgaagcaaatgctctaaagaactgacataaatttactcgatagtgatgatctaaacaagttctcaacaaatatgttgagatctgatgttaaaatttggggaggggccaggtagctcacgnnnnnnnnnnnnnnnnnnnnnnnnnnnnnnnnnnnnnnnnnnnnnnnnnnnnnnnnnnnnnnnnnnnnnnnnnnnnnnnnnnnnnnnnnnnnnnnnnnnnnnnnnnnnnnnnnnnnnnnnnnnnnnnnnnnnnnnnnnnnnnnnnnnnnnnnnnnnnnnnnnnnnnnnnnnnnnnnnnnnnnnnnnnnnnnnnnnnnnnnnnnnnnnnnnnnnnnnnnnnnnnnnnnnnnnnnnnnnnnnnnnnnnnnnnnntccatctcnnnnnnnnnnnnnnnnnnnnnnnnnnnngtcggggagggaaaccacgatgtaatacttgggactggagattttaggaaatgatctggtatttttctgaaggagaaaagaacaactccttttaatcttttggaagcaagtctcttccattttcaacattaatggttataggtcaccatccgttaagaagatgtgttttgtctatttccattaaaatgtaagttctaggaggaaggaacaaagttgtttttcgccatggtatccccagtgcttggtatataacagagactcaattagcttgctgaatgaccaaacaaatgatttcagcttttgataacatctttggaacttgagagcatacaccttggcttttgnnnnnnnnnnnnnnnnnnnnnnnnnnnnnnnnntgtgcccttctgggaatgaaccaggactatttgaatggaaagagnnnnnnnnnngctgtcatagttaaaaaataagtacatgttctcttccagattaaattcccttggaccttttaatttatgctagaacaagcccaa

SEQ ID NO: 187791 - DNA, 1757 bp, Homo Sapiens
  misc_feature (1581)..(1591): n is a, c, g, or t
ttggcgtggaggatgtgaatgaggcacctgtgtttgtcccaccctccaaagtcgttgaggtccaggagggcatccccactggggagcctgtgtgtgtctacactgcagaagaccctgacaaggagaatcaaaagatcagctaccgcatcctgagagacccagcagggtggctagccatggcccagacagtgggcaggtcacagctgtgggcaccctcgaccgtgaggatgagcagtttgtgaggaacaacatctatgaagtcatggtcttggccatggacaatggaagccctcccaccactggcacgggaacccttctgctaacactgattgatgtcaacgaccatggcccagtccctgagccccgtcagatcaccatctgcaaccaaagccctgtgcgccacgtgctgaacatcacggacaaggacctgtctccccacacctcccctttccaggcccagctcacagatgactcagacatctactggacggcagaggtcaacgaggaaggtgacacagtggtcttgtccctgaagaagttcctgaagcaggatacatatgacgtgcacctttctctgtctgaccatggcaacaaagagcagctgacggtgatcagggccactgtgtgcgactgccatggccatgtcgaaacctgccctggaccctggaaaggaggtttcatcctccctgtgctgggggctgtcctggctctgctgttcctcctgctggtgctgcttttgttggtgagaaagaagcggaagatcaaggagcccctcctactcccagaagatgacacccgtgacaacgtcttctactatggcgaagaggggggtggcgaagaggaccaggactatgacatcatctagctccaccgaggtctggaggtcaggccggaggtggttctccgcaatgacgtggcaccaaccatcatcccgacacccatgtaccgtcctaggccagccaacccagatgaaatcggcaactttataattgagaacctgaaggcggctaacacagaccccacagccccgccctacgacaccctcttggtgttcgactatgagggcagcggctccgacgccgcgtccctgagctccctcacctcctccgcctccgaccaagaccaagattacgattatctgaacgagtggggcagccgcttcaagaagctggcagacatgtacggtggcggggaggacgactaggcggcctgcctgcagggctggggaccaaacgtcaggccacagagcatctccaaggggtctcagttcccccttcagctgaggacttcggagcttgtcaggaagtggccgtagcaacttggcggagacaggctatgagtctgacgttagagtggttgcttccttagcctttcaggatggaggaatgtgggcagtttgacttcagcactgaaaacctctccacctgggccagggttgcctcagaggccaagtttccagaagcctcttacctgccgtaaaatgctcaaccctgtgtcctgggcctgggcctgctgtgactgacctacagtggactttctctctggaatggaaccttcttaggcctcctggtgcaacttaannnnnnnnnnnaatgctatcttcaaaacgttagagaaagttcttcaaaagtgcagcccagagctgctgggcccactgggccgtcctgcatttctggtttccagaccccaatgccctcccattcggatggatctctgcgtttttatactgagtgtgcctaggttgccccttatttttt

SEQ ID NO: 187792 - DNA, 1335 bp, Homo Sapiens
ttggggagaaacgggctttgggtgcctgtctctacctttgtgcccagggtatctgaccctctgaggcatcctgaccatcaactctctgctccccaggggcctcctggacctgttggcctccctggtgagattggaatccgaggccccaagggggaccctggaccagatggaccatcggggcccccaggaccccctgggaaacctggtcgcccgggaaccatccagggtctggaaggcagtgcggatttcctgtgtccaaccaactgtccacccggaatgaaaggtcccccagggctgcagggagtgaaggggcatgcgggcaaacgcgggattctgggtgatcctggccaccaggggaagccgggtcccaagggagatgtgggtgcctctggagagcaaggcatccctggaccaccgggtccccagggcatcaggggctacccaggcatggcagggcccaagggagagacgggccctcatggatataaaggcatggtgggcgctatcggtgccactgggccaccgggtgaggaaggtcctaggggaccgccaggccgagctggggagaagggtgacgagggcagcccaggtattcgtggaccccaggggatcacaggcccgaaaggagcaacgggccccccaggcatcaacggcaaggatgggaccccaggcacgcctggcatgaagggcagtgcaggacaggcgggacagcccggaagtccaggccaccagggcctagcgggtgtgccaggccagcctgggacaaaaggaggccctggagaccagggtgagccgggcccgcagggccttcctggattctctggtccccctgggaaagagggagagccagggcctcgaggagaaattggtccccagggcatcatgggacagaagggtgaccaaggcgagaggggtccagtggggcaaccaggccctcagggaaggcagggccctaagggggagcagggcccccccggaattccagggccccaaggcttgccaggcgtcaaaggagacaagggctccccagggaagaccgggccccgcggcaaagtgggtgacccaggggtggtcggcctctctggagagaaaggcgagaagggcgagtccggcgagtcggggctcaagggacagcaaggagtacgtggagaatccggctactctggcctcagcggggatgcgggcgctccaggggttcagggctaccctggtctcctcggctctcgaggactggccgggaactgaggcgtgccaggacagctcgggagacagggcgtggagggctgggatgctactgaccagcacatcgtggatgtggcgctgaagatgctgcaa

SEQ ID NO: 187793 - DNA, 979 bp, Homo Sapiens
tacaaaaaagttggcacatatgtaggtcattcattttgagtaggttgaagaagaaaaaaaatatttaaatgaattgaattcctgatgggatagtatcaataagtatttaaaagccagtattctaaaaataataaagggtagggtcatttttgagtttgtttttcttttgctattgttaatattcaaaattaaagtgttacattggtacctgttgtcttaatgcatttattgagaacagcattgagatgatgaacaaggggttagcaatagcaaactctataattattttgactaattacttaagaggaaaacagtataagtatctcattcagtatttagcaattctgtaaaataagtattatctctatttttcagatgaggaagtaagggtttagcaaggttaagagatctatccaatttacacagcaagttagtagttgagcctgaccatgagtcttctgactctgttcttttcactatgcaatacgcaaacaataaaatgttatacaaatggaatataaagttatttattctttaaaaatgcacatatgatatgatttcagtaagtgtgtggctgtttattttggctatgttaagaatacgggatacagtagatgacaggggaaccatcctcaaaacaggggacatttacatgatggataagaaagccagaatcctccttttcttactgaatcctggcagccagatctttaccatcccatggtggaataccgaagagtcttctctgtgaaatctgaccaatgcaagtgaaaaggcctcattaagatcttgatgtcagacatgtcccggctaaactgcccagctagatgacactacagtgaaaatcatagttggcaatcccaccatcccacgcattatgtctagaccttgcagttagtcttttagtcctgtgctcttaaaaatgagcaaacaaccaagattacaaataaatgaaagagaaaaaacagtctggggaaaa

SEQ ID NO: 187794 - DNA, 1653 bp, Homo Sapiens
agctttgtacaagaaagttggagaagaagcctctggagaggccagtgagattcccgtacccccagggatagagctttccccctccccgccaggagggggcggcatgcagacagagcccgcccgacccggcaacttcctctcagcatcttctccactccctgcatcagcgaagggccaacagccgggaaatgtaactggtacagccttgcccagggtgggccccgtgaggcccactggccaggactggaatcacaccccccagaagacagaccatccatctgccctgctcagagaccccccggagccaggctctcccaggatctcatcactgcgcccccagggcctcagcaacccctccaccctctctgctcagccacagctttccagaagccactcctcgggcagcgtgctgccccttggggagctggagggcaggaggagcaccagggatcggaggagccccgcagagccagaaggaggaccagcaagtgaaggggcagccaggcccctgccccgttttaactccgttcctttgactgacacaggccatgagaggcagtccgagggatcctccagcccgcagctccaggagtctgtcttccacctgctggtgcccagtgtcatcctggtcttgctggccgtcggaggcctcttgttctacaggtggaggcggcggagccatcaagagcctcagagagcggattctcccttggagcaaccagagggcagccccctgactcaggatgacagacaggtggaactgccagtgtagagggaattctaagctggacgcacagaacagtctctccgtgggaggagacattatggggcgtccaccaccacccctccctggccatcctcctggaatgtggtctgccctccaccagagctcctgcctgccaggactggaccagagcagccaggctggggcccctctgtctcaacccgcagacccttgactgaatgagagaggccagaggatgctccccatgctgccactatttattgtgagccctggaggctcccatgtgcttgaggaaggctggtgagcccggctcaggaccctcttccctcaggggctgcaccctcctctcactcccttccatgccggaacccaggccagggacccaccggcctgtggtttgtgggaaagcagggtggacgctgaggagtgaaagaaccctgcacccagagggcctgcctggtgccaaggtatcccagcctggacaggcatggacctgtctccagagagaggagcctgaagttcgtggggcgggacagcgtcggcctgatttcccgtaaaggtgtgcagcctgagagacgggaagaggaggcctctggacctgctggtctgcactgacagcctgaagggtctacaccctcggctcacctaagtgccctgtgctggttgccaggcgcagaggggaggccagccctgccctcaggacctgcctgacctgccagtgatgccaagagggggatcaagcactggcctctgcccctcctccttccagcacctgccagagcttctccaggaggccaagcagaggctcccctcatgaaggaagccattgcactgtgaacactgtacctgcctgctgaacagcctgcccccgtccatccatgagccagcatccgtccgtcctccactct

SEQ ID NO: 187795 - DNA, 1501 bp, Homo Sapiens
ttggggctaaaagatgtgttgtttgtgatcatcccagacctaataacattgaagcaatagaattggcagagactgaagaggcttcttcaataataaatgagcaagacagagctcgatggaggggaagttgcagtagtggtaatagccaaaggagatcacctcctgctacgaagcgggactctgaagtgaaaatggattttcagaggattgaattggctggtgctgtgggaagcaaggaggaacttgaagtagactttaaaaaactaaagcaaattaaaaacaggatgaaaaagactgattggctcttcctcaatgcttgtgtgggggttgtagaaggtgatttagctgccatagaagcatacaagtcatcaggaggagacattgcacgtcagctcaccgcagatgaagtacgcttgctgaatcgtccttctgcctttgatgttggctatactcttgtacacttggctatacgttttcagaggcaggatatgctagcaatattgcttacagaggtgtctcaacaagcagcaaagtgtattccagcaatggtgtgtcctgaactgacagaacaaatccggagagagatagctgcctctcttcatcagagaaagggggattttgcttgctattttctgactgaccttgtaacatttacattgccagcagatattgaagatttgcccccaacagtccaagaaaaattatttgatgaggtgcttgatagagacgttcaaaaagaattagaagaagaatctccaattattaactggtccttggaattggctacacgtttggacagtcgactgtatgcactttggaaccggactgcaggagactgcctacttgattcagttctacaagctacctggggcatctatgacaaggactcagtgcttcggaaagccctgcatgacagcctgcatgactgttcacattggttttacacacgctggaaagattgggaatcatggtattctcagagctttggtttacatttttccttgagagaagaacagtggcaagaagactgggcatttatactctctcttgctagtcagcctggagcaagcttggagcagacgcacatttttgtactggcacatattcttagacgaccaattatagtttatggagtaaaatattacaagagtttccggggagaaactttaggatatactcggtttcaaggtgtttatctgcctttgttgtgggaacagagtttttgttggaaaagtccgattgctctgggttatacgaggggccacttctctgctttggttgccatggaaaatgatggctatggcaaccgaggtgctggtgctaatctcaataccgatgatgatgtcaccatcacatttttgcctctggttgacagtgaaaggaagctactccatgtgcacttcctttctgctcaggagctaggtaatgaggaacagcaagaaaaactgctcaggagtggctggactgctgtgtgacggaggggggagttctgttgccatgc

SEQ ID NO: 187796 - DNA, 1618 bp, Homo Sapiens
  misc_feature (506)..(546): n is a, c, g, or t
ttggctccggggctgggtggcagcggccatggaccgcttcgtttggaccagcggcctcctggagatcaacgagaccctggtgatccagcagcgcggggtgcgaatctacgatggcgaggagaagataaaatttgatgctgggactctccttcttagtacacaccgactgatttggagagatcagaaaaatcatgagtgttgcatggccattctcctttcccaaattgtgttcattgaagaacaggcggctggaattgggaagagtgccaaaatagtggttcatcttcacccagctcctcctaacaaagaacctggcccattccagagtagtaagaactcctacatcaaactctccttcaaagaacatggccagattgagttttacaggcgtttatcagaggaaatgacacaaagaagatgggagaatatgccagtttcccagtcattacaaacaaatagaggaccccagccaggaagaataagggctgtaggaattgtaggtattnnnnnnnnnnnnnnnnnnnnnnnnnnnnnnnnnnnnnnnnncatttctgaggcctttgaagacctcagcaaactaatgatcaaggctaaggaaatggtggaattatcaaaatcaattgctaataaaattaaagacaaacaaggtgacatcacagaagatgagaccatcacgtttaaatcctacttgctgagcatgggaatagctaacccagttaccagagaaacctacggctcaggcacacagtaccacatgcagctggccaaacaactggctggaatattgcaggtgcctttagaggaacgagggggaataatgtcactcacggaggtgtactgcttagtaaaccgagctcgaggaatggaattgctctcaccagaagatttagtgaatgcgtgcaagatgctggaagcactgaaattacctctcaggctccgtgtgtttgacagtggcgtcatggtaattgagcttcagtctcacaaggaagaggaaatggtggcctcggccctggagacagtttcagaaaagggatccctaacatcagaagagtttgctaagcttgtgggaatgtctgtcctcctagccaaagaaaggttgctgcttgcagagaagatgggccatctttgccgtgatgactcagtggaaggcctgcgtttttacccaaatttatttatgacacagagctaagggttttgtatttaaaatcctttttgtccatatgcttgcgtcatgtagaggttgtatgacattgagctaagagataaaccccgatcaattgagaatttattggaacttcacagtgcaatgtaaatctcttttaatttctcactaaatatggtccaggaaatttatttagtatacgcataggaaaattcagaaaagtgaatgccaatatgaatttaaaatcatgctatagtgcagaaccctcagagtttaacttggaatatagtggattttaacttgatcctcaaatctaatcattttataaagaagggaatttagttttgcagagaataaaaagagaagttgcatgttcagacaggttagattattattttggtgtaactgaaattcactgattgcacatgacaatgttgggacaaaatatactgcagc

SEQ ID NO: 187797 - DNA, 1643 bp, Homo Sapiens
ttggttcagtaaattatttcttgcatatactggtatacattctgcctaccattagaacccagagtgtgtttaaattagtgtcctaaattaattacattttttttctgctgtgtgtttctattaggtttcagaaaagggatccctaacatcagaagagtttgctaagcttgtgggaatgtctgtcctcctagccaaagaaaggttgctgcttgcagagaagatgggccatctttgccgtgatgactcagtggaaggcctgcgtttttacccaaatttatttatgacacagagctaagggttttgtatttaaaatcctttttgtccatatgcttgcgtcatgtagaggttgtatgacattgagctaagagataaaccccgatcaattgagaatttattggaacttcacagtgcaatgtaaatctcttttaatttctcactaaatatggtccaggaaatttatttagtatacgcataggaaaattcagaaaagtgaatgccaatatgaatttaaaatcatgctatagtgcagaaccctcagagtttaacttggaatatagtggattttaacttgatcctcaaatctaatcattttataaagaagggaatttagttttgcagagaataaaaagagaagttgcatgttcagacaggttagattattattttggtgtaactgaaattcactgattgcacatgacaatgttggcaaaatatactgcagcatgctatatgaggctcctccccagggcttttagaagcagtcatagacatgtcttcaacataccaaataaaatacctttaaaaatgaaataattttatttgacacatatatttatatatattctatctagtttctctttgtttttttaagtgatgatttcatgactggcatttaaagaatgcaactgtgtcattttgtttccaaatgctgtggattttgaaactgaactgagagctgtatagacatgcccagagttatgattacaaatttaggaggtagacggctcaggaattccctgggattgttgtgctggtggaatggcagagggaacttcacaggaaccttagtgttcttttacctcaaagccacagacaggaaatagaaagtggaaaagtaatatctccttttcttttccataaggagtttcaacactgaactttaaaaagtctatcatattccagcaatattttttctttgtcctttatgttgtaagttgtgtggaaaaactacttcggtaagaaatgttactgagataacaacaactggctaatactgcatgtagattgcttaggttttaaagtgactgcctgacttcacatgttattgctacagcctccagtatgttcgcattatctcaaactcagggaccccacaggacaggagacaccctttctgaaactgagttggaagtgaaagggtggtgatggttttggccaagcctgcgggagggaaagtattgtattgggagcacccttgggaccaggaagagggatgcccaggttcacactctgggacccctaagacattgtcagtgggtaagtggagggccactgccagagctgctgcagtgccctctgggaagtgccagggaccctcagctgcagacccgggggatcccaatcccttatctcctgcctgaaaa

SEQ ID NO: 187798 - DNA, 958 bp, Homo Sapiens
  misc_feature (132)..(223): n is a, c, g, or t
ttgggaaacctttgggacataagaagataattgaaaatgagctggaaggctttggcattcgcttgaacagcaaaccccccaacattggctttaagaagaaggacaagggaggcattaatctcacagccactnnnnnnnnnnnnnnnnnnnnnnnnnnnnnnnnnnnnnnnnnnnnnnnnnnnnnnnnnnnnnnnnnnnnnnnnnnnnnnnnnnnnnnnnnnnntgcccccagagtgagctggatgctgaaactgtgaagagcattctggctgaatacaagattcataatgccgatgtgactctacgtagtgatgctacagctgatgacctcattgatgtggtggaaggaaacagagtttatatcccctgtatctatgtgttaaataagattgaccaaatctccattgaggaattggatatcatctataaggtgcctcactgtgtacccatctctgcccatcaccgctggaattttgatgacctattggaaaagatctgggactatctgaaactagtgagaatttacaccaaacccaaaggccagttaccagattacacatccccagtggtgcttccttactccaggaccacagtggaggatttctgcatgaagattcacaaaaatcttatcaaagaatttaaatatgctctggtctggggtctctctgtgaaacacaatcctcagaaagtgggtaaagaccatacgttggaggatgaggatgtcattcaaattgtgaagaagtgaaacctttcccttttcccatctgccggacgaaccacaacagcgttccccatgatcaagcaccctaccccagttctttctggttttggcagtcactggatcaggatccaggggagggagatggaggcacccaaactggaacttcatttgtcttaccttggtgtcaccttgtatgtcgaactgcataaaagatctggtaggctggtcagctacatg

SEQ ID NO: 187799 - DNA, 1571 bp, Homo Sapiens
ttggcaaccaaaggaccctgctgtgtggagaagatgaggctgcagatgaaaacccagagtctcaagagatgctggaggagcaactggtgaggatgttaacccgagaagtcatggacctaatcacggtttgctgtgtttcaaagaagggtgctgaccacagtagtgctcccccagcagatggagacgatgaagaaatgatggcctggccaccatctttgaaccctgaatcaagcttttgggcatccttcctcggcctttcttgtcatctcttctttccctttgtagccgatctctaggcccttcttgcactgccacctcactttccaccactgtcagcctggaaagagatccaggtctggagctggagagaacaggccctgtgcaggaccagaagtaattatactaaagtatcaagaaagggagttagggcttaaactattctgtctagatgtcccagatagttcccattctacttggagatttggcttttccaagaaaagctagagcagagcagcccttctcccacaagccctcccacccccgtgcagccacatacctgtacagaatggtaactaagggtgctgtgcccaaccctgcgactagcaaggctcgcagcaagagcacagccctcaactacttgtgccagagtttctcttggaccactccaactcccactgagcccttttgctgctgggctggcaggaaactttccccactccctaaggggcatgtctgggttaggtgctaagtgctgaagagaacttggtcagttctctcaactttgctttgggcaagaatctggtcacctgatgggatccatggtacaggctactgctaaacttggcacagtatcaagtatagtacctccaaggaccagggctgggcagtctttagtgctaacatcccctttagagttcacacatcttgcccttccatgaatgacccctcagtctggcctccccagcctcaaggtccactcaggcacaagagccacagtaccctagatagtgtcacatgacaccattgtcatccaaggataatacagaccaactaggctacatctgtgatgagcagctagcaaagccgctggtcttctcctaggactaagtccaggtgccttccacaatctcatggtctttcaggtccctggttacttttctcaaaggccatttccaaaagaatacatgccttcacatcacaacctgtactgtgagtccattctagaggtcactgaaaggccctgtaaagagaggacatggatacgggacctggccctgaggttattactggccgtaaggcagagttaatccatacagaaaccagtgtgtccatgtgctctgcacaaaaacagacctgttgtccatccagtccactgacaagagggtttccccgagagccgaagtggactgaaagctacagtttttagctggtgcgggccacaggcagggtcagattgagaagaaacaaagctggggaagcagaatgtgggagtcttgtgttgctccctcttccctgtgtggtgctctgggtttctgtggatcgtgaaggcgatctcagagtgtttccctcca

SEQ ID NO: 187800 - DNA, 1641 bp, Homo Sapiens
  misc_feature (127)..(135): n is a, c, g, or t
  misc_feature (875)..(903): n is a, c, g, or t
ttggcattaatggacaaattgactgcaatgtaatactagctggtatgtttcataaatgtcaagctgtggaccaacatatatagccttttattatttttctcttcttttaagtcagtctgttataaannnnnnnnnagtcccataagcagtagactcccacagaaaatttcttcaaaattttttggtgttccaatgaatctgggatgtaaactctgaatgtatttataactatttatttctggatggtcattatcttgtagccaaatttgacaatataaagtaaggagcaaagttacaggccagtttttacttgtttgccctgagggaaaaatccttttaaaaaaaatttctggtttttattggatttttgtattttaaatttcaaatatttttctacatcaaacctagcaaaaatggagatgacggtttctgatttataataaatactagacagttttcaggctcctgttagacaaacacattgatgaagaaattagtcttaataggattgtaggctgtgtagaaaagttggaaatatagcacttcatggagtcttgttttgaagatgacagttttctgtaactacagcttggaaactatgcaaatggtctagattcctcagagctcacatgataggatatagttagtgatgacattttgctcttcttgtgggaacacacacttcaaggaggagatagtgactttgagataggaacagtttaagatgcagtgtgagtctggcctgcgtgcggtgaggaggccccgccaagagactggtgggacatctgactgtgggatgtgctctcaagtaggacgtcatcaggacagattctgaataggcatcatgagagtgctggtcagaaacggctgccacnnnnnnnnnnnnnnnnnnnnnnnnnnnnnaaaggaaggaacaatagctaggtaagatttttatcagctttctctgtctgaatccagtttttcctctgtcagtcctggaagcttgaatagaattatattgttgaagccttcaggtcacaaactgtcttttgtaacctcctgtccctcctaaaacacgccaacccctgcagtcaaatcacattagtaatctgatttgctgacagtcctgccctgcctgctcctcgttttcccacatgtcctgcatccctcccccactggagtgatttcagtgaatcagacaaggaaggatgtgtaggatcactactgcattgcaataccctgttatcctcagcaacaaaacccacatttcatacatcctttgtgtactcaggataaagactgatgtttactctctgggcactgttgtaagataggttttgtcagagcataatcattgtctgcaaagtgtttggtgcgaggaagattattgctaattttgtgaaataaagagtctagccctctccttttaatgaacttaactctcgctggcatctgtagtatcattgggagcttaggcgcacatggaaatgagagcccggcgcatggattttaatgtttttctaacaactgtggagatttgagggaatgtgtggtgaatgtaaaatacctagtttacttgccagtctcttgtgtaaattacagtaaaacaaagtaaatgaaatttaaacaaaaaataaatttgatcacaaaatgcccaaa

SEQ ID NO: 187801 - DNA, 1171 bp, Homo Sapiens
  misc_feature (479)..(536): n is a, c, g, or t
  misc_feature (737)..(745): n is a, c, g, or t
gtggcagccgttctgaccagcactctcatgatgctattcagaatctgtcctgatgacgtcctacttgagagcacatcccacagtcagatgtccaccagtctcttggcggggcctcctcaccgcacgcaggccagactcacactgcatcttaaactgttcctatctcaaagtcactatctcctccttgaagtgtgtgttcccacaagaagagcaaaatgtcatcactaactatatcctatcatgtgagctctgaggaatctagaccatttgcatagtttccaagctgtagttacagaaaactgtcatcttcaaaacaagactccatgaagtgctatatttccaacttttctacacagcctacaatcctattaagactaatttcttcatcaatgtgtttgtctaacaggagcctgaaaactgtctagtatttattataaatcagaaaccgtcatctccatttttgctaggtttgatgtagnnnnnnnnnnnnnnnnnnnnnnnnnnnnnnnnnnnnnnnnnnnnnnnnnnnnnnnnnnaggatttttccctcagggcaaacaagtaaaaactggcctgtaactttgctccttactttatattgtcaaatttggctacaagataatgaccatccagaaataaatagttataaatacattcagagtttacatcccagattcattggaacaccaaaaaattttgaagaaattttctgtgggagtctactgcttatgggactnnnnnnnnntttataacagactgacttaaaagaagagaaaaataataaaaggctatatatgttggtccacagcttgacatttatgaaacataccagctagtattacattgcagtcaatttgtccattaatggtattactctgataattattaaaatctgttccaggtatatatattgaaaatattttcttttgcattcttgctgaagataggtacagtactttggagaaattgtattaatcccttcagtatgtctgtatgtacatatatacacaagtgcgtgtatctggatctgtagctctacatgcgctttatatacagctacagacatatgcacacatacatatatacacacgtggttgagaacctgtgcatgtgtgtgtatcatcacaagcacacatgggggaaacgtcaccaacttttttgtacaaagttg

SEQ ID NO: 187802 - DNA, 1400 bp, Homo Sapiens
  misc_feature (169)..(179): n is a, c, g, or t
  misc_feature (936)..(944): n is a, c, g, or t
  misc_feature (1136)..(1190): n is a, c, g, or t
ttggctccactgtggttctttgctgccccacatgagctacctgctctttaatttttgaacattgggatgaatgaaatgttcagttgtgagaaaagctagttgtgccaaataagaatgaagtaactcttccaagattccccccaaacacttttaaattccatgttcattnnnnnnnnnnntttaagttattgttacttttgttaaactctcctaagtttttgtgatttatttctgcctcgactttattttcccctctgatgagacaatatattgtggcattagtagtaagaccaaaatctttttgaacagatgaaaattgtaagatgcagtagttggggtacattttctgccaaaagttttgatgcatttggagagtgtgtgtgacgagctgctaacatttcctgtctctgtattttaacacattttgcactgtctttcacttttcttacagttacgtaatcaaggtcaagtgaggggaacaagcgcagccagtgatgagtgaagaagaatctgaccagtatcttgcagtgttgacgtttcccagatgtgtgcttgtgatgatacacacacatgcacaggttctcaaccacgtgtgtatatatgtatgtgtgcatatgtctgtagctgtatataaagcgcatgtagagctacagatccagatacacacacttgtgtatatatgtacatacagacatactgaagggattagtacaatttctccaaagtactgtacctatcttcagcaagaatgcaaaagaaaatattttcaatatatatacctggaacagattttaataattatcagagtaataccattaatggacaaattgactgcaatgtaatactagctggtatgtttcataaatgtcaagctgtggaccaacatatatagccttttattatttttctcttcttttaagtcagtctgttataaannnnnnnnnagtcccataagcagtagactcccacagaaaatttcttcaaaattttttggtgttccaatgaatctgggatgtaaactctgaatgtatttataactatttatttctggatggtcattatcttgtagccaaatttgacaatataaagtaaggagcaaagttacaggccagtttttacttgtttgccctgagggnnnnnnnnnnnnnnnnnnnnnnnnnnnnnnnnnnnnnnnnnnnnnnnnnnnnnnntcaaatatttttctacatcaaacctagcaaaaatggagatgacggtttctgatttataataaatactagacagttttcacgctcctgttagacaaacacattgatgaagaaattagtcttaatagggattgtagggctgtgtagaaaagttggaaatatagcacttcatggagtcttgttttgaagatgacagtttctgtaactacagct

SEQ ID NO: 187803 - DNA, 1493 bp, Homo Sapiens
ttgggccattcttcttaacctgttttttaagaatgtctttttactgtgtgtcacacttagatcaaggagttttcagaggttccttattttattaattaattatttgtgctgcttttgacaggtagcagagggttttaatacttcactaacagtacaccctcctcccccttgggctagcatccccagcccttaatccacgtcggagccggcaggtgcttctcacaccaggagcctctgggggcaggggctggctcctcgccgctgtacaggacgtttactgctgcttggggccagggcagtcctttgaaagggaagcaagttccggaatttgttccctcatggaactataacaccttagagcaagaggcaggaattccagggcctcctgcccctccccttcctccagcttgtcaagttaaaccactaatgtgttggtgggcctggccgtgctgcctctcctgagtagggtgggtgcaagtagggcctctttcccagctttcttgcttgccttctgtgcaatatttcttggagaatttggatgcctaaggcataaaggaaaaaaacagagttcatagtttgagctggtatttaccccctgggtttaaaaatcagattaacttcttggtctcccggaggctgctgtcaggaattctccagtacgggaagatgcagtcacttatgacgaaataagtcacccctgaacgcctccgcaggcagattcatggagaccagtcccagtagcaaccgccccttccccaagcatagaatacagaggtgccatacttggtgtaagccttccttctgtccactgtccagaatgtcctttttcacacagaggaagagatggcgggaaaacactgactgactccttgggtttcccccagacatactttcagagcgctagctgtgtggtgcacgggactttacagttaggattcatgtttaaggtggtggcgcttgaggcctgcaagggccacgttggattactgaagcggaaagcggtctcccatgtataagaaaaagttttacaacacgaattggaagctgcttgagtccacctgaacttgaattgattgcaaagccatctgccgggaacggttttgggttcctgagccatcagccagcctttctttcccctctgatgcacgttcctcccggcctagtccgtggaggcccatcacaccagcatccgtgacgccagcttcccactaggacatccaggcaggtcgggcggggacgccacacgcctcaggggccgtccgctgcactgccatagaggagccctccctccagtggtcacttcccaccattgcaggcagacttcccaccattgcaggcagctgggcccacttcatatcacacaaaatgaattttctataaagggaaaaaagtttgctcctccatagatttttgctgccttcgggtcaaatagtttccctggttgacgctcttgggccactctgattggcagcctgctttgccaaagagaactg

SEQ ID NO: 187804 - DNA, 1071 bp, Homo Sapiens
ttggccactcccagacaccattgaccagatgctaagagtcaaaggaatgaaacacagaaaaactccaagtcacacaaggatgttaaaagatggtcaagaaaggcccacaatccttaaaagcacagccttctaacatcgcttccagtaagggagaaactgaagaggaaagactgtcttgccagaaatggccagcttgtgcagactccgagtccttcagtgacaaaggcctttgctgtttgtcctcttgacctgtgtctgacttgctcctggatgggcacccacactcagaggctacatatggccctagagcaccaccttcctctagggacactggggctacctacagacaacttcatctaagtcctaactattacaatgatggactcagcacctccaaagcagttaatttttcactagaaccagtgagatctggaggaatgtgagaagcatatgctaaatgtacattttaattttagactacttgaaaaggcccctaataaggctagaggtctaagtcccccacccctttccccactcccctctagtggtgaactttagaggaaaaggaagtaattgcacaaggagtttgattcttaccttttctcagttacagaggacattaactggatcattgcttccccagggcaggagagcgcagagctagggaaagtgaaaggtaatgaagatggagcagaatgagcagatgcagatcaccagcaaagtgcactgatgtgtgagctcttaagaccactcagcatgacgactgagtagacttgtttacatctgatcaaagcactgggcttgtccaggctcataataaatgctccattgaatctactattcttgttttccactgctgtggaaacctccttgctactatagcgtcttatgtatggtttaaaggaaatttatcacgtgagagagatgagcaacgttgtcttttctctcaaagctgtaatgtgggttttgttttattgtttatttgtttgttgttgtatccttttctccttgttatttgcccttcagaatgcacttgggaaaggctggttccttagcctcctggtttgtgtc

SEQ ID NO: 187805 - DNA, 2338 bp, Homo Sapiens
  misc_feature (1240)..(1346): n is a, c, g, or t
  misc_feature (1365)..(1380): n is a, c, g, or t
ttggcacaattgctacagtagaagaaactaatcaaactgatgaagatcataaaaaatacagttcccaaactagccaagattcaggaaattattctaatgaagatgaaagcgaaagtaaaacaagtgaagaactacagcaggactttgtatgaccagaaatgaactgtgtcaagtataaggtttttcagcaggagttacactgggagcctgaggtcctcaccttcctctcagtaactacagagaggacgtttccctgtttagggaaagaaaaaacatcttcagatcataggtcctaaaaatacgggcaagctcttaactatttaaaaatgaaattacaggccaccgtgcacggccggcctgacctttggaaaagccttgtcactttggacgtttgcgtctttgaagaggcgatgggagcatatcatgactgcctgccaccattgcttttcagactaccacaactcaatcatgctgtccaggacttctggccctgtgttcaccactgggaaaacgtacttcagactggatagcctaaaaaggagcaatgcccttgtaggatgtggagaagggaaaatacggacattaacattaaaagacaccagtgaaattgttaggtctctaggaagttggagcacaaggcttcacgctttaagaccatctgtggttttcagtgaacaagcgctgagcaccagcagcagaaaacaacaacaaaaaaacacctcgtttttaccttgtcttctagacatgaaaaggcagttgcattccactctgcattatgttctacatgttgctttatcagtatatgcttagctgtaagtgacaagtattttttctgaacagaagtttacttagaaataccatgcacttgggggtaccaattaaccgcctgaaaattagcatattgatagttcttagaccagatataatctaagaatttatatgaaagatttgtatcattagagccagaaataattttatattaatatataatacagattaacattatatataatatgtacctgtgtcacttctgacatgagcctgtaaacatatattcatatatgtacctgcacatgtacccacctgatgtaggtcttattcctttagtatggacttaaagtacttattcatataccttgtaactaaaaattagaacagctccctagaattgtgaacttttaagagtctgactagaaatttgcaacttataaaaaagttacttttaaaaatataagttagnnnnnnnnnnnnnnnnnnnnnnnnnnnnnnnnnnnnnnnnnnnnnnnnnnnnnnnnnnnnnnnnnnnnnnnnnnnnnnnnnnnnnnnnnnnnnnnnnnnnnnnnnnnccagaccccatctctattnnnnnnnnnnnnnnnnaaacttagagtttttatcttcccctaaaagaggccgtgatatttgcagcagcctcaaattgctcttaaggggtttaggtgtgcagaagctttcctttccctacccagtaaccatgtgactactaacgtggtatattgatttattttgtttgctgtctgtctcccctgccccactgctggaacagaggctccaagaaaacagggaccttattattcattactgcatccccagtaatgaaagtacttagaaaataattattgaatgaatgaaatctaaactgtgaacctgagggtgtttgtggcagtgtttgttttactgaattgtagaaggacataaccgtgttttcagtgtttctatggaacaaacttgtacattttatttcacttgtgttttgtcttaaaccctactgctggaaacaattttatgtaataagcaatgggcccaaaagtctaggagtttttttgtacttagtgaatttgtatgcaacagagatgctgcagctgatgcctttaaaaggtattcatcatggaagagctgaggcctgtgcttggtgttccagagcccagggttgagcatcctgaaggagccactgcagccgtcactgtccccagagcctgtggagatagagcctgtttgctgctttttcttcccgctcttaagacatggctggagctcagtcttcattgaatgaagtttgctgtggtattgcatagccttgctttcttgaactaaactgtttgcccttcacaagtagttcttctttcaggattagttcgttccaaggaggctcttcagtctcacagataagtagatctctcctgctgtctggacacatttcactcggaaattgaatacaatttgtattcaggctgggaacctgaacacacacttgtgtttttaagcttcccttttttacagtggacaaggacccaaataataaataaatcatccctaatgc

SEQ ID NO: 187806 - DNA, 2069 bp, Homo Sapiens
ttggcgtttaccacgaggcctcaggctggggatggagagagttgctctgggagttggggtaccacccccagggcaggatgaggacaggatcacctgcccgggacaccaccattatcattctcctctagtgacgcagcagctggttctgggagttaaaggagcattggaaggcccaaaccctctcccttgagtggccaccccagcctggttggctggttttccccttttctcttgtttcaattgggtctttaccttgaactctcctctctggctttgcggtgggctgtggaggctggttttgaccaaaagtgagtggggcgggaggaaggggcaggaggaagggttgaggttacttggggcgagtcccttccccttcagagaggcttctatccttcccagggaggaggcgccgctgagacccttctgctgagagctctgccctcccctcatcacctggcctgtgcagaaacgctcatgcacacctggctgcacaggtgtgcacgcattacccttcgcgtgtacgttcccatgtgccccgtgaaagcatgtgtggctgcagacgtgtccacatgggccttgcgaacctgggttagaaaccttggccaggcgaacgtggggtgattcacagcacaaaagacctcaccaccacacctgcactcaccccaccttgcatgcaccttgctacctgcttgcggctttcagcggagggcaggggtctggcacaggtgcgatggcaccccatgctccaggcatacagatgtggtttctcggctgcaccgggccaggctgcgggtgtgcaggcgtctgctaagttgtgtgatgtatcagcacaggctttgagacgtctgggaccctgtccttcctcccgtgaggggttcttgttctttctgactcaggtgacttttcagcccttccaattcccctcttttttctgccctcccctccaactcagccaacccaggtgtgggcagtcagggagggagggagtgtcccaccacgttctcagggcagcccttgactcctaagccccttcctccttccattctgcatcccctccccatccaacctaaatgccacagctggggctgagctgtattcctgtggagggacctctgccgtgcctctctgaggtcaggctgtgctgtgtgatgggcaggctttgccccagcccacccctggcaaggtgcacttgttttctggtttgtacaaggtgtcctgggggcccgtggcttccctgccagtgaggagtgacttctccctctcttccagtcctgtaggggagacaaaaccagattggggggcccaaggggagcatggaaaaggccggctcccctgtctttccttggctgtcagagtcagggtaacacacaccaagagtggagtgcggccagcaagtttgagacctgcccgccctcctcgcagctctgctctgtgtcctcaggaagtcacagagtctactgaggcaaggagagggtgattctttccccaaatcccttcttccctggttcccaaaccaaagacagcctgcagccctttctgcatggggtgctctgttgacaggcttcccagatccctgagtctctctttccttcctcctcgatctttagttgtccacggtcaattcagtgcttccattgggggacagtcccctccgggatgacctgattcacctccagcccagggaatggaatctagaggaatacgtggggtgggtctggacaaggagcggcaggaatcaccacccatctccagctgtggagccctgtggaggggaaggggaagcttggggttcagagggaactcttccaggagaggggtgcccagcggaggtaaagatgatagagggttgtggggggtctctagttgaatgttttggcccatgactttggaacatggctggcagcttccagcagaagtcacgctccccatcccccaggggacataggacctttttcctgcttcctggtcactttcaaagaactatttgcgcaatctgtgggtctgtggattcacggggctttctgtgtgggtgctgcagttgcttttgtctgcacagcaggacacatctt

SEQ ID NO: 187807 - DNA, 1203 bp, Homo Sapiens
ttggccaaaaaggattttgaagctgatcctatttagttaaaaagataattttgctttcaactgtaggtccagaaaactaattattggcatcagtctgtgaaatagtccattatttgttgttaaaaatgcttcaaaaggttttcagtgtcagtctgagatgcctggtatataggagcctttgggaaatacctatttttcagtattccatgcatattagatatcaccatgaagcaagagacatgcattctataatcatgtagacactcagactcaggggaaaatacaagttatatcctgaaagcctttaaaactctatggtaggatcaaagattcaaatggtttcagagaggttttatttcaattaatttgttctagtgctttcaagagcaagtacatcaaaatgtagaaggtaaaatgtatgcaacactaatataaattattccaagtctttaaggagccaaagaaaaaaaagatttctcacagctttttgttctgttttgtatttcaattaggaacttgcagtattattttgaaaaccattctaaaataataggagttaggaaataaataaagttttgctagccctgctaagttcaggcttagaggcttatcgctaagtgtaaacttcaccagattccacgaaaagctggatagctttttttctgacttatgttgtggttgcacccctcacaaatggcagaacagtatgtaaagctggtaacacctcggtttcagtgcaccatgtgtttgctttgtgaaggtgaagaatatgttggtttagagaaagaaattggatgtaattttatgcaatttacttttaaagacaaacataactatttagcagagaatattttaataaatgcaaaacaacagctggactgctgtacatcaaggacagattaactggaaaacatatgttccttatgtgtgattgagagccattcagaaaagacttcctttgtgttcagcctatacttttccatatggtataccttgaaaaaaattagcacaccatggttatttttctaccttttataaaagacagagcctgtttactcatttagaagatagagaaaaattgggtctaaaattgaacatcctagattcacactccccagtcacttatgtgatttgatggtgaggaaaatgattgacaaagcccaacaatgatctcaggaattacattttccaacagaccaaaaa

SEQ ID NO: 187808 - DNA, 1439 bp, Homo Sapiens
caactttgtacaaaaaagttgggggaggggacccgggctgccaggcgcccagctgtgcccagatggatgggacagagacccggcagcggaggctggacagctgtggcaagccaggggagctggggcttcctcaccccctcagcacaggaggactccctgtagcctcagaagatggagctctcagggcccctgagagccaaagcgtgacccccaagccactggagactgagcctagcagggagaccgcctggtccataggccttcaggtgaccgtgcccttcatgtttgcaggcctgggactgtcctgggccggcatgcttctggactatttccagcactggcctgtgtttgtggaggtgaaagaccttttgacattggtgccgcccctggtgggcctgaaggggaacctggagatgacactggcatccagactctccacagctgccaacactggacaaattgatgacccccaggagcagcacagagtcatcagcagcaacctggccctcatccaggtgcaggccactgtcgtggggctcttggctgctgtggctgcgctgctgttgggcgtggtgtctcgagaggaagtggatgtcgccaaggtggagttgctgtgtgccagcagtgtcctcactgccttccttgcagcctttgccctgggggtgctgatggtctgtatagtgattggtgctcgaaagctcggggtcaacccagacaacattgccacgcccattgcagccagcctgggagacctcatcacactgtccattctggctttggttagcagcttcttctacagacacaaagatagtcggtatctgacgccgctggtctgcctcagctttgcggctctgaccccagtgtgggtcctcattgccaagcagagcccacccatcgtgaagatcctgaagtttggctggttcccaatcatcctggccatggtcatcagcagtttcggaggactcatcttgagcaaaaccgtttctaaacagcagtacaaaggcatggcgatatttacccccgtcatatgtggtgttggtggcaatctggtggccattcagaccagccgaatctcaacctacctgcacatgtggagtgcacctggcgtcctgcccctccagatgaagaaattctggcccaacccgtgttctactttctgcacgtcagaaatcaattccatgtcagctcgagtcctgctcttgctggtggtcccaggccatctgattttcttctacatcatctacctggtggagggtcagtcagtcataaacagccagacctttgtggtgctctacctgctggcaggcctgatccaggtgacaatcctgctgtacctggcagaagtgatggttcggctgacttgggcaccaggcccctggatcctgacaaccactgcatcccctaccttacagggctggggggacctgctcggttcaagc

SEQ ID NO: 187809 - DNA, 971 bp, Homo Sapiens
aaattgatgagcaatgcttttttataaaagccaactttgtacaaaaaagttggatatttacccccgtcatatgtggtgttggtggcaatctggtggccattcagaccagccgaatctcaacctacctgcacatgtggagtgcacctggcgtcctgcccctccagatgaagaaattctggcccaacccgtgttctactttctgcacgtcagaaatcaattccatgtcagctcgagtcctgctcttgctggtggtcccaggccatctgattttcttctacatcatctacctggtggagggtcagtcagtcataaacagccagacctttgtggtgctctacctgctggcaggcctgatccaggtgacaatcctgctgtacctggcagaagtgatggttcggctgacttggcaccaggccctggatcctgacaaccactgcatcccctaccttacagggctgggggacctgctcggtactggcctcctggcactctgctttttcactgactggctactgaagagcaaggcagagctgggtggcatctcagaactggcatctggacctccctaactgggccccgctggtcccatttgctcattagaatttcctctcacatcagtgggatacagaattcagtttctcccttgccaggtccttgggatggttgacccctgcctctgcagtagccttttgtgagtctgctaaggtagctctcacacacctcggctctggggttgatacctgagcctgcaatagagccctgaaatcaagagcatagcttgagtgtgtgaatatgatgtgtgcacatgcttaatgagcgtgcaagtgtgcacacgtttgtggagaggagggtgttctggcctgaaaaggtaaagaagaggcatgtccagtatgctttgcagggtgtgtttgctcttttccatgcccatgcaacccaaattggggtggagcaggaaggagctcttttctgtt

SEQ ID NO: 187810 - DNA, 929 bp, Homo Sapiens
ctttgtacaaaaaagttgggtggcggtggctgaggcggctgggcctagggtgcagcgggcgcgtctgcggctggtgttggcgcatctctagatcctttcccggagttcagttatgggtgtgagaggtttgcaaggatttgtgggaagtacctgcccacatatatgtacagtagtaaatttcaaagaactggcagagcaccaccgaagcaagtatcctggatgtacccctaccattgtggttgatgccatgtgttgtctcagatattggtatactccagaatcttggatctgcggtggccagtggcgagaatacttttctgctttgcgagattttgttaaaacttttacggcagctgggatcaagttgatattcttctttgatggcatggtggagcaggataagagagatgaatgggtgaaacgaaggctcaagaacaacagggagatatccaggatttttcattacatcaagtcacacaaggagcagccaggcagaaatatgttcttcatcccctcagggctagctgtgtttacacgatttgctctaaagacactgggccaggaaactttgtgttccttgcaggaagcagattatgaggtagcttcctatggcctccagcataactgtcttgggattctgggggaagacactgattacctaatctatgacacttgtccctacttttcaattagcgagctctgcctagagagcctggacaccgtcatgctctgcagagagaagctctgtgagagtctgggcctctgtgtggccgaccttcctcttctggcctgcctccttggcaacgacataatcccagagggcatgtttgaaagctttaggtacaaatgcttatcgtcctacacctctgtaaaagagaactttgacaaaaggtaacatcatattagctgtgtcagaccatatatcgaaa

SEQ ID NO: 187811 - DNA, 1632 bp, Homo Sapiens
  misc_feature (197)..(205): n is a, c, g, or t
  misc_feature (837)..(845): n is a, c, g, or t
ttggctcccttttccttaggtgctgctacatcctcatcctcctcttcaccttcatccagttccataacagctgctgttatgttaactttagctgaaccgtcaatgtccagcgcatcacaaaatggaatgtcagttgagtgcaggtgacagcaggacttgctaaagcactttgcacttaatggctgttgagggccacnnnnnnnnnatactgcacagtggcacaaaaaaatatcagacaagcactattttatatttaaaaattgtttcttgacaagctgacttggcacttaagtgcacttttttatgaagaaaaagtacaatgaactgcttttcctcaagcaataattgtttccaacttgtctgggaattgtgtgtctggtaactggaaggccttccactgtggcaaatggaggcttttcactgcctgtagagacaatacagtaagcatagttaaggggtgggtcagaacatgttaagataacttactgtatatgtattcccttgtattttgttaaagctggaacatttgatatttttccatttatttatgaaaaaatatgaacctattttcatttgtacaaggtaattgttttttaaagcaagtcaccttagggtggctttaattgtataagtcaagcacatgtaataaattcaaaacctgcagttaacaggatattagacatcaatcctggtaaccaaatattaaagattctctttaaaaaagactgaacatgtttacaggtttgaattaggctaaaaggtcttgcagtggcttttcatggcccttcaaattggaatggaactactgtactttgccatttttctataaatcagtannnnnnnnnaattttgatatacattgtgtgaaaaaagaaaatggctaataaactgtattaaatcttaaacaatgtataaagattgtacttagccagttcaaagtgtatatttattcataatgaattataacagttatatttttgtgttttcttgtaaatgtttcttttcccttaaatacagataattcatttgtattgcttattttattatgagctacaacaaaaggacttcaggaacaagtaatgtattagtatggttcaagattgttgataggaactgtctcaaaaggatggtggttattttaaatataaatagctaatgggggtggtaggcctataaaattaaatgccttgtataaaatccaaaatgaatgcaaaattgttttcacttgtattgactttatgttgtatgattccaatctctgttctgtttggcacttgtatttaattcttcacctttgtaagacatttgtatattgtggatgtgttcattcaagctatttaatatctggcactgttaatacacagtactttattgtacagactgttttactgttttaattgtagttctgtgtactttttttggatggggctggcatgttttctttgtttcctggcaatacgacgtgggaatttcaatgcgttttgttgtagatgctaacgtgtcagaatcctttacattcaacttttctaagaaaagcattttcagtcttgtagtgtgtgcttacagtaactaattttgttgaaaatggtttcaagttattcaaatttgtacaggactgtaaagatttgttga

SEQ ID NO: 187812 - DNA, 1676 bp, Homo Sapiens
  misc_feature (229)..(237): n is a, c, g, or t
  misc_feature (869)..(877): n is a, c, g, or t
ttggttccattgatcggaggagaaagcgtttaaagaagaaagagagagaaagtgctgctacatcctcatcctcctcttcaccttcatccagttccataacagctgctgttatgttaactttagctgaaccgtcaatgtccagcgcatcacaaaatggaatgtcagttgagtgcaggtgacagcaggacttgctaaagcactttgcacttaatggctgttgagggccacnnnnnnnnnatactgcacagtggcacaaaaaaatatcagacaagcactattttatatttaaaaattgtttcttgacaagctgacttggcacttaagtgcacttttttatgaagaaaaagtacaatgaactgcttttcctcaagcaataattgtttccaacttgtctgggaattgtgtgtctggtaactggaaggccttccactgtggcaaatggaggcttttcactgcctgtagagacaatacagtaagcatagttaaggggtgggtcagaacatgttaagataacttactgtatatgtattcccttgtattttgttaaagctggaacatttgatatttttccatttatttatgaaaaaatatgaacctattttcatttgtacaaggtaattgttttttaaagcaagtcaccttagggtggctttaattgtataagtcaagcacatgtaataaattcaaaacctgcagttaacaggatattagacatcaatcctggtaaccaaatattaaagattctctttaaaaaagactgaacatgtttacaggtttgaattaggctaaaaggtcttgcagtggcttttcatggcccttcaaattggaatggaactactgtactttgccatttttctataaatcagtannnnnnnnnaattttgatatacattgtgtgaaaaaagaaaatggctaataaactgtattaaatcttaaacaatgtataaagattgtacttagccagttcaaagtgtatatttattcataatgaattataacagttatatttttgtgttttcttgtaaatgtttcttttcccttaaatacagataattcatttgtattgcttattttattatgagctacaacaaaaggacttcaggaacaagtaatgtattagtatggttcaagattgttgataggaactgtctcaaaaggatggtggttattttaaatataaatagctaatgggggtggtaggcctataaaattaaatgccttgtataaaatccaaaatgaatgcaaaattgttttcacttgtattgactttatgttgtatgattccaatctctgttctgtttggcacttgtatttaattcttcacctttgtaagacatttgtatattgtggatgtgttcattcaagctatttaatatctggcactgttaatacacagtactttattgtacagactgttttactgttttaattgtagttctgtgtactttttttggatggggctggcatgttttctttgtttcctggcaatacgacgtgggaatttcaatgcgttttgttgtagatgctaacgtgtcagaatcctttacattcaacttttctaagaaaagcattttcagtcttgtagtgtgtgcttacagtaactaattttgttgaaaatggtttcagttattcaaatttgtacaggactgtaaagatttgttgacagcaaatgttga

SEQ ID NO: 187813 - DNA, 1026 bp, Homo Sapiens
aaataacaaaggaatgacttgctcaggacagatggaaaccatgacagaaacaatgggcttggaaaaagggctgttttcatggaactgcagaaaaaccaaaacaaaatatcccccacaccctccaaaagcaacaagaaaccctcatgtgatccattccatccaggaattttcaccatagcaacggaaaggacccgaggtgtcactgcttgtgaggcagcgagaggtcatctctgcatcctagtgggaacccctgaagccctgttaggtgacatcatcgcggaaaacctgccgtggtgcctgccttccaacctgcctcccggaggggctttcagctggagaccccattggagctcttgaaatgaataagggaataaaattgggagaggatttggagatacacccgtaagtgtaggaacagggcgagatgatcaagggaagaagggactgctgccccaagccagaatatttctatggctctacaagggaaggggcggggcctgtgttctcaccatagacactagagcaagagccccatagaaggaacagtggttgatcactttccaaatgtgatggtcacttcatcacccagagggcctcttctttggcacatgccagggtccctccacctctactggctataaagctcaccccacgattcagttgggcctcaccttggaatcccacccacaacctccttaactctcctgacccccctgaaatgtgcaaaccaccaggcaagccggtggcaaagtccccatttgtcctcgacgcaacggtcatctccaagaggctacctggggtccagcacttgctggggagaggtgataagagtgggagccccccacctccaaccaacaccagtctggcccaccagctgtgaatttggttctgttctacccccagaggatgaaacagtcttcccagccacattttccagtgagcctaatactatttgcaattagctttgctttagtttgcggggattgaggttggtgtggtattacgtgccaacttttttgtacaaag

SEQ ID NO: 187814 - DNA, 1419 bp, Homo Sapiens
gccaactttgtacaaaaaagttggagaagcttttggaagagcagcttaattcctctcagtcgggaaatgttttctctgccttctgctttgcttgcaccaaacatttctaaacacttgttctgccatctacatgggaggtgatgaaactcagtggtaactcatgatttatgacattgaaaataaagaggaacattgacctgcagactatggtttgtacaagaaagtttgtttgaatgtgtagaagaggaaaaagcaacaacagcaacaacacgaagatgataccaaaacaaggaccacaaaacaactagccatgatgggagacaggagttttttacatggaaacatggcacttgtgtttttatgtggcaagatctttatccataggcagagtatgaaatttcccaccaggctaagcaaataaagaagtccattgccttatagctatgtcagatcacagaatccttccaagtgctctatcacagtgtgccttatgggaagtttctgactggaaaatcttgtcattctaacactgaaaagtgcacacgcatgacaaaatgtagacaagatgcctcaaggtattggtagcaagcaagattttgccctttagttttcgaagacacctttctttcattatgcactcgggacaagaaaattaatagagcgttattccacagaaggcctctagccagagatcttgagtgtagtgcaagggactcatgctttgcgaacttgtccctgtgactagtagattcccccttttcctgtgtttaggatttagtagtgcataaagcattaatatccataaacatacctagaagtttgttttgcttttaatttaaaggaagcagtaaccacaaagcttccgctcagggttttttctttcttcaagtctccaagggctcttcagcgtcacaagccagcaactctctttgcattaaaatttcaaagtttaattaatataattaaaagcaacagcaagcagcagcctgtgaagattttgctcatcttttttatgccttttgacattgaatgacctattactgtatgcgcattacttggattttgaggggcactctaccttggttatgattcagtagaggaaaaagaccacctttcttcaatttacaaattaaatcttctggagggtcgctatcacaaaacattgacgatgtatgtattataattttttagaaaaaccaccatcgtgtcacgtcgacgatgccaaattatgttagcgtgagcagaaacaccgtgggggaggaaggcagcagctgaagaaaaaagctcaaatgatctagtcactttcgatactgtacttcagatgcgaaatgggatattcgagtggaaacctgacaaagtgcgcctgctttgatgtgaactggtatagacaatgaccagtggctgggtcagtgggatgtc

SEQ ID NO: 187815 - DNA, 1251 bp, Homo Sapiens
ttgggatgtggtggttttggcccctttgctgcaaagtggttattaaggatcctccaccaccaccaccccctgcaccaaaagaggaggaagaagaacctttgcctactaaaaagtggccaactgtggatgcttcctattatggtggtcgaggggttggaggaattaaaagaatggaggttcgttggggtgataaaggatctactgaggaaggtgcaaggctagagaaagccaaaaatgctgtggtgaagattcctgaagaaacagaggaacccatcaggcctagaccacctcgacccaaacccacacaccagcctcctcagacaaaatggtacaccccaattaagggtcgtcttgatgctctctgggctttgttgaggcggcagtatgaccgagtttctttgatgcgacctcaggaaggagatgagggccggtgcataaacttctcccgagttccatctcagtaaaagggaagcaggaagaccaagaaggtacgaagatggcacattttcacatagctgattttcaaccaaatgaaaaaaatcaagtgcatttcagaagcttttggaagagcagcttaattcctctcagtcgggaaatgttttctctgccttctgctttgcttgcaccaaacatttctaaacacttgttctgccatctacatgggaggtgatgaaactcagtggtaactcatgatttatgacattgaaaataaagaggaacattgacctgcagactatggtttgtacaagaaagtttgtttgaatgtgtagaagaggaaaaagcaacaacagcaacaacacgaagatgataccaaaacaaggaccacaaaacaactagccatgatgggagacaggagttttttacatggaaacatggcacttgtgtttttatgtggcaagatctttatccataggcagagtatgaaatttcccaccaggctaagcaaataaagaagtccattgccttatagctatgtcagatcacagaatccttccaagtgctctatcacagtgtgccttatgggaagtttctgactggaaaatcttgtcattctaacactgaaaagtgcacacgcatgacaaaatgtagacaagatgcctcaaggtattggtagcaagcaagattttgccctttagttttcgaagacacctttctttcattatgcactcgggacagaaattaatagagcgttattccacagaagcctctagccagagatcttgagtgtagtgcaagggactcatgctttgc

SEQ ID NO: 187816 - DNA, 1444 bp, Homo Sapiens
actttgtacaaaaaagttggacaagatgaagatatgggacattttgaaataccagatcctatggaagaatcaacaacatcactagtgtcgtcttcaacatctgcttactcttccttccctgtagatgttgtggtttatgtacgagttcagccctcacagatcaaatttagctgtttaccagtatcaagagtagaatgcatgttaaagctgccatccctggatttggtgttttcttcaaaccgaggagaactggagactttagggactacatatcctgcagagactttatcccctggaggtaatgctactcagagtggaacaaagacttctgctagcaaaactggaataccaggttcatcgggattaggcagccctcttggccgaagtcgacatagtagtagtcagtcagacctgaccagttccagcagtagttcatctggcttgagcttcactgcatgcatgtctgacttttccctttatgtatttcatccatatggagcagggaaacaaaaaactgctgtttctggcctcacacctggatcaggaggattagggaatgtggatgaggagcccacttcagtcactggtcgaaaagattcactcagtataaaccttgagtttgtaaaagtgagtttgtcacggatcaggcgttcaggaggtgcctcattttttgaaagtcagtctgtaagcaagtctgcaagcaaaatggatactacgttaataaatatatctgctgtttgtgatatagggtctgcctcctttaaatatgatatgcgccgactcagtgaaattctggcatttccaagagcatggtatagaagaagtattgcaagacgtctattccttggagaccaaactataaatttgccaacatctggcccagggacacctgattccattgaaggggtaagccaacacctttcccctgaatcatcaagaaaagcttactgcaagacctgggagcagccaagtcagtcagcctccttcacccacatgcctcagtcacctaatgtgttcaatgagcatatgacaaacagcaccatgtcaccaggggcagtaggacagagcctaaaatccccagcttccataagatcaaggagtgtatctgattcttcagttcctcgaagagattcactttcaaaaacatcaactccttttaacaaatcaaacaaagcagcaagccaacaagggaccccatgggaaacacttgtcgtgtttgctatcaacttgaagcaattaaacgttcaaatgaatatgagtaatgtaatgggaaatacaacttggacaactagtggtttgaagagccagggccgtctgtcagtaggaagtaatcgtgatcgagagatcagcatgtctgttggtctgggaagatcacaattagattctaaaggaggagtagttggagggaccatagatgtcaatgctttggagatggttgctcata

SEQ ID NO: 187817 - DNA, 1782 bp, Homo Sapiens
  misc_feature (492)..(504): n is a, c, g, or t
  misc_feature (1685)..(1705): n is a, c, g, or t
ttggcaagtctaaacaatgaattcttcaacagggaaaacagctagcttgaaaacttgctgaaaaacacaacttgtgtttatggcatttagtaccttcaaataattggctttgcagatattggataccccattaaatctgacagtctcaaatttttcatctcttcaatcactagtcaagaaaaatataaaaacaacaaatacttccatatggagcatttttcagagttttctaacccagtcttatttttctagtcagtaaacatttgtaaaaatactgtttcactaatacttactgttaactgtcttgagagaaaagaaaaatatgagagaactattgtttggggaatttcaagtgatctttcaatatcattactaacttcttccactttttccagaatttgaatattaacgctaaaggtgtaagacttcagatttcaaattaatctttctatattttttaaatttacagaatattatataacccactgctgnnnnnnnnnnnnntgattgttttagaagttaaagtcaatattgattttaaatataagtaatgaaggcatatttccaataactagtgatatggcatcgttgcattttacagtatcttcaaaaatacagaatttatagaataatttctcctcatttaatatttttcaaaatcaaagttatggtttcctcattttactaaaatcgtattctaattcttcattatagtaaatctatgagcaactccttacttcggttcctctgatttcaaggccatattttaaaaaatcaaaaggcactgtgaactattttgaagaaaacacaacattttaatacagattgaaaggacctcttctgaagctagaaacaatctatagttatacatcttcattaatactgtgttaccttttaaaatagtaattttttacattttcctgtgtaaacctaattgtggtagaaatttttaccaactctatactcaatcaagcaaatttctgtatattccctgtggaatgtacctatgtgagtttcagaaattctcaaaatacgtgttcaaaaatttctgcttttgcatctttgggacacctcagaaaacttattaacaactgtgaatatgagaaatacagaagaaaataataagccctctatacataaatgcccagcacaattcattgttaaaaaacaaccaaacctcacactactgtatttcattatctgtactgaaagcaaatgctttgtgactattaaatgttgcacatcattcattcactgtatagtaatcattgactaaagccatttgtctgtgttttcttcttgtggttgtatatatcaggtaaaatattttccaaagagccatgtgtcatgtaatactgaaccactttgatattgagacattaatttgtacccttgttattatctactagtaataatgtaatactgtagaaatattgctctaattcttttcaaaattgttgcatcccccttagaatgtttctatttccataaggatttaggtatgctattatcccttcttataccctaagatgaagctgtttttgtgctctttgttcatcattggccctcattccaagcactttacgctgtctgtaatgggatctatttttgcactggaatatctgagaattgcaaaactagacaaaagtttcacaacagatttctaagttaaatcattttcattnnnnnnnnnnnnnnnnnnnnnttttgtatgtcaataactttatatgaagtattaaaatgcatatttctatgttgtaatataatgagtcacaaaataaa

SEQ ID NO: 187818 - DNA, 910 bp, Homo Sapiens
ttggcaggagcactgatatttgtcattgactcacaggatgattacatggaagccctggccaggctccacctcacggtgaccagggcctacaaagtgaatactgacatcaacttcgaggtgtttattcataaagtggatggtctgtcagatgaccacaaaattgaaacccaaagagatattcaccagagggcaaacgatgaccttgcagatgctggattagaaaaaattcacctcagcttttatctgacaagcatatatgatcattcaatatttgaagcttttagcaaagttgttcagaaactgattccacaactcccaactctggagaatttgctgaacatctttatctcaaattctggaattgaaaaggcatttctatttgatgtggtcagtaaaatttatattgcaactgatagtactccggtggatatgcaaacctatgagctctgctgtgatatgatagatgtggttattgacatctcttgtatttatggtctcaaagaagatggagcaggaaccccctatgacaaggaatccacagccatcataaagcttaataatacaaccgtgctttatttaaaagaggtgacaaagttcctggctctcgtttgctttgtcagagaggaaagctttgaaagaaaagggctaattgactataattttcattgcttccggaaggccattcatgaagtttttgaggtgagaatgaaagtagtaaaatctcgaaaggttcagaatcggctgcagaagaaaaagagagccacccctaatgggacccctagagtgctgctgtaggtgaggtttcaggaatgtcttttgaaatcagaccttatccatgaggctgctgcgccatgttgcactaaaggaagaggaagaaggagattgggacacataccattgatttgttgtt

SEQ ID NO: 187819 - DNA, 1586 bp, Homo Sapiens
ttgggtataattaggtatttccatcttccttgcttttttctccaaatgaaatgctaatgggagccttattttacccacttcagctatataagtccatctgtgtttcaaagagtgacttatgtctcctgccttgcttccaaattaaattgtactcatattgctgaatcccattgtaattctgggatccctggaattacaatggagcaagaagttcttactattacattcaaaatcaccaaaattgcttttttttcccccttgggtcctccttgctttgagaaaccccatgaatccagcctcccttttctgctgacccttatattgcctgcattggatatcaaactgaattacattgagtttccatcttttcttcatttaccttttgcttttccctctccttgttagataacatttttgtgcacttttaatttcctaagctccttaccacctcagggacatgattaaaaacttccagaagaggaaaggagaaaaagctatgctaagttgcatttatgaatgttggcctgtaatattggtcatgagcttttgctcttctagtctgccacaattctctctgcagctcctgaggaagtgatgggagtagacagattcacagtgaacaagagatttgggagaccaagtgggcataaaactacgtcttggcctctatttggaaatctgaatgatggaattattatgtttgttaaaagttataccaaaaagccaagggttaattcatttaggttctctctgttttccagcaaatggaactctgatttaaacagctggggatgaaattcctcaagatgattattcctgaaagtgtggatgcgctggatgcgcagggaacatcaggaaaaggccacggggctctgaacagccccggtccagacagcagcctgtacatccatcccaggacacagcccagcccctccccacaccatacaaggtatcagaaaagtctaggacctatcatttcatcagagacatgatcagaaaagaaactgcttctgccccatttcttgttttggagattactccatctgtccatcaaaagaaacctgtaaatatgaaagaacaaaggttatttcctggagaaaagacaatttattcaacaccaacgagggactcatcatatgggcacaactctggtgtccttctatggagaaaacctcaagtaaagttttattctgcctttgaaaatgcttccaaaagtagaccctgtccccacacaggtcaagactacagagaaggctttgtagaaatgtgtcacctatgtacacctgctacttacacatttcctcttttggaaaaatgagatacttagaataacaagaaaattaagacatactggcctggtgccagcagatggcttttctatagacaaactaggttagtgtggaagatataggttaaaataaactatgctgttttatttatcttcccaacctgattggcagctagacttttttagggtctcatttaatggccctgtttttttcattattatatttaatgatagggcagatttcgtatgcaagctcttgtttctcagctgcctgcagaagaagtcgctataaattatc

SEQ ID NO: 187820 - DNA, 1472 bp, Homo Sapiens
ttggctgaaaatcacagcaatgcttggtgtcttggctgatgggaggaagttaccaccgtacatcattttgaggggaacatatatccccccggggaagtttcccagtgggatggaaattcgctgccaccggtatgggtggatgactgaagacttgatgcaggactggttggaagtggtgtggagacggaggacaggagcagtgcccaagcagcgagggatgctgatcttgaatggcttccggggccatgccacagattccgtgaagaactccatggaaagcatgaacactgacatggtgatcatcccagggggtctgacctcacagcttcaggtgctggatgtcgtggtctacaagccactgaatgacagtgtgcgggcccagtactccaactggcttctggctgggaacctggcgctgagcccaaccgggaatgctaagaagccacccctgggcctctttctggagtgggtcatggtcgcgtggaatagcatctcaagtgagtccatcgtccaagggttcaagaagtgccatatctccagcaacttggaggaggaagacgatgtcctgtgggaaatcgagagtgagttgccaggaggaggagaaccaccaaaagattgtgacaccgaaagcatggctgagagcaactgaagggaaagggaaagcaaatggaactctgatttaaacagctggggatgaaattcctcaagatgattattcctgaaagtgtggatgcgctggatgcgcagggaacatcaggaaaaggccacggggctctgaacagccccggtccagacagcagcctgtacatccatcccaggacacagcccagcccctccccacaccatacaaggtatcagaaaagtctaggacctatcatttcatcagagacatgatcagaaaagaaactgcttctgccccatttcttgttttggagattactccatctgtccatcaaaagaaacctgtaaatatgaaagaacaaaggttatttcctggagaaaagacaatttattcaacaccaacaagggactcatcatatgggcacaactctggtgtccttctatggagaaaacctcaagtaaagttttattctgcctttgaaaatgcttccaaaagtagaccctgtccccacacaggtcaagactacagagaaggctttgtagaaatgtgtcacctatgtacacctgctacttacacatttcctcttttggaaaaatgagatacttagaataacaagaaaattaagacatactggcctggtgccagcagatggcttttctatagacaaactaggttagtgtggaagatataggttaaaataaactatgctgttttatttatcttcccaacctgattggcagctagacttttttacggtctcatttaatggccctgtttttttcattattatatttaatgatagggcagatttcgtatgcaagctcttgtttctcagctgcctgcagaagaa

SEQ ID NO: 187821 - DNA, 1195 bp, Homo Sapiens
ttgggttttactacttgcaacttctgacaaaccccattccgctttgccagaagaggtgcaagaattgtttatccgtgattatggagagatttttaatgtccagttaccggataaagaagaacggacaaaattttttgaagatttaattctaaaacaagctgctaagcctcctatatcaaaaaagaaagcagttttgcaggctttggaggtactcccagtagcaccaccacctgagccaagatcactgacagcagaagaagtgaaacgactagaagaacaagaagaagatacatttagagaactgaggattttcttaagaaatgttacacataggcttgctattgacaagcgattccgagtgtttactaagcctgttgaccctgatgaggttcctgattatgtcactgtaataaagcaaccaatggacctttcatctgtaatcagtaaaattgatctacacaagtatctgactgtgaaagactatttgagagatattgatctaatctgtagtaatgccttagaatacaatccagatagagatcctggagatcgtcttattaggcatagagcctgtgctttaagagatactgcctatgccataattaaagaagaacttgatgaagactttgagcagctctgtgaagaaattcaggaatctagaaagaaaagaggttgtagctcctccaaatatgccccgtcttactaccatgtgatgccaaagcaaaattccactcttgttggtgataaaagatcagacccagagcagaatgaaaagctaaagacaccgagtactcctgtggcttgcagcactcctgctcagttgaagaggaaaattcgcaaaaagtcaaactggtacttaggcaccataaaaaagcgaaggaagatttcacaggcaaaggatgatagccagaatgccatagatcacaaaattgagagtgatacagaggaaactcaagacacaagtgtagatcataatgagaccggaaacacaggagagtcttcggtggaagaaaatgaaaaacagcaaaatgcctctgaaagcaaactggaattgagaaataattcaaatacttgtaatatagagaatgagcttgaagactctaggaagactacagcatgtacagaattgagagacaagattgcttgtaatggagatgcttctagctctcagataatacatattttctgatgaaaa

SEQ ID NO: 187822 - DNA, 2210 bp, Homo Sapiens
ttggagcagccccggggcggatggctccggccgcctggctccgcagcgcggccgcgcgcgccctcctgcccccgatgctgctgctgctgctccagccgccgccgctgctggcccgggctctgccgccggacgtccaccacctccatgccgagaggagggggccacagccctggcatgcagccctgcccagtagcccggcacctgcccctgccacgcaggaagccccccggcctgccagcagcctcaggcctccccgctgtggcgtgcccgacccatctgatgggctgagtgcccgcaaccgacagaagaggttcgtgctttctggcgggcgctgggagaagacggacctcacctacaggatccttcggttcccatggcagttggtgcaggagcaggtgcggcagacgatggcagaggccctaaaggtatggagcgatgtgacgccactcacctttactgaggtgcacgagggccgtgctgacatcatgatcgacttcgccaggtactggcatggggacgacctgccgtttgatgggcctgggggcatcctggcccatgccttcttccccaagactcaccgagaaggggatgtccacttcgactatgatgagacctggactatcggggatgaccagggcacagacctgctgcaggtggcagcccatgaatttggccacgtgctggggctgcagcacacaacagcagccaaggccctgatgtccgccttctacacctttcgctacccactgagtctcagcccagatgactgcaggggcgttcaacacctatatggccagccctggcccactgtcacctccaggaccccagccctgggcccccaggctgggatagacaccaatgagattgcaccgctggagccagacgccccgccagatgcctgtgaggcctcctttgacgcggtctccaccatccgaggcgagctctttttcttcaaagcgggctttgtgtggcgcctccgtgggggccagctgcagcccggctacccagcattggcctctcgccactggcagggactgcccagccctgtggacgctgccttcgaggatgcccagggccacatttggttcttccaaggtgctcagtactgggtgtacgacggtgaaaagccagtcctgggccccgcacccctcaccgagctgggcctggtgaggttcccggtccatgctgccttggtctggggtcccgagaagaacaagatctacttcttccgaggcagggactactggcgtttccaccccagcacccggcgtgtagacagtcccgtgccccgcagggccactgactggagaggggtgccctctgagatcgacgctgccttccaggatgctgatggctatgcctacttcctgcgcggccgcctctactggaagtttgaccctgtgaaggtgaaggctctggaaggcttcccccgtctcgtgggtcctgacttctttggctgtgccgagcctgccaacactttcctctgaccatggcttggatgccctcaggggtgctgacccctgccaggccacgaatatcaggctagagacccatggccatctttgtggctgtgggcaccaggcatgggactgagcccatgtctcctcagggggatggggtggggtacaaccaccatgacaactgccgggagggccacgcaggtcgtggtcacctgccagcgactgtctcaaactgggcagggaggctttggcatgacttaagaggaagggcagtcttgggcccgctatgcaggtcctggcaaacctggctgccctgtctccatccctgtccctcagggtagcaccatggcaggactgggggaactggagtgtccttgctgtatccctgttgtgaggttccttccaggggctggcactgaagcaagggtgctggggccccatggccttcagccctggctgagcaactgggctgtagggcagggccacttcctgaggtcaggtcttggtaggtgcctgcatctgtctgccttctggctgacaatcctggaaatctgttctccagaatccaggccaaaaagttcacagtcaaatggggaggggtattcttcatgcaggagaccccaggccctggaggctgcaacatacctcaatcctgtcccaggccggatcctcctgaagcccttttcgcagcactgctatcctccaaagccattgtaaatgtgtgtacagtgtgtataaaccttcttcttc

SEQ ID NO: 187823 - DNA, 1252 bp, Homo Sapiens
ttggattaatgtgcatttgagtgcaagatatcttttacaagagacctggttagaaaagaaatggggacacaacattacagaatttcaacagcgatttgatggaattttgactgaaggagaaggtccaagaaggcttaagaacttgtattttctctacttaatagaactaagggctttatccaaagtgttaccattcttcgagcgcccagattttcaactctttactggaaataaaattcaggatgaggaaaacaaaatgttacttctggaaatacttcatgaaatcaagtcatttcctttgcattttgatgagaattcattttttgctggggataaaaaagaagcacacaaactaaaggaggactttcgactgcattttagaaatatttcaagaattatggattgtgttggttgttttaaatgtcgtctgtggggaaagcttcagactcagggtttgggcactgctctgaagatcttattttctgagaaattgatagcaaatatgccagaaagtggacctagttatgaattccatctaaccagacaagaaatagtatcattattcaacgcatttggaagaatttctacaagtgtgaaagaattagaaaacttcaggaacttgttacagaatattcattaaagaaaacaagctgatatgtgcctgtttctggacaatggaggcgaaagagtggaatttcattcaaaggcataatagcaatgacagtcttaagccaaacattttatataaagttgcttttgtaaaggagaattatattgttttaagtaaacacatttttaaaaattgtgttaagtctatgtataatactactgtgagtaaaagtaatactttaataatgtggtacaaattttaaagtttaatattgaataaaaggaggattatcaaattcatatatgataaaagtgaatgttctaagtctctcaaactagcgttttatgtaataatatgtaatataaataaaactatggtaaatgtgacaagcatttaataggaaaatgctaaggaggcctcataaatgacccataattaccaacgtagaatttttcagtacatttagggttgctggatttagcaaataaaaataaagattgcccagttagatttgaatttcagataaacaattagttttttaatattttacatggaatatttggaaaatacttatactaaaaaattatttgtttgaaattcacatttaactgggagtcttgtattttatctggcaatcctaaa

SEQ ID NO: 187824 - DNA, 1481 bp, Homo Sapiens
ttgggttacccttggcgcgcagcatttgaagctgtctgtgaggccatcctgcgcttgtttccctcagacactttgtttttcatgttttggcagaatctccaatgaaaactatgttcctggactccatgcagcccaagcacctgccccagcagtggtcagtggaccacaaccatcagaagctgctccggaaattcggggaagatcttcccatccagctgtcttgatagctgctttcctcccagttaggacaagtgggaagctggagccaaggttgaagagtcacctcttcccattttagtacatcattaattgtcaaagcctgtgtgacacaactcagaatactaacctagactaatcccaggatgcttctgctggagcaaagatattgtttgaaggagagtttatggttttggattttaaacgggcagggtcttttttcctctcatttttgtggacaagagaggccttcgcctttatttttactctccctcttctgctgtccctgtgcagaggaaaaatgaagaattctcccagaagtgacttgtcaagacttaaaaaaaatgtttttaatgcatttcttccttgtctagtgcctcggtttatctctaacaggggctgtccagtatatcggtcctgttaggaggggagaaaaagttcttccaaaggctggagaagtgaacaaggagtcaaatttattttcccaattcaacttcataattatcatttctttggcttcatgctctcccgtaactcatgtggttgggatccatcccatctgggtcacttcagtctacttcacgtacttgaaaaggctttcctttacacttccaggaccaaacagcaacttcctgccacacacttccaccctatcactgggagaaatccttttctggacatgagcctttgacctgggtggggcagaaagaaccacaaactccatctcccaatagaactttgaaattcactcagcttttcctttcatgctgttcgttgcctgcttgttgcactcctcctgccccagaactgcaagatttttagcttcacccctttctgagagtaatgttatcttttatcagaatcagtatcagttcccctgtattctgtgcttcatcgaatttgcaagactgacctcttttaagcatttaattcactcccagagtcatctggtcaggttgcaatatgaggacttctctgtctcctctgaagcctgggacactgagcttacttaatacattagatgttcaaaagaggagcgttgtttcatctttcaaaatgttaggccattactttgagtataaaatcgacttattaatgattagtaatttttctaaagtattgggaaaactttcttattttataagatcttaacaagcttaaaaaagaattttatgaccagaatccaacaagagctctattttggaattgtgcccaagttggtgatgtttactctaaaattaataataaaactacttgtaagcacc

SEQ ID NO: 187825 - DNA, 1657 bp, Homo Sapiens
  misc_feature (84)..(111): n is a, c, g, or t
ttgggtcctgctccattgagatggatggcaaaccccatttttaagttatatttctttgatttttgttaatttagaggtgtaggnnnnnnnnnnnnnnnnnnnnnnnnnnnnaagagaaacatttataactggatagcattgcagtgaaagcagcttgggatgttggagctaatgccagctgtttatactgctctttcaagacagcctccctttattgaattggcattagggaataaacaagcctttaaacgtgataaaagatcaaaaacctggttagacatgccagcctttgcaaggcaggttagtcaccaaagactaacctccaagtggctttatggacgctgcatatagagaaggcctaagtgtagcaaccatctgctcacagctgctattaaccctataatgactgaaatgacccctccactctatttttgtgttgttttgcacagactccggaaaagtgaaggctgccaatctgagtagtactcaaatgtgaggaactgctggtcttggattttttttccattaaattcagctgatcatattgatcagtagataaacgtaaatagcttcaaattttaaaagtggaattgcagtgttttttcactgtatcaaacaatgtcagtgctttatttaataattctcttctgtatcatggcatttgtccacttgcttattacattgtcaattatgcatttgtaattttacatgtaatatgcattatttgccagttttattatataggctatggacctcatgtgcatatagaaagacagaaatctagctctaccacaagttgcacaaatgttatctaagcattaagtaattgtagaacataggactgctaatctcagttcgctctgtgatgtcaagtgcagaatgtacaattaactggtgatttcctcatacttttgatactacttgtacctgtatgtcttttagaaagacattggtggagtctgtatcccttttgtatttttaatacaataattgtacatattggttatatttttgttgaagatggtagaaatgtactatgtttatgcttctacatccagtttgtacaagctggaaaataaataaatataacataaagccttgcctatattcttaatgaatcatgcatgctttttattattaaattggaatagaagcctttcgtctcctgcagaagcaagtccttcggctggagagatttagcctcatggttattggaaactgcccaatagcctatttattttaggcagatctctgttgatccaaagcaattaatatcattaacgttagcaccagccaaaccatgttcagaattcagtgtttcttgaaaatgaagatgctgtcacaatatatttgcataacatttgtctcttctcaaccgtttccaacaataatctttatggtacgtaatattttggttcccagtatacatactgagagacaggacctcagagaaactgacattcaaggtcatgattattaagtggagagtacaatttagctagtgattctggacttctaactagtacacaatatgagtgctgatgtgtggtaagtctgaataatactttagtctatcagaagggcacttaattttaaaggtaaaaaccagtaagtagcagccctgcttacgcacatgtttaaatgagtgactcatttc

SEQ ID NO: 187826 - DNA, 1381 bp, Homo Sapiens
  misc_feature (1145)..(1186): n is a, c, g, or t
gaagggaaggggagatggagggaaggaatatcccactgctccctatgcttcccctatcccagctggaacactttcctgccggctcttttctctgctgttgagttggacattataaggaggaaggcagctcaccgagggtggtagacactcagggacttgacttgtgaaggggaagtaggacacggatgaggaacatcttgtgctcttctttaaggggcagggcaaagccattgatgatgctgcccaggatctccaggagctcagcaatcccgttgtgatgctccgtctcgtagatgaacctgagggaagaaaaatggctctcttgacaacccctgatgtccctccagcattctgtacagtccccccacctccctgctcccaccccacctcagtagcagaaggttttgctcctaagcctgggctcctggcctcacctgtagaagatgtggttgatctgcctacggatataagcccggagccccaaaaacttgccatagatgcgatgcaaaatggtcttgaggaagtcccgctctcgaggatcctcactgtcaaataggtctaggagagcaagtacaaacttctggtcgatgtacttcttggctatgtttggctggaaatcaggagactcaaggaaacgtaagaagaactcatacacgagctggagatgtggccaagcagcttccagggtgggctcatcttcctctgggtcaaactcagcccctgtgggattcgatgaaggtggcagcgtccggaagaggttcactgaaaacatggtgacagcctcagggtaaatggcctcagtgacaacatcacggctatgggtgatgtactccaccatctcgttgagtcctgcccgcttcacctccttgaatttgaggtcactgagtgggtctgacacgaagtcaaagaggacacagcactggcgtagcttctggataaacagctcctcccgctcctgggttggcgaatctttcagggcaggaagcttctgcagctcccgattcttgctgaggttgaagcgggaggagctttgccgtcgctccttcttgacaatctggggcccccctgagtacttgattttgctgagctgcgtggggggcggcgtgctattgctgggacgcttgttggatgacggtggctgagannnnnnnnnnnnnnnnnnnnnnnnnnnnnnnnnnnnnnnnnnctcctcagtgttctcgcctccaccatccttgcccgagctgctaggcttggctgtgcatttggcaaccttggggggctccttctcctttttcagtttatagggcatctcggcccgtccggacccggcccgtctcctgcggccccgctccggctccggctttgctcggccgcactcggcccgctcggcgtctcccaa

SEQ ID NO: 187827 - DNA, 1525 bp, Homo Sapiens
ttggctttgacttcgtgtcagacccactcagtgacctcaaattcaaggaggtgaagcgggcaggactcaacgagatggtggagtacatcacccatagccgtgatgttgtcactgaggccatttaccctgaggctgtcaccatgttttcagtgaacctcttccggacgctgccaccttcatcgaatcccacaggggctgagtttgacccagaggaagatgagcccaccctggaagctgcttggccacatctccagctcgtgtatgagttcttcttacgtttccttgagtctcctgatttccagccaaacatagccaagaagtacatcgaccagaagtttgtacttgctctcctagacctatttgacagtgaggatcctcgagagcgggacttcctcaagaccattttgcatcgcatctatggcaagtttttggggctccgggcttatatccgtaggcagatcaaccacatcttctacaggttcatctacgagacggagcatcacaacgggattgctgagctcctggagatcctgggcagcatcatcaatggctttgccctgccccttaaagaagagcacaagatgttcctcatccgtgtcctacttccccttcacaaggtcaagtccctgagtgtctaccaccctcagctggcatactgtgtggtacaattcctggagaaggagagcagtctgactgagccggtaattgtgggacttctcaagttttggcccaagacccacagccccaaggaggtgatgttcttgaatgagctggaggagattctggacgtcattgaaccttctgagttcagcaaagtgatggaacccctcttccgccagctggccaagtgtgtctctagcccccatttccaggtggcagagcgtgctctctattactggaacaatgagtacatcatgagcctgataagtgacaatgctgcccgagtcctccccatcatgttccctgcactctacaggaactccaagagccactggaacaagacaatccatggactgatctataatgccctgaagttgtttatggaaatgaatcagaagctgtttgatgactgcacacaacaatacaaggcagagaagcagaagggccggttccgaatgaaggaaagggaagagatgtggcaaaaaatcgaggagctggcccggcttaatccccagtatcccatgttccgagcccctccaccactgccccctgtgtactcgatggagacagagacccccacagctgaggacatccagcttctgaagaggactgtggagactgaggctgttcagatgctaaaagacatcaagaaggagaaagtgctgctgcggaggaagtcggagctgccccaggacgtgtacaccatcaaggcactggaggcgcacaagcgggcggaagagttcctaactgccagccaggaggctctctgacccctcacgttcctaccacagggccacagcccacacagccctgggacactgccctgatcctccatactctgctccctactggctgtcttggggga

SEQ ID NO: 187828 - DNA, 1032 bp, Homo Sapiens
ttggatagaagcagctcgaaaggaagaagaacggatcatgcttagagatgccaggcagtggctaaatagtggtcatataaatgatgtccggcatgcaaaatctggaggtacagcacttcacgttgcagctgctaaaggctatacggaagttttaaaacttttaatacaggcaggctatgatgttaatattaaagactatgatggctggacacctcttcatgctgcagctcattggggtaaagaagaagcatgtcgaattttagtggacaatctgtgtgatatggagatggtcaacaaagtgggccaaacagcctttgatgtagcagatgaagacattttaggatatttagaagagttgcaaaagaaacaaaatctgctccatagtgaaaaacgggacaagaaatctccactaattgaatcaacagcaaatatggacaataatcagtcacagaagacctttaaaaacaaagagacgttgattattgaaccagagaaaaatgcatcccgtattgaatctctggaacaagaaaaggttgatgaagaagaagaaggaaagaaggatgagtctagctgctctagtgaagaagatgaggaagatgactcggaatcagaagctgaaacagataagacaaaacccctggcttctgtaactaatgccaacacttctagtacacaagcagctcctgtagctgttacaacacctactgtgtcatcaggtcaagcaacacctacatcacctattaaaaagtttccaaccacagctacaaaaatttctcccaaagaagaagagagaaaagatgaatctcctgcaacttggaggttaggacttagaaagacgggcagctatggtgcacttgctgaaatcacagcatctaaagagggtcagaaagaaaaagatactgcaggtgttacacgttcagcttcaagtcccagactttcctcctctttggataataaagaacaggataaagatagtaaaggaactaggcttgcatatgttgcacctacaataccaagacgactagtcagtac

SEQ ID NO: 187829 - DNA, 1537 bp, Homo Sapiens
ttggattgaattaatgtactctgacaaatctatgatacaagttccttatcgattacatgccgttttagttcacgaaggccaagctaatgctgggcactactgggcatatatttttgatcatcgtgaaagcagatggatgaagtacaatgatattgctgtgacaaaatcatcatgggaagagctagtgagggactcttttggtggttatagaaatgccagtgcatactgtttaatgtacataaatgataaggcacagttcctaatacaagaggagtttaataaagaaactgggcagccccttgttggtatagaaacattaccaccggatttgagagattttgttgaggaagacaaccaacgatttgaaaaagaactagaagaatgggatgcacaacttgcccagaaagctttgcaggaaaagcttttagcgtctcagaaattgagagagtcagagacttctgtgacaacagcacaagcagcaggagacccagaatatctagagcagccatcaagaagtgatttctcaaagcacttgaaagaagaaactattcaaataattaccaaggcatcacatgagcatgaagataaaagtcctgaaacagttttgcagtcggcaattaagttggaatatgcaaggttggttaagttggcccaagaagacaccccaccagaaaccgattatcgtttacatcatgtagtggtctactttatccagaaccaggcaccaaagaaaattattgagaaaacattactagaacaatttggagatagaaatttgagttttgatgaaaggtgtcacaacataatgaaagttgctcaagccaaactggaaatgataaaacctgaagaagtaaacttggaggaatatgaggagtggcatcaggattataggaaattcagggaaacaactatgtatctcataattgggctagaaaattttcaaagagaaagttatatagattccttgctgttcctcatctgtgcttatcagaataacaaagaactcttgtctaaaggcttatacagaggacatgatgaagaattgatatcacattatagaagagaatgtttgctaaaattaaatgagcaagccgcagaactcttcgaatctggagaggatcgagaagtaaacaatggtttgattatcatgaatgagtttattgtcccatttttgccattattactggtggatgaaatggaagaaaaggatatactagctgtagaagatatgagaaatcgatggtgttcctaccttggtcaagaaatggaaccacacctccaagaaaagctgacagattttttgccaaaactgcttgattgttctatggagattaaaagtttccatgagccaccgaagttaccttcatattccacgcatgaactctgtgagcgatttgcccgaatcatgtttgtccctcagtcgaactcctgctgatggaagataaactgcacactttccctgaacacactgtataaactctttttagttcttaaacccttgccttcctgtcacaaggtttgcttgttgctgctatag

SEQ ID NO: 187830 - DNA, 913 bp, Homo Sapiens
tttgtacaaaaaagttgggtttcgcataagctcttggagatgtacaggaaggagctgctcctgaagcacacggtggccaaggagcttgcccacaccggggatcccgacctcaccctgagctacctgtccatgtggctgcaccagccctatgtggagagcgacagcaggctgcatctggagagcatgctgctggagacaggccaccgagctctctgacgtcctgagacggctgcggacactggctccttccacgtctcaccaggcagacagtctgcctaggacccagtgccgcaggcctggatcagaccccaggatcagaccttcttggggtcttctggccagagcttgtcaccagccccatggcctctccaggcgtgctcatgcccacaacccgcggccagccccacgtggtgccgctcagccttctctgcccctcctgggaatctgtcattcgtgggtgcttcagagtaaaatcaatgagtttctgagcagaatgagatcccaggagggcactcatggtggtttatgggactctggactcctgagaagcggccttgagtctacaggatacatctacagcctgacctgaccacccgacactcccaggcagccgcggcttgctcccctgctggccatttccagcctgctagaaaacccacctttttgttcctaccgaccgtggctttgagatcaagtgagggtaggaaatgcccctggtcactaaaagggctgtaggaaaggctggctctctgagaatacagctgccctccagggcacgacctggaaggagcacagcgccagggcgacacatggtcacaagcccagctctgtccctgagcagcgtgctctctgcttggggtctctcctgaccgtctctgcaaggcgtggggagagacctgctgctccctttgaa

SEQ ID NO: 187831 - DNA, 1018 bp, Homo Sapiens
ttgggcaaaatccaagagaataccttcaaacaacaagaggaaatcagtaaattagaggagcgtgtttacaatgtatcagcagaaattatggctatgaaagaagaacaagtgcatttggaaggaaataaaaggagaagtgaaagtactgaataacatcactaatgatctcagactgaaagattgggaacattctcagaccttgagaaatatcactttaattcaaggtcctcctggacccccgggtgaaaaaggagatcgaggtcccactggagaaagtggtccacgaggatttccaggtccaataggtcctccgggtcttaaaggtgatcggggagcaattggctttcctggaagtcgaggactcccaggatatgccggaaggccaggaaattctggaccaaaaggccagaaaggggaaaaggggagtggaaacacattaactccatttacgaaagttcgactggtcggtgggagcggccctcacgaggggagagtggagatactccacagcggccagtggggtacaatttgtgacgatcgctgggaagtgcgcgttggacaggtcgtctgtaggagcttgggatacccaggtgttcaagccgtgcacaaggcagctcactttggacaaggtactggtccaatatggctgaatgaagtgttttgttttgggagagaatcatctattgaagaatgtaaaattcggcaatgggggacaagagcctgttcacattctgaagatgctggagtcacttgcactttataatgcatcatattttcattcacaactatgaaatcgctgctcaaaaatgattttattaccttgttcctgtaaaatccatttaatcaatatttaagagattaagaatattgcccaaataatattttagattacaggattaatatattgaacaccttcatgcttactattttatgtctatatttaaatcattttaacttctataggtttttaaatggaattttctaatataatgacttatatgctgaattgaacattttg

SEQ ID NO: 187832 - DNA, 1036 bp, Homo Sapiens
ttggctccctgtgtctgtggtcgtcagttccactggcaggcgacctgcctccctgttgccaccacaagagaggaaaagttggtcaaacaggtggggaggccagagctacaagcctcgggttccctccccaccacccgtgccaggcaggcacccgggccctggcacctgctgcctgcccagaggccacccagcctcctagacaggtggctgacatggaggagctgaccatctgggaacagcacacggccacactgtccaaggacccccgccggggctttggcattgcgatctctggaggccgagaccggcccggtggatccatggttgtatctgacgtggtacctggagggccggcggagggcaggctacagacaggcgaccacattgtcatggtgaacggggtttccatggagaatgccacctccgcgtttgccattcagatactcaagacctgcaccaagatggccaacatcacagtgaaacgtccccggaggatccacctgcccgccaccaaagccagcccctccagcccagggcgccaggactcggatgaagacgatgggccccagcgggtggaggaggtggaccagggccggggctatgacggcgactcatccagtggctccggccgctcctgggacgagcgctcccgccggccgaggcctggtcgccggggccgggccggcagccatgggcgtaggagcccaggtggtggctctgaggccaacgggctggccctggtgtccggctttaagcggctgccacggcaggacgtgcagatgaagcctgtgaagtcagtgctggtgaagaggagagacagcgaagagtttggcgtcaagctgggcagtcagatcttcatcaagcacattacagattcaggcctggctgcccggcaccgtgggctgcagaaggagatctcattctacagatcaacggggtgtctagccagaacctgtcactgaacgacacccggcgactgattgagaagtcagaaggaagctaagcctgctggtgctgagagatcgtgggcagttcc

SEQ ID NO: 187833 - DNA, 593 bp, Homo Sapiens
tttgtacaaaaaagttgggggatgaagaccatgggcccccccgggtggaggaggtggaccagggccggggctatgacggcgactcatccattggctccggccgctcctgggacgagcgctcccgccggccgaggcctggtcgccggggccgggccggcagccatgggcgtaggagcccaggtggtggctctgaggccaacgggctggccctggtgtccggctttaaacggctgccacggtaggacgtgcatatgaatcctgtgaagtcagtgctggtgaataggagacacagcgaatagtttggcgtcatgctgggctttcagatcttcatctctcctttacagattcaggcctggctgcccggcaccgtgggctgcaggaaggagatctcattctacagatcaacggggtgtctagccagaacctgtggctgaacgacaaccggtcactgattgagaaataacaagggaaactaagcctgctggtgctgaaagatcgtgggcagttcctggtgaacattccgcctgctgtcattgacagcgacatctcgcaattggaggacatctcggacgtcgccgcggagctatctcagg

SEQ ID NO: 187834 - DNA, 1488 bp, Homo Sapiens
  misc_feature (1144)..(1152): n is a, c, g, or t
ttggttttaaaattattgacatttatttaaacttttagattggattgtttgctattgctctgtgtgaggatacataatctttcagtaaactgtatttttaacttttccataagctgattttggttcattttatcaacgtaagcacaccctgttcatagggaaaataaaccttgggttataagcattagcctgaggacaatgaagccacttaacctaatttatgctttcgactgttctgtttccagagaggaaagcctttacaaattactctcagttctttaggggcagaaggcttgtttcaagaggtttgacagaagaaaggaatatatgaacttaatgagatgtcgacttggttcaggtctaaaaatgagggcaaaacactaaggctctagcagtgacttgttcactaaaaagagagagtcctgtccccagacggttagtacaaagccttggatacagtttgcttgtaatatttttaataatgtgaggagtacagtgttttctaattcattcaagtatatatgatttaaacctgggctactgacacacacacagtagccattagttagactcttcttagtgaatatcaggaacatcccatctgtgcttaaccagaatccagcaagtcagcacacaagtgattttattgttattttgttgtatttacttgcatttgttgtatttactttcatctgcagcatttggagtttaaaaataatgtaaagggttctagtagaaatagtgtcctaaggccaattacctaccatactaacaatcagcagataaaattctggacgtgagattccttataatctaattatacctgaggttgagcaagaaatgtcttcctttagaaaatctcattcaagtcaggttcttctctacagttcaaaattgagaatggatttaattaactagcatttagccagctttttcttgcccttggagaaaaagaatcattctcaacctgataatctgttaagaaaaatcccatatgaacaatctggtcattaacatacatatgatacggagtctctttgttgtcaccaagtgaacatacttctcatggtgggttggacagtaatacatgttagagggtcagaagcttctggtttctgctgtttgctttaaatacccttggggnnnnnnnnnaaacccttacaaggggagcatcagctttggaaagtgtgactctgtaggagtgtagaaggcagtggtgtatgatcttagcctcgtcctgatgcctgaatccagccagctgttgctctgacccacagcaatagagcaagttacccatcaccagcatttgtacagagcagggaattctggttttagtccattggtagcattgtgtgtatgaggagattcaacaccacagacagctgcaggactcgatatccatggcttctttccatcacaaaacgggtagaaacacattcactgcttcagggttctaatctgtgtgtctccttatgactccatttctgt

SEQ ID NO: 187835 - DNA, 1263 bp, Homo Sapiens
  misc_feature (95)..(109): n is a, c, g, or t
  misc_feature (112)..(174): n is a, c, g, or t
ttaaaggggagatactctccctgacatttctaacatatgtattaagccaaacatgagtgaatagctttcagggcgataaaactaaatatatgtcnnnnnnnnnnnnnnnatnnnnnnnnnnnnnnnnnnnnnnnnnnnnnnnnnnnnnnnnnnnnnnnnnnnnnnnnnnnnnnntctgataaaattgtgatgttttgttcaaagttgtagttcttgtgcatgtttactttattagagtaggaaggctactggcattaattattaatgccaaatattttagccttaaatttttgtcattttaaaatctgatttaatgttttctgctgtttaaggtcttgggaggctttcaattgtattttatatgagagaatcacacaagtttgtgctatctatggccctgcaaaaatataaccattacatgtttaaattgtaaattttagagcataccagtactcagtatagcattgaacatttcttatgatttttaaaagttgctagtactggggagaaataattgttgattaatttgagaattattcctttcctagactaattaaaatctggaaatctgttttgtatatgatctaatacaaagatgagctctgaacaaacactgaatcatgttaatagacagtagccaagttatattgaatatatcagaatctgtgtgaagttacacaattaattgtccctgtttcaaactgagtaaattggaaacattttctttctttttctggaaattttgtccattttaaaaaccaatcattttaagaagacatgacaatgcaatgaaacagatgataaatatttatgcttaaaatatgtatgtctaattgagtctcttttttattctgttttcttgtttatggcatttgttgtaacaggatagactttttcctcacctaggaaacctatcccatgcctgtcacttatagttcaggaggaagtttttgcacagaccagagagaaattaaaattagatgataaattgaagatatcttacacacagttttttggtgaacactgattttattggtgtcttagatccctagtctacccaaataattttaacagtactgttttttctaatcctgaagtctgatatttatgactcattagcaggaatcaaaactagtgatcagtagaacactttcaaaataaaaatttggaatgcagacttttatgaaaatttaaaagtgctccttacagatatcatgggttttcctataaaacttctttagtattgtaattccagtctgcccc

SEQ ID NO: 187836 - DNA, 1321 bp, Homo Sapiens
ttggatataaagccaaggacaaagacacaggagaactagtggctctgaagaaggtgagactagacaatgagaaagagggcttcccaatcacagccattcgtgaaatcaaaatccttcgtcagttaatccaccgaagtgttgttaacatgaaggaaattgtcacagataaacaagatgcactggatttcaagaaggacaaaggtgccttttaccttgtatttgagtatatggaccatgacttaatgggactgctagaatctggtttggtgcacttttctgaggaccatatcaagtcgttcatgaaacagctaatggaaggattggaatactgtcacaaaaagaatttcctgcatcgggatattaagtgttctaacattttgctgaataacagtgggcaaatcaaactagcagattttggacttgctcggctctataactctgaagagagtcgcccttacacaaacaaagtcattactttgtggtaccgacctccagaactactgctaggagaggaacgttacacaccagccatagatgtttggagctgtggatgtattcttggggaactattcacaaagaagcctatttttcaagccaatctggaactggctcagctagaactgatcagccgactttgtggtagcccttgtccagctgtgtggcctgatgttatcaaactgccctacttcaacaccatgaaaccgaagaagcaatatcgaaggcgtctacgagaagaattctctttcattccttctgcagcacttgatttattggaccacatgctgacactagatcctagtaagcggtgcacagctgaacagaccctacagagcgacttccttaaagatgtcgaactcagcaaaatggctcctccagacctcccccactggcaggattgccatgagttgtggagtaagaaacggcgacgtcagcgacaaagtggtgttgtagtcgaagagccacctccatccaaaacttctcgaaaagaaactacctcagggacaagtactgagcctgtgaagaacagcagcccagcaccacctcagcctgctcctggcaaggtggagtctggggctggggatgcaataggccttgctgacatcacacaacagctgaatcaaagtgaattggcagtgttattaaacctgctgcagagcccaaaccgacctgagcatccctcaaatggcacagctgcttaacatccactccaacccagagatgcagcagcagctggaagccctgaaccaatccatcagtgccctgacggaagctacttcccagcagcaggactcagagaccatggccccagaggagtctttga

SEQ ID NO: 187837 - DNA, 1335 bp, Homo Sapiens
ggagggtctcgaaaggaggggcagtccttcacccccctacacagccaaaacccccaaggggcataggggcggggcaaggctttgttcccaagcccccaccccctagaaacccgcatagccgaagtgggacccacaaattagaaatacattattgcttctactccccaggagcagctggggacagggaccccacttttacaatacagctgtaaatatatacacaatatatgtatcactccttgggggatcaccccaatttggggagcctctgccccaataccttcttagcttggaattggaatgagggctctgggaggaagggctgatgctgatgccagcaaggctccgtgccccagacccctgctgtgtctgtcctgcgtgctcccactgcttggcatgggtgtccccggccttgtgctgcttcagtctggccctcgtccctctttaagaggactccatggcaccttcagcctggggtgtggtgggtgccccttcctcctcatcgtcatcagggggccctggggtagagaccgggggcccagtgggggctgactgctcccagaatcgagctagagagaggcggaaggtgtccaggtggccattggagaggtcgaggccagcgggggatgcagcagcggtagagggtggtgggtagtggggtggtgcatcgtccttgcggcgccgtcgggtgcgcacctccaggcagttctggcctttgaggtggcgctgcaggtggtcctccttggcgaaagccttgtggcacaggtggcactcatagggccggtcccctgtgtgcaggtgcatgtggttcttgaggtcgtagctgtgcaggaagcgggctgggcagtgcgggcatgagtaggggcgctctcccgtgtgcttccgcatgtggatcttcagcttgtcgttcctggtgaatcgaacaccgcagacctcgcaggcaaagggcttctcgcctgtgtgggtcctcatgtggcgaggcagtttgcctgccccatggatgatcttgtggcagacagggcactcctgaggcatctgggagcggcgtttgcgcaccagcttgtcttggctgtccaggcctggtgccaggttgtcctggtgcagggagcttaggtaggccatcaggtcaggatcgatggcatcctcatctgagcccagctcctctggggacagcgggggcccgccaccctgcgccagcccataggctgggggatataccagctcctcttcttcttcctcaccctcatagggttcgtagctctggggaccctcaggaggggaggcagttcctgtgggagggctgtagctgtcccccggccgactgcccccacccaa

SEQ ID NO: 187838 - DNA, 1901 bp, Homo Sapiens
  misc_feature (336)..(344): n is a, c, g, or t
ttggcagaaaaaatgggagcaagaacttgtgcttgggagctggttattggtgtggtcctagggagggcggaaagggaggcactgccatttggagacattccatttcagatttgtcaaccagcgataggccacattccagtaagaactcaatttgtctcccaaatttgcagaaacaaaacgtgatttaaaagctgagctttttatcagaaagcttttttgatgttttaagtgttatgtgacttgttgaactttttaaaaagtgctacttttaaaatcccagatactctgaattttagaaaacaaactaattctgattgtgtcgtgcccaagtacccnnnnnnnnnaatgaatagggaccaatgccacattgctttttatatttctttcttttttaatgttgccaaaaccaaaagtagctttgttttcctttgtattttgctactttgcagtatttgtgtgtgtggttttttttccttaatttgaaagggacagcactgtgtatgtttataaactaaatgaagataagatattattttgtataaacattcatctgagaacaatcaaagcagtagccacatggtgctggctcctttgcagcacaaacctggtcattttgatgactgtacaacaggaagacttgaaaaatcacgtggattcatattaccaccgctctcatttcatggagtcttctgatcaaaaaagctcacgtcgtatttcttcttttcctttctcttttctagaaattgggtgtttgtaccagaatggaattttgcttctcggttatcctgtgcttcagatgattataatctaacccaaactagcatgtgtttctgcagtttgttacacacctaggatcatattgcattcatcactttaaacatcatgtttcaggttttggtcaatacttgacaagggtgcccaggacaggaagacgtgtactgctgagtgttccttcttgcccttttcagcagcttgcccagctcttgagtacagtggtggggactaaaaatgtgggcatgtggagaggggtatttgccctgggtgatcctgtttccctgtgctgtccccatgctgtgttggaggaggaagtggctctccttccaccaacaaagctcctgctctaccctcttcctcacatgtgctgcgacctctctcagggctcccccagccattccttctttccttcctgccttttagctctaaccacattaagctaagacaaggccagagggtgcgattgaatgagtattgagactgaggagaatgatagagagtgaagcagaaacaggagcgcagacctctgctgtagctttaatgcatacaaacatgtccctccgcacaactaacctgccctgcctctccatctcgcaccaaggctgcgtcaaagcacagaggctccccggactcggagggggccagagactgagctctggtcacctgttcattcctcggttagctggaactttgccccgtttccagtttcttatagtgcatgcttgggaaacaagatttaaggagcctctgttttggaagggctgtctgtgattgaacgtgaaatgtgtagtgccattgggaccacgaagggaattcttgcacatgctcgtgctggtgtgggcatgggactggctggaaacgtctgtatgcagggagccagggtgagggcagagtgtggtgacagccgaacttggagtaatgtccgtgtagaaaaaggaccatgttcttatccagccaatactgggagtgctgtctccacaatttcagggcatctgaatgtttgatgtgggttttgtgtgtgtgtatgtatgtgtttaatatttgaagtgggatcatgagatgtaaaggaaaaacaattaatggcaatgactttatatttcaaatctgtaatttgtttcctttatcaa

SEQ ID NO: 187839 - DNA, 1421 bp, Homo Sapiens
ttggtaaaataatatatttcatagctaaacaaacataagatacataattattttctaaaggacaacagatgagaatgactttgcctgatataagagggtaaatcttttaaatttaactctgcgttctgtgcctaggttggggcaaacacaatggataatcctttgttgaaatacagtgcaaaggattacttcttcaaagctgccctctgccacttcatagtagacgagttgaatgccaagcttgctcttgagaaatatgaggaaatgtttccagcatttactgattcaagagaatgtaaattattgaaaaaactcctagaagctcatgaagaacagaacagtgaagcttacactgaagcagtgaaggaatttgactcaatatctcgcttggatcagtggctgaccaccatgttgcttcgcatcaaaaagtccatccaaggggatggagaaggagatggagacctaaaatgaaatgtttttgtctttgtggcatgcagctaactcctctttagttttgtcttagggtcaagtgatctttatgggatgcctatttaatggcttaattttgttgcatatgagccagacggcctgtgtattgtttaagctcgccaagtctgtgttgctgtgaaatgaatgaaggagaggctcctgttcatcttgtggtaatgatgggttgtttcatgcttatcagaacccccagcgttttctgagaagtacttcagaatctcattcctcatatttcattggtatttgtggagcctatgtttaatgttgccacgtgtttttatgtcctttttgttggacttgagtactcagcccagttgttctcatagatgctttgcattttctctgtgctttggcatctgaatatgttctttaaatgtgtgtttagtttaggacagttactaggaatgagtttataacttcattagaaatcatttctatttttgttatcctgtgattattttgatggtgctagtgactagtttctttgctttttgtgttgttccgtatgctaacatgtgcatggcaaaaatttagaatagccagggtctgtaggcatcacattgtgaggaagggagctttctggaagtacttgcttcatgtatggatgagtgtcaaagtgaatttgatttgtacttagacacacgcgtttacacacacacacatatcacaagatctgttagaaatggaatttttctctttttctggagatagttttcacttttagttggagtggaaatccctttatatttacattgaagtattttaattggcatagcctgctcattattttcatgtttatacactttcccacgttgaggtggtgtgttctgtgctgtgactatagaaatcttggtcagggctggatagattatctaagtcaagcttgagaatgaatgtatgtattttcctgttta

SEQ ID NO: 187840 - DNA, 1308 bp, Homo Sapiens
ttgggtcagcgggggcccagaaccagggcaagaaggccgagggggcccagaaccagggcaagaaggccgagggggcccagaaccagggcaagaaggccgagggggcccagaaccagggcaagaaggccgagggtgctcagaaccagggcaaaaaagtagaaggggcccagaaccagggcaagaaggctgagggggcccagaaccagggcaagaaggccgagggggctcagaaccagggcaaaaaggccgagggagcccagaaccagggccaaaaaggagagggagcccagaatcagggtaaaaagacagaaggggctcagggcaaaaaggcagaaaggagtcccaaccaaggcaaaaaaggagagggagctcccatccagggcaaaaaggcagattcggttgctaatcagggcacaaaggtagagggtattacaaaccaggggaaaaaagcagaagggtcccccagtgaaggcaaaaaggcagaagggtcccccaaccaaggcaaaaaggcagacgcagctgccaatcagggtaaaaagacagagtcagcttctgtccagggcagaaatacagatgtggcccagagcccagaggcaccaaagcaagaggctcctgccaagaagaagtctggttcaaagaaaaaaggtgagcctgggcccccagatgccgacggccctctctacctcccctacaagacgctggtctccacggttgggagcatggtgttcaacgagggcgaggcccagcggctcatcgagatcctgtctgagaaggctggcatcattcaggacacctggcacagggccactcagaagggtgaccctgtggcgattctgaaacgccagctggaagagaaggaaaaactgctggccacagaacaggaagatgcggctgtcgccaagagcaaactgagggagctcaacaaggagatggcagcagaaaaggccaaagcagcagccggggaggccaaagtgaaaaagcagctggtggcccgggagcaggagatcacggctgtgcaggcacgcatgcaggccagctaccgggagcacgtgaaggaggtgcagcagctgcagggcaagatccggactcttcaggagcagctggagaatggccccaacacgcagctggcccgcctgcagcaggagaactccatcctgcgggatgccttgaaccaggccacgagccaggtggagagcaagcagaacgcagagctggccaagcttcggcaggagctcagcaaggtcagcaaagagctggtggagaagtcagaactgtgcggcaagatgagcagcagcggaagctctggaa

SEQ ID NO: 187841 - DNA, 1529 bp, Homo Sapiens
ttggggcccagtgaggcttggcaggctgtgcgcggaccgcgccctggacggcgaaagcagacccggagggggcggccagtccggcgtcccagcgtccgaggcgagccagaaggcggcccacggccgtcgcctcccggtcccggcccggctactgcgctgcgcccactccgctctggagcctgggcgcgggtcctgaccttcccggccctctcctgacacctggtggatggcgtcaccagaactcctagctgtggaaccctagggtacctgttaccgcgctttggcgaaactgggttcgctgctgatttgcgaacctttgcctgactttctcaggccttgagagatctaagtaaatttggtggcccattgaaaggacctggagagagcgtatgaaggtaacaccccgtcaaactgcatgcggcctcagacctgctcctgtggagagctgttggtacctggagcctgaggagatattcagggaaaccagaagaggacaagaggaaaaggggaagggacttgggagaacctggcaccagaggctttcctgggacttccaggactcaaagccataggggcccacccgctacattcctgtctttgcccctcttcctacagatctgcctcttctccaagaaactcaaccactagtgacaatgaccagcctcctgactactccttctccaagagaagaactgatgaccaccccaattttacagcccactgaggccctgtccccagaagatggagccagcacagcactcattgcagttgttatcaccgttgtcttcctcaccctgctctcggtcgtgatcttgatcttcttttacctgtacaagaacaaaggcagctacgtcacctatgaacctacagaaggtgagcccagtgccatcgtccagatggagagtgacttggccaagggcagcgagaaagaggaatatttcatctaatgactcccaggccccaaggagcttattcctggctccatcgctaacacgttgactgcttattatgggaaagttttctctgaagccagggagaagcattgattgatgtgggcaaatccaagctccagccaggtcgcagtcccaaatgccgacatcactgactccagggaccagggacatggagaaagctgtttatgatatctttaaccaggccctcttactagagctggtgtttgtgactggccaacaagatgtggctatgccaggggacatctgagtatgtgcccagtcatcttttttcacaggttgaagggagagaaaagattttgagttaaggtcattggctgctctactctgtcccctacctggtcacctagtgatagccccagtggagatactgtccatacaaggtcttcccagaggctggataccacagtaaaaggccaggccagggatggggtagggagactatgggagatcttacctcctgataaatgtgctacaccccctaatctgagccctttctttcccgtgttccccacacctcatgcttacgtgattttttattcaaattaaaaatttttc

SEQ ID NO: 187842 - DNA, 1745 bp, Homo Sapiens
ttgggccttgactgaccgagaatgcacttgcccacctggcatgttccagtctaacgctacctgtgccccccatacggtgtgtcctgtgggttggggtgtgcggaagaaagggacagagactgaggatgtgcggtgtaagcagtgtgctcggggtaccttctcagatgtgccttctagtgtgatgaaatgcaaagcatacacagactgtctgagtcagaacctggtggtgatcaagccggggaccaaggagacagacaacgtctgtggcacactcccgtccttctccagctccacctcaccttcccctggcacagccatctttccacgccctgagcacatggaaacccatgaagtcccttcctccacttatgttcccaaaggcatgaactcaacagaatccaactcttctgcctctgttagaccaaaggtactgagtagcatccaggaagggacagtccctgacaacacaagctcagcaagggggaaggaagacgtgaacaagaccctcccaaaccttcaggtagtcaaccaccagcaaggcccccaccacagacacatcctgaagctgctgccgtccatggaggccactgggggcgagaagtccagcacgcccatcaagggccccaagaggggacatcctagacagaacctacacaagcattttgacatcaatgagcatttgccctggatgattgtgcttttcctgctgctggtgcttgtggtgattgtggtgtgcagtatccggaaaagctcgaggactctgaaaaaggggccccggcaggatcccagtgccattgtggaaaaggcagggctgaagaaatccatgactccaacccagaaccgggagaaatggatctactactgcaatggccatggtatcgatatcctgaagcttgtagcagcccaagtgggaagccagtggaaagatatctatcagtttctttgcaatgccagtgagagggaggttgctgctttctccaatgggtacacagccgaccacgagcgggcctacgcagctctgcagcactggaccatccggggccccgaggccagcctcgcccagctaattagcgccctgcgccagcaccggagaaacgatgttgtggagaagattcgtgggctgatggaagacaccacccagctggaaactgacaaactagctctcccgatgagccccagcccgcttagcccgagccccatccccagccccaacgcgaaacttgagaattccgctctcctgacggtggagccttccccacaggacaagaacaagggcttcttcgtggatgagtcggagccccttctccgctgtgactctacatccagcggctcctccgcgctgagcaggaacggttcctttattaccaaaggtacgggcatcgcagcagacctcacacacgcacttaaaccccccaaagagcccctgggattcgtccctccccgtccacagtccagttgtagctgagagttgagtcatctgaattacctgcccaggaagaccagtccaacttcaagatacgctggcccgagagtaacctcgccattggctggcgaagacacgcctccaaaatctttgcagctcgcactgcccggtggagagctatcggccaccctttatcctcatgatgctatcaaatgtgtgtttcggggaaggcctgataaaatgtagtctggcaagatttttgaaaattatttaccaagcttgctgtatccaaagatttaaagttgaacttatcttgagagtc

SEQ ID NO: 187843 - DNA, 1048 bp, Homo Sapiens
tgagccaccacgcccggcgaggtttttatttaaaatgttcagtaaagatgagcgtgtgtgagttaagacaggaaaatgagcctaattctttttttcttttgggactagagacttatttttgagctcgctgtaagactgagaaatcacgtagtccttcctgaaaccactaagaggaaaaatgtctgtgacactgcatacagatgtaggtgatattaaaattgaagtcttctgtgagaggacacccaaaacatgtgagaatttcttggctctttgtgccagtaattactacaatggctgtatatttcataggaatatcaagggtttcatggttcaaacaggagatccaacaggaactggaagaggaggcaacagtatttggggcaagaagtttgaggatgaatacagtgaatatcttaagcacaatgttagaggtgttgtatctatggctaataatggcccgaacaccaatggatctcagttcttcatcacctatggcaaacagccacatttggacatgaaatacaccgtatttggaaaggtaatagatggtctggaaactctagatgagttggagaagttgccagtaaatgagaagacataccgacctcttaatgatgtacacattaaggacataactattcatgccaacccatttgctcagtagctatgatagacctggacaaataacttgacaaattgctggaacacacttattgtggtttacccggttttaattatgtcagagattgcatcatccttctgcttgtttacaactatgatcttctatgaaatggtggtaccaaggggcgcccaacagcttttatccccattcttagagcatattctttattataatgattatccaacatatttctttaattttaatacaaaaaatacatcatttaatttttgttacatatgaacattcatttttaaatgctcagcctcaagtgcaggcatttttgagtggcctgattacatattcctcccacagcaagtccgtatcctggaagtgttattttataataaattttaaaaagttttaaag

SEQ ID NO: 187844 - DNA, 927 bp, Homo Sapiens
actttgtacaaaaaagttggcaaccatcctgcccagtctccgcttccccgtcttgtacacccctaactcctgaggctcctccgaatcacgcgagtggaagcggagaagctcaagtggccgccatgtcagaggcttatttccgagtggagtcgggtgcgctggggcctgaggagaactttctttctttggacgacatcctgatgtcccacgagaagctgccggtgcgcacggagaccgccatgcctcgccttggcgctttcttcctggagcggagcgcaggcgccgagactgacaacgcggtcccacagggttccaagcttgaactacccttgtggctggcaaaaggactttttgacaacaagcgacggatcctttctgtggaactccccaagatctaccaagagggttggaggactgtgttcagtgcagatcccaatgtggtggacctccacaaaatggggccccatttctacgggtttggctcccagctcctgcattttgacagtcccgagaatgcagacatttcccagtctctgctgcagacttttatcggacgttttcgccgcatcatggactcctcacagaatgcttacaacgaagacacttcagccctggtagccaggctagacgagatggagaggggcttatttcaaacagggcagaaaggactgaatgactttcagtgttgggagaaggggcaggcttctcagatcacagcttccaacctcgttcagaattacaagaagagaaaattcactgatatggaagactgaaagccggaagaacacagaatggctcctcacagacgtatccctccgtgtgtccttgataggagctggttgaccttgtacagaaccagaatcctgtcccatttcatggcttatttcctgtggccatagagaattatagggaactggacatgctgga

SEQ ID NO: 187845 - DNA, 1026 bp, Homo Sapiens
ttggctgagttagaatcagaggatattcaaatagaagccttgctgatgagagcctgtgagcccataattcagaacttctgccacgatgtggcagataaccagatagactctggggacctgatggagtgtctgatacagaacaaacaccagaaggacatgaacgagaagtgtgccatcggagttacccacttccagctggtgcagatgaaggattttcggttttcttacaagtttaaaatggcctgcaaggaggacgtgttgaagctttgcccaaacataaaaaagaaggtggacgtggtgatctgcctgagcacgaccgtgcgcaatgacactctgcaggaagccaaggagcacagggtgtccctgaagtgccgcaggcagctccgtgtggaggagctggagatgacggaggacatccgcttggagccagatctatacgaagcctgcaagagtgacatcaaaaacttctgttccgctgtgcaatatggcaacgctcagattatcgaatgtctgaaagaaaacaagaagcagctaagcacccgctgccaccaaaaagtatttaagctgcaggagacagagatgatggacccagagctagactacaccctcatgagggtctgcaagcagatgataaagaggttctgtccggaagcagattctaaaaccatgttgcagtgcttgaagcaaaataaaaacagtgaattgatggatcccaaatgcaaacagatgataaccaagcgccagatcacccagaacacagattaccgcttaaaccccatgttaagaaaagcctgtaaagctgacattcctaaattctgtcacggtatcctgactaaggccaaggatgattcagaattagaaggacaagtcatctcttgcctgaagctgagatatgctgaccagcgcctgtcttcagactgtgaagaccagatccgaatcattatccaggagtccgccctggactaccgcctggatcctcagctccagctgcactgctcagacgagatctccagtctatgtgctgaa

SEQ ID NO: 187846 - DNA, 1387 bp, Homo Sapiens
ttggcccaaagtgccaggattacaggcatgagccactgtgtccggtcttgagcaggtttttaaaatctccagtggccataaaactagccagggtagctcatgcttttactggttggaataaggagccaaaaccaacaaaataatatttattagggctcgatgcccatttctgtggctaaggcttaggtttggtgtgcagagcctggcctgctcttgtgggctgtggttgctgtgacagtttcgttttctgaatctttgtaatgctcttccaccctgctcgtgctgcccagaggctgatctgcaaacctgggcagtattccacactgaagctcagtttgcaaaccttctgctgtgttaattctggtcagtttcacacagaagtcacgagggcctctgcccaggaccttctattcacatttcaagaatccctttctgaaattctccaactctctggtcaggaggaggagcaccattggggcggggtaggcagctagaggcgcaggagcgaatccaggttccttgcgtggttcccagcctctgctgacagcacctcagctaccaggtggggagtggaaattcagcctgcttagaggactgacctctacagttcatatttgcagtgacataaaaggcaaagaggagctggcatggtggtacagaaggtatcagtcaagcgcaggctcttcagaaacctagaaactaaaaagagatgcaacatgtgactggccatcagccagacatgtctagggtgagaccagtgctcagcaccacccgccaaggaacactgatgagttgtgggacattatggtcggccaagtgaggaatgattgcagggaccagagaagaccaaagatgccagatgtccccagagtttcttgagggctgggtttcacgtctttgcttgtcctttttgtccccacttgcctgcaccgtgcctgactcatccagtggggaaggtgactcaagaagttgtttaagcctaggcctaggcagtccacttcgggaggtgggggcactccacactggggggccctgcagctccagggctggtgctctagcagatccgctcaggcacggttgggtgaccgtggggtcaccgattgcgtagattatttctagggcagtgctgggttagaaatgtctgtctggaaacaggacacatcttgccaccacaagtccacacctggccttggctgctgcccgctctctgcagcgtggatttcctttgcccatttgggccagaaggtcaccaggagttcatcactgcttagtgtcaacttgacatcttcagcttccagacagaaaacccatgctttactttgtacagccctgtcccagagttagtaagcctcggcttgtcacctgcttgcaaagggtatagacccaa

SEQ ID NO: 187847 - DNA, 951 bp, Homo Sapiens
ttgggcaatatttagtggaaatcatgacctatgtaacatggtggctgagtacatttcctgcaaatcgagtgatcggaattggatgtaatctggattcacagagattacagtatattattacaaatgttttgaaggcacagacttcaggcaaagaagtatgggttattggcgagcaaggagaagacaaagtgctcacatggagtggccaagaagaagtagtgagtcatacctctcaagtgcagctgtccaacagccatggaactgctaagagtaaaaggtcaaagatcctggtctgttggactatcagtagctgacatggttgacagtattgtaaacaataagaagaaagtgcattctgtatcagctttagcaaagggatattatgatataaatagtgaagtgtttttaagtttgccttgcatccttggaaccaatggagtatctgaagttatcaaaaccacactgaaagaagatacagttactgagaaactccaaagcagtgcatcctcaatccacagtctccaacaacagttaaaactttgattctcaaatgcaatttgagaggctggacttctacctaaagggaaaagtcatttaattttacctatatataggtttgaggatttctgtatcctgctacttacttttacaaactgcttggttaaagtagagggtttcttgattagctttgtgatgtaaatccttaaggagttatacaaggaggggaaaaattaattttatttggggttcttgagatatctatgctgttctttaaatctacagcaggggtaaacattcatctgcagtgtgcatcaatttaaatcatatatcctaaactaaaagcacaattcatacttcgggaatattttataagtaatatatctttaaaagaaaattaccctttgacttttataatcaacataagttccaggcccagtatggatttacaaa

SEQ ID NO: 187848 - DNA, 2484 bp, Homo Sapiens
  misc_feature (1408)..(1453): n is a, c, g, or t
aattgatgagcaatgctttttcattataagaagagactttgtacaaaaaagttgggtcacttgtgaaaatgaagattcagctgatggtgcggccacatcctgtggtcaggttctggtagaagacagctgttgagtgactgtgaggatgaaccttcataccctttccaagacgtgttacacagacagacctttttaagtcctggacttttaaatgaccatgaagttatcattgaatgttaagattttttcttcttgattttttaatacacgtaatctttttgaagcagacattgtatacagaatcttacttctctttgttcctgatatattaaaatggccagttaggctctttttgtagttgaattgtcttctaaagagattggatggcctctaaagaggtatgtgtatctttatttcagatgtcacccagagtaaattataattagaagtatagctagaatgagccccaaaccttagcctcatttattttgttctgttacataagtcattttccccttagagtgcttgaagaaatgccacctacaggttgtgtacttttcataatggtttccatgaatgtagtacgttcatacaggcttcattcaacctggcgttcccctccataattaagatgaaacattccggttttctcacaacacattagcacatactgtccattatcatatctgggataaccaggttttgggggttgagttttggccttcatccttgtagatccctttcctattgatttcccaccttccagtgaaattctgaaagtcttatcttaaaaatcgatccgcttaccatgggcctattcttgtaagtttcagttagcatttgcatgtgtaatattaaaatgaaagagcttcttacccagtgctgttgcccttttgagtatttttgtttttaaaataatgattgtaaaatgttttacaagtaatgtaaaagctagtatcattcttacatacttctgtgtttaaattttcattcttaccaaaacagttaactctttctttccaatcaatttatacaaaagaggtcgctccagccctaccacaggtctgactggcactgccttttgtttgcccttgaacagggcagtgttgtggggactgcaaaagagaaaacgtccaggcgagcccagttgtcctcgcccacagggtcctgcaggctccatcagtcaccgctttctatggcgtttgtagttgtgtcttttaagaagtgagtgtgattgtttacttgataaatcagctcactctctggtgctttttagagaagtccctgattccttcttaaacttggaatgatagatgaaattcacacccctgcagatcagaaaaaacaaatagaagaaaatgagggttacagtaacctgttgtctttatataacttgcaacaaactaannnnnnnnnnnnnnnnnnnnnnnnnnnnnnnnnnnnnnnnnnnnnnaaggaaaatacttttctcctttgaagttttacagctttttgtaaatgcgtcctgataatgattaggaaaatcgaccttttcatccatgatgaccatcctcatagctcagatttcctttcaaagtaatggctttctggatggtaattccatcttaaggtgtcagaactattttcaaatgctgcctttgacagttcttggaattttctgatattaagcagttccatgcaaatattcgtgtttaataaatagctctcataatctgctccatcttgatagttaagtgatttctgaagcgtttgtgtgtgtgttgatcaggttgtgtgatatttttgcttgataaagaatcaaatttgaaacaattaaccagccagtagattgtctgtcagtgaccttctgtagtaataaagtttttgccactgtaaataaaaacagtatccgtagctatcaggatcattgcgcactcatatatgctaagccttctgttctctaatagaagcctttcttttccattgtttctggatatttgtattatccaaatgtgcttatttctttgccttagcacacgttttatggagtacttgttatactaggtttgatttgaaactggtgcttgtcgcagaactgtcagagcatgaggagcgctcctcctgtgggtggacgcattcacgcactcccaggttgcacctgctgctggcggtgagcagggggttcagcagcttgaccgatgccccccgagggggctctccccagcttaaactttgttgtttaaatttgttaactttttatattaatgactattgaaagtggtaataaaaatttatattataggcttcaatgttttcattaatgttacccaaaaagctgtgttttctttggtcagaggtcccaatttatgaaaaacaaaatgctgtatgaatggaaatcattttgcaattgagtgacacttcattgtaattcacagtgtaaatttaatccaaactgaaattttgtttcaactgaatttgtaattaactctgaatttgtttttaatc

SEQ ID NO: 187849 - DNA, 1766 bp, Homo Sapiens
caaatttgatcgagcaatgcttttttcataatagccaactttgtacaaaaaagttgggtcaaaggcaaccagtgctcgctgcggtctctggggatcgggaccgcggcggcggcccgcgagcgggatgttccggggcttgagcagttggttgggcttgcagcagccggtggcaggcggtgggcagcccaatggagatgctccacccgagcagccgtccgagacggtggctgagtctgcggaggaggagctgcagcaagcgggagaccaggagctcctccaccaggccaaagacttcggcaactatttatttaactttgcatctgctgccacaaaaaagataactgaatcagttgctgaaacagcacaaacaataaagaaatccgtagaagaaggaaaaatagatggcatcattgacaagacaattataggagattttcagaaggaacagaaaaaatttgttgaagagcaacatacaaagaagtcagaagcagctgtgcccccatgggttgacactaacgatgaagaaacaattcaacaacaaattttggccttatcagctgacaagaggaatttccttcgtgaccctccggctggcgtgcaatttaatttcgactttgatcagatgtaccccgtggccctggtcatgctccaggaggatgagctgctaagcaagatgagatttgccctcgttcctaaacttgtgaaggaagaagtgttctggaggaactacttttaccgcgtctccctgattaagcagtcagcccagctcacggccctggctgcccaacagcagccgcagggaaggaggagaagagcaatggcagagagcaagatttgccgctggcagaggcagtacggcccaaaacgccacccgttgtaatcaaatctcagcttaaaactcaagaggatgaggaagaaatttctactagcccaggtgtttctgagtttgtcagtgatgccttcgatgcctgtaacctaaatcaggaagatctaaggaaagaaatggagcaactagtgcttgacaaaaagcaagaggagacagccgtactggaagaggattctgcagattgggaaaaagaactgcagcaggaacttcaagaatatgaagtggtgacagaatctgaaaaacgagatgaaaactgggataaggaaatagagaaaatgcttcaagaggaaaattagctgttcctgaaatagaagaataatccttaacagtctgcaaactgacattaaattctagatgttgacaattactgaatcagaaggcatgaaagagtataattttatgaaattcaaaattattcttttttcaagttgaaacttgcctcttctactttaaaaaagtatatagaacagttacttctaataatcagaaagagatgttttatagaacatttctttaatataaagttagagatgtcttcataggcagtatggctatctttgccacagaaacataagtaaaattttagagttctgttttccatgaggtcaaaaatataatttattcctcagtcatggttttctaaatatctgtactccacattccattttaattgatatgagggtgttaaagtacctacttaatgggttgattactatcaaaatgaccaaattataccaaagaacttaagaggaagcactttcagaactattcacttgccaggtattttctaaaattccacctgaaagccaaaagataaaataaataagttgattttaatgatataagcatcacacaattttacattaagaaatactgtgca

SEQ ID NO: 187850 - DNA, 1225 bp, Homo Sapiens
ttggggaagcctgcgaggtcggttccgcccgactctaacatggcggcgccctttgtctgctctggagtgccgtccccggccttctcgcggccgtgatgcacctccctctgcggtggggtccgggacatggcaggtaatgagccggacgaggggagccaagctggagtttacacaggcaaactgtcagaaaagagtagcctgggctgtctggaaatctgagccatggactttccccagcacagccagcatgtcttggaacagctgaaccagcagcggcagctggggcttctctgtgactgcacctttgtggtggacggtgttcactttaaggctcataaagcagtgctggcggcctgcagcgagtacttcaagatgctcttcgtggaccagaaggacgtggtgcacctggacatcagtaacgcggcaggcctggggcaggtgctggagtttatgtacacggccaagctgagcctgagccctgagaacgtggatgatgtgctggccgtggccactttcctccaaatgcaggacatcatcacggcctgccatgccctcaagtcacttgctgagccggctaccagccctgggggaaatgcggaggccttggccacagaaggaggggacaagagagccaaagaggagaaggtggccaccagcacgctgagcaggctggagcaggcaggacgcagcacacccataggccccagcagggacctcaaggaggagcgcggcggtcaggcccagagtgcggccagcggtgcagagcagacagagaaagccgatgcgccccgggagccgccgcctgtggagctcaagccagaccccacgagtggcatggctgccgcagaagctgaggccgctttgtccgagagctcggagcaagaaatggaggtggagcccgcccggaaaggggaagaggagcaaaaggagcaagaggagcaagaggaggagggcgcagggccagctgaggtcaaggaggagggttcccagctggagaacggagaggcccccgaggagaacgagaatgaggagtcagcgggcacagactcggggcaggagctcggctccgaggcccggggcctgcgctcaagcacctacggcgaccgcacggagtccaagcctacggctccgtcatccacaagtgcgaggactgtgggaaggagttcacgcacacggggaacttcaagcggcacatccgcatccacacgggggagaagcccttttc

SEQ ID NO: 187851 - DNA, 1645 bp, Homo Sapiens
  misc_feature (151)..(166): n is a, c, g, or t
ttggcattgttcatgcttttaggcctttgggggaattgatttttatccacaggtagaaaatggtctttgcacacactacacttacttcaaatatacaatgtgctcccgaactttcgcattagtctttaaaattactctcaaaatggtattnnnnnnnnnnnnnnnngcaccctcttgtatttcatttttgctttttcttaacaatacctttggccatttttttccagttcactatgtttgtatactaacttttcttcagccttttaatgcgaagccaactagtagagcatgctttcaggatctgacagctctgctagtagagcgagtatttattaatacagaattaaccttcgcccctttaaagtcaagtctgtctaatctaactagcgcctcgctttgccttctcacaatgctcactagccatcatgctcacccttctcttccagatccacttcctcatgatactgtcttctaactgggcttacttaaaggatgcgagcaaaatgcaggcttaccaggatatcaaagcaaaggaagaacaggaactgcaagatatccagtctcggtcaaaagaacaactcaattcttacacataaatgtttgccagagtgtttcggccgacgtatttacagctctgacaaatcatcagacagctgctctgcagtacagatgtgtatcccaccaaactaatgtagatgtacaaacacttcactgtctgtctcaagctgctgggatgtatctctaggaaaaccttccagtgggtaaatctttttctttagaacaaatattggaggtttcatgttagccattttaaaaggcaacactttgacaaaatgatcgttcatactttgggaatttgtggcatgttcacatttattgctagggcaattctaccaagacactcaatggaatatgtcacactccttaatagggacctgtgactccttaataaggacctgtgacatgcccagcatcaagggataagaccgtaaattcacatatatgccatctgtcctcaagtgttatctacataggaaataaaatggaattgatgtaaagttccatttctgacagctgacatttattaaactttggatcaaagataatgtgattcttatgattgatttctcaaactagcttttccctcccaagtccaggacccattaatttcctgagccaatcagaaatatatttttcaataatgctaaaattagctacaattctgctgaccctactattaaagaatctggatgctggactcactgacaagctttccagaagcaattttataacagatttcattttaacaaaatactgatccaattttcattattcttgagaaatgtcagctttgccttaatgagtatttgctttaaatttctaagaatttatatcataactagagacccaaatatctttcacagaattttgttccataaatgtttttcttaattattaagaagtgttaccttattaaaatgaccaccattctaaaccatttttcagtggtctggatacgaagtttacagtttcataccaactatctaaaacctaatttgcaaattgaccacagacctctaacctcctacttttatagacttggatacttaagtaatttaaattagggttggtatttcattttttt

SEQ ID NO: 187852 - DNA, 1370 bp, Homo Sapiens
ttggctcaaaccccaaccgcgttcgcatgtttgggcctgacaagctggtccgggcagccgccgagaagcgctgggaccgggtcaaaattgtttgcagccagccctacagcaaggactccccctttggcttgagttttgtacggtttcatagccccccagacaaagatgaggcagaggccccgtcccagaaggtgacagtgaccaagcttggccagttccgtgtgaaggaggaggatgagagcgccaactctctgaggccgggggctctcttcttcagccggatcaacaagacatccccagtcacagccagcgacccggcaggacctagctatgcagctgctaccctccaggcttctagtgctgcctcctcagcctctccagtctccagggccataggcagcacctccaagccccaggagtctcccaaagggaagaggaagttggatttgaaccaagaagaaaagaagacccccagcaaaccaccagcccagctgtcgccatctgttcccaagagacctaaattgccagctccaactcgtaccccagccacagccccagtccctgcccgagcacagggggcagtgacaggcaaaccccgaggagaaggcaccgagcccagacgaccccgagctggcccagaggagctggggaagatccttcagggtgtggtagtggtgctgagtggcttccagaaccccttccgctccgagctgcgagataaggccctagagcttggggccaagtatcggccagactggacccgggacagcacgcacctcatctgtgcctttgccaacacccccaagtacagccaggtcctaggcctgggaggccgcatcgtgcgtaaggagtgggtgctggactgtcaccgcatgcgtcggcggctgccctcccagaggtacctcatggcagggccaggttccagcagtgaggaggatgaggcctctcacagcggtggcagcggagatgaagcccccaagcttcctcagaagcaaccccagaccaaaaccaagcccactcaggcagctggacccagctcaccccagaagcccccaacccctgaagagaccaaagcagcctcaccagtgctccaggaagatatagacattgagggggtacagtcagaaggacaggacaatggggcggaagattctggggacacagaggatgagctgaggagggtggcagagcagaaggaacactgactgccccctggccaggaggagaatggggaagacccgtatgcaggctctacggatgataacacggacagtgaggaacaccaggagcctcttgatctgccagtccctgagctcccagatttcttccagggcaagcacttctttctttacggggagttccctggggac

SEQ ID NO: 187853 - DNA, 1480 bp, Homo Sapiens
  misc_feature (887)..(910): n is a, c, g, or t
cttttcaagataacgagggcatgcattgtccatgggaggaggaggagggcctggttgagctgcacagcttccactgtcctccgggccaccgtctccggcttcagtgggggaaagaggttgggaaacctgactctcatgccctggaacatctcggtgctggtgtggaagggcagcactgtggtggcgctgactcccggacagtccagcagccccagggtcaggctctccatgaaggcgaaggctgacgctttggatgtgcagtagtcgatggcaccggggatggcagacagtgccagcacggagttgaggcacacgatgtggccattctgcagctccagcatacgtggcaggaaggccttggtggtccagaactggcccagggtgttgatgtgttgggacttgaggagggcatcatcatcactgtccattaggctcttcccatggaccacggcggcattgttcaccaggatggtgatgtcacccaccttctcccggacggccttggccgtctggtacacctcctcccggttgcccacatcacagatgaagtaatggcactcagtgcccatctgccggatctcctccgtcgtctccttcaggcatttctcagtccggccccagagaacaatcctggcctcctctttcctgctttccaaacacctgggcctctcagtgtcggtccggccagactactgcatacaagaccgctcttcccttttcaaacccaaaccaagtaccctctctcgtgtcttcagagctgcagccgcccaggttggggctgggtagcgggttgccaaggaaaatacgaggcgccagctagcaggcggctcccagctctacccaggagtgccacaccctgcactcaccagggtggcggcaagaaaaannnnnnnnnnnnnnnnnnnnnnnncacaacaccttcctttgggaggcaggaatgtgggaaatggtgggtctcttaggtttcagggtgggggtgaatagccagtcagccagccaccgatcccaaaggagcggatcaactctgaacctgccaaaaaagacagtccggtgcccgggaaatttacaaggtgaaaccgactagctcagcactcgtgggtggcgcggagaagtggggtggccggcgactctcagctcccgggcgcgggatcccgcagcggcagcaggtgggcttacccccgcccctgcggccccccactccctggagtcgcagtgcctggtacctttctggcgccgcgctccgcgaactcgcgggcgagctgacgcccgatgcctctcccgccgccggtgatgaggacgttctcccgcgacaggtcccgcagcttggcgggcagcaccagtccgacggctgctttcaccaccagatagatcatctgtagagggaacatcaccagcgcgcccagccgtttccacaccatcctccgcgccgcggagccgggcagggggcgaaactccccgggccgagcaatacaggaaccaa

SEQ ID NO: 187854 - DNA, 1602 bp, Homo Sapiens
  misc_feature (209)..(219): n is a, c, g, or t
  misc_feature (903)..(1229): n is a, c, g, or t
ttggctctgaactgattttacttttaaagaatttgctcatggacctgtcatcctttttataaaaaggctcactgacaagagacagctgttaatttcccacagcaatcattgcagactaactttattaggagaagcctatgccagctgggagtgattgctaagaggctccagtctttgcattccaaagccttttgctaaagttttgcacnnnnnnnnnnncatttcccatttttaagtagttactaagttaactagttattcttgcttctgagtataacgaattgggatgtctaaacctatttttatagatgttatttaaataatgcagcaatatcacctcttattgacaatacctaaattatgagttttattaatatttaagactgtaaatggtcttaaaccactaactactgaagagctcaatgattgacatctgaaatgctttgtaattattgacttcagcccctaagaatgctatgatttcacgtgcaggtctaatttcaaagggctagagttagtactacttaccagatgtaattatgttttggaaatgtacatattcaaacagaagtgcctcattttagaaatgagtagtgctgatggcactggcacattacagtggtgtcttgtttaatactcattggtatattccagtagctatctctctcagttggtttttgatagaacagaggccagcaaactttctttgtaaaaggctggttagtaaattattgcaggccacctgtgtctttgtcatacattcttcttgctgttgtttagtttgttttttttcaaacaaccctctaaaaatgtaaaaaccatgtttagcttgcagctgtacaaaaactgcccaccagccagatgtgaccctcaggccatcatttgccaatcactgagaattannnnnnnnnnnnnnnnnnnnnnnnnnnnnnnnnnnnnnnnnnnnnnnnnnnnnnnnnnnnnnnnnnnnnnnnnnnnnnnnnnnnnnnnnnnnnnnnnnnnnnnnnnnnnnnnnnnnnnnnnnnnnnnnnnnnnnnnnnnnnnnnnnnnnnnnnnnnnnnnnnnnnnnnnnnnnnnnnnnnnnnnnnnnnnnnnnnnnnnnnnnnnnnnnnnnnnnnnnnnnnnnnnnnnnnnnnnnnnnnnnnnnnnnnnnnnnnnnnnnnnnnnnnnnnnnnnnnnnnnnnnnnnnnnnnnnnnnnnnnnnnnnnnnnnnnnnnnnnnnnnnnnnntgtatggttaaaccttggcgtctagccatattttatgtcataatacaatggatttgtgaagagcagattccatgagtaactctgacaggtattttagatcatgatctcaacaatattcttccaaaatggcatacatcttttgtacaaagaacttgaaatgtaaatactgtgtttgtgctgtaagagttgtgtatttcaaaaactgaaatctcataaaaagttaaatttttgtctgacactttgatttttaaatctttgaggattgagtttactgttactcagattcagcagtcacttgagtgcctttactgtgtatcaggttctgtgctgaacattactaaaattaagtggaaagtaaggaaagattagccaa

SEQ ID NO: 187855 - DNA, 1141 bp, Homo Sapiens
  misc_feature (914)..(945): n is a, c, g, or t
actgggcgtattaataaatattctttattttaaattttgcacattgcgctttaacattacatccaaacattttgcaagtggatgtctactttgtaaaaccatatattcagctcattgtcatttctgtacagaattataagtacaacattactttttgccactaagttgctttagtaagtctcacaggaagagaaaacatttaatgaaaagagatggcttaaatcatatggcaggcctgcgcagccacgcaactaaagacacaagcctgaagaaagaactaatgaggatacctccaccgtctcccaaaacaagaaagaatcacattgatttaagataaaattttgccataagtcactaaattaagagtttttcgaaagagaaggcgcagtagtcatcgtgagtgtttcattgaaagacagagctattttatttatttaatttgctccagccgttgtcaaccagccactacaaatgggcctcttgtgatcatttaaccggcagtatttattaaatttctccttcagatgctgtcggtattgttctctattgctgtagaaagactggttattagccataaatgactgtatttcatcttgtgagataaagatttcctcatctgaagtacattcagactcatcaaggagttcaactaagctcttggcaccttttccggaatcgggaccaaacaacgtttctgtaggttctgcaaactgtggtacatttttcctatgctcaaaccaaggcaatggctgcccacccttttcagagctgcaacagctttcaggatgtgtatctttggtcttgtcacggtgaaacactgtgtgcatggtatttcctgaggtctctcgattacctggatctgtaatacagcttccaagcttctggatatgttcatcacatttcagtatcttgcnnnnnnnnnnnnnnnnnnnnnnnnnnnnnnnngtgtcgttctcttcagaatttgcccaacattcaacacaactatcaccatcatcctctttgtcttcacagtgatgaacacaagagtcatcaccgtgttcatcatgattacaaatgccttcagtgcaggcaacatccgaaccctcccgagaacctgtttcactcccttggcatgctagatccaacttttttgtacaaa

SEQ ID NO: 187856 - DNA, 1973 bp, Homo Sapiens
ttggccgggttgcagccagggaagcctccgcggtggtgcaagtggaacccaagccttgaggtttcagcctgggcagcatggccgtattccggtcgggtctcctggtgctgacgacgccgctggcctccctagcccctcgcctggcctccatcctgacctcggcggcccggctggtgaatcacacactctatgttcacctgcagccgggcatgagcctggagggcccggctcagccccagtccagccccgtgcaggccacgtttgaggttcttgatttcatcacgcacctctatgctggcgccgacgtccacaggcacttggacgtcagaatcctactgaccaatatccgaaccaagagcacctttctccctcccctgcccacctcagtccagaatctcgcccacccgccagaagtcgtgttgacagatttccagaccctggatggaagccagtacaacccggtcaaacagcagctagtgcgttacgccaccagctgttacagctgttgtccgcgactggcctcggtgctgctatactccgattatgggataggagaagtgcccgtggagcccctggatgtccccttaccctccacgatcaggccagcttcccccgtggccgggtctccaaagcagccggtgcgtggctactaccgtggcgctgtcggtggcacgtttgaccgcctgcacaacgcccacaaggtgttgctcagtgtcgcgtgcatcctggcccaggagcagcttgtggtgggagtagcagacaaagatctgttgaagagcaagttgctccctgagctgctccaaccttatacagaacgtgtggaacatctgagtgaattcctggtggacatcaagccctccttgacttttgatgtcatccccctgctggacccctatgggcccgctggctctgacccctccctggagttcctggtggtcagcgaggagacctatcgtggggggatggccatcaaccgcttccgccttgagaatgacctggaggaacttgctttgtaccagatccagctgctgaaggacctcagacatacggagaatgaagaggacaaagtcagctcctccagcttccgccagcgaatgttggggaacctgcttcggcctccatatgaaaggccagagctccccacatgtctctatgtaattgggctgactggcatcagtggctctgggaagagctcaatagctcagcgactgaagggcctgggggcgtttgtcattgacagtgaccacctgggtcatcgggcctatgccccaggtggccctgcctaccagcctgtggtggaggcctttggaacagatattctccataaagatggcatcatcaacaggaaggtcctaggcagccgggtgtttgggaataagaagcagctgaagatactcacggacattatgtggccaattatcgcaaagctggcccgagaggagatggatcgggctgtggctgagggaaagcgtgtgtgtgtgattgatgccgctgtgttgcttgaagccggctggcagaacctggtccatgaggtgtggactgctgtcatcccagagactgaggctgtaagacgcattgtggagagggatggcctcagtgaagccgcggctcaaagccggctgcagagccagatgagcgggcagcagcttgtggaacagagccacgtggtgctcagcaccttgtgggagccgcatatcacccaacgccaggtggagaaagcctgggccctcttgcagaagcgcattcccaagactcatcaggccctcgactgaaaagttctcagtggggccagactggctcctggagctgacaagcgaccccgtggtgaggagaaatgggggccttgatgctcaccctggttcaggcccagaggtccaagctatactgtgcagacatggccaggcctggtggacacaggaagcctacccaacacgctggtatttgggccaacactgagatgtggttcatggggg

SEQ ID NO: 187857 - DNA, 1246 bp, Homo Sapiens
ttggtcccttgccaacatcaatcctgatgctggatttgcggtgcagttgtcaattgaagaaagtttaacagatacttccttagtatgttttcaaacagccctattatatacatcaagcaaaggtgagcggagaattagagtacatacactttgtttgccagtggtaagttcactagcagatgtatatgcgggagtggatgtacaagctgccatctgccttctggcaaacatggctgtggatcggtccgtttcatcaagtctgtcagatgcaagagatgccttagtgaatgctgtagtggactcattgtctgcatatggctcaactgtctcaaatttacagcactctgcattgatggcgcccagctccctcaagttgtttcctctctatgttttggcccttctcaaacagaaagcatttagaacgggtacaagcacacggctggatgatcgtgtatatgccatgtgtcagataaagtctcagccacttgttcatctaatgaaaatgattcatcccaacttatacaggatagacagattgacagatgagggtgcagtacatgttaatgacaggattgtaccacagccacctcttcaaaaattgtctgcagagaagctgacaagagaaggtgctttccttatggactgtggctctgttttttacatttgggttgggaaaggctgtgacaataacttcatagaggatgtgcttggatatactaattttgcatcaataccacagaaaatgacacatcttccagagctagatacactttcatcagaaagagccagatccttcataacttggcttagagacagcagaccattaagtccaatccttcacatagtaaaagatgagagtcctgccaaagcagaattttttcagcatttgattgaagaccggacagaggctgcattttcttactatgaatttttgcttcatgttcagcagcagatttgtaagtgaagtagaataaaattgaataagaaaaagatctataacctaggtaaagcataatctgtcagagaagcgcgtgagaaatttgaaatgaaggcatttgttaatacaagatgcaacgcacagcactctgtctgaggctttggtaaaaagtaaaggggaagaaagaacttgacagatctttttcaactcaattaatggtaacgatgatgctgtttcaccaagtatattttgaattggtttctacacatttccagtagtatggcagtacagtgctctgttcattgcaag

SEQ ID NO: 187858 - DNA, 921 bp, Homo Sapiens
ctttaaaacagtagcatcttaacttgtggcacaaaaggcacccaacattccctttccaaaccatccatcaccatgggtggaaggcagcgccactgctggccatcatattatggctcacatacccataatttccttgcggtgctgaattccaagtggggattattagagacccctcagagccaaaaggggaccttagaggtcttctagatgagtcccctcatttgtaggtggtggtttctggataactcagagtggcagggacacagacgagcctgtggaaaggtatactgctttaagattgagaagaaaaccatttggcgctctaattttgcctggatggtgctctgtcagtcaaagaaagggaacaggtctggggagggggtaagggcaccctgagttcctgttccatcacttcccaggcagtagaaggctgtccaggaacagctcccatccgcagctgggcatgtgttggctcttacacaagagactttaattttacttgaagaactaagagctaaatcttgttaagtaaatacggggtttcaggggtgaaggactatcaagaaatcccaagttatcagcataaaagtagtcccaaagtaaaggcagtaattctcccaatggccttttctccctcatgcccccacagagactttcgagaggtcctagttagccagccacaccaacctgctgtgttcgcgtaagtagctgtgcctgtcccatggggtgaccactgcctggtcatgggaggggagccccagccccagctccctagccttttccaggagcagagcagaaagctctactttggggtgctacatcccacctggagaaagagctgcacattctagcctatgagggacccacccttttcacttgcttctccggggctggattgaggccaacttttttgtacaaagt

SEQ ID NO: 187859 - DNA, 1240 bp, Homo Sapiens
ccccagggctcagaggaggagagcatgggagtcagatcccagggctggcttcgggacaggacggttccgaggggatcggagaccaggggtctgcagaaggcccccaggaggatccactggcctctgtgttcggcataaaacgtgggatgtcccatgggtcagcagagcagtgtgtggagggcggggccagggcaggtacgaagatgtcagccaagtccaggatggaggactggctggtttttagcttctcctcctcctttctctcttctctctcaggctctctgtcccgctgatggtggaccacggcccctgcaccattggccatgggggagccatcaccctgccaggacctcacctccttctctgcctcctcacggctcatggcgagggccagctgcagctgcagttcctcttcccctgacgtctgaggccgggcctgctccaggtcggaggtatagcggggtgacgaagaggaggagttgtaggaggacggggagccccgggagcggctgtagtcctcgccgtagcggcggctgaagcccagctgcccactgccaatgccgatgccctccagtgccatgcgctccttggtcttgagggcgtgggttcgctcctgccgcagccgctcctcatccttgagcagggccatcacctgcttgaccttctcgcgcacgttgacgccctggtccttgccgtcgcggtcgatgtactggaagtccttgagtgtctggatggtgtagaggttctcgcggcactggtgggccacccgctcggagcccgtcttgagcaggtagtccagcaatgttagagccttgtacacgtgccgccagttcttgccgctgtcattgagccgccgccacagcatgcccatgacttcggtgaaggccactgtgttgaaggtcaggtcagcgatctcggacatgagcgaactaggggggccccaggggtcattgatggaggcctcgcgcaccttgatttctgcctcggagtagttgtgcacgatgttcttcacctggcgccggagtgcggaggtcgtcatggctggagacttggaggtgggtggccctcgcccccgccggaggtggagggctgagggccactgtggcgaggtcacagtctcgaaggatgggctgccgtgttagcagagcagctgcatccttgggttccacatggggctccatccacagatgggaaaggtggggctcagagtattaaatgggcccggtgcagtggctcacgc

SEQ ID NO: 187860 - DNA, 2334 bp, Homo Sapiens
  misc_feature (2102)..(2149): n is a, c, g, or t
gccaactttgtacaaaaaagttggctaatcaagacaccaactaaatcttttgcagtttatgctgccactgctacggagaaatcagaatggatgaatcatataaataaatgtgttactgatttactctccaaaagtgggaagacacccagtaatgaacatgctgctgtctgggttcctgactctgaggcaactgtatgtatgcgttgtcagaaagcaaaattcacacctgttaatcgtcgccaccattgccgcaaatgtggttttgttgtctgtgggccctgctctgaaaagagatttcttcttcccagccagtcctctaagcctgtgcggatttgtgacttctgctatgacctgctttctgctggggacatggccacatgccagcctgctagatcagactcttacagccagtcattgaagtctcctttaaatgatatgtctgatgatgatgacgatgatgatagcagtgactaaggacacatttgggagtatttaatcaggtgtggctatctgagaaatcaactttgggggaaatgtaagattctgagctctctctctgttttgttctagccatgaatttgcctgagaaacttgtaacctatgtgcctcaatatattccatagaaagtaggtccccctgccttctcccactcctcacactcttctacagggataggcttttgcaaatatatcagataaattttttgtttcttgtttatttttaggttattttcttggaaggttgggaaaagatgtttgttttaacaggtcatgtactacgttgttgttttcatttctgttataagtaaaactaaaagcacagaatggtgggaaaggggctataatgtggttcattaataatgttagcagcttttttctaaccatcctgtctaatggttaagacaccagtaacaaaaacacatgatttggaaatactttggctttttcatatacctagtggtgccttatcataatagcactgttacatgaaataagcccctaccttcttactttctggtttgttgaaaaaatacactggtgctctttgaagtgataaaatgagtgtttatgaatgggtgtaattaggaaatacttctcatctgacagctacaaataactaagtttggaggtattttcactctatatgaataaatatttttccataaaatagttgtgattatatttttgttttatataggtcccaaattataattgtcaaatatatattttaaattaataaaagttgtcattcttaggaatttggtttgaaatttatcagttatacagaattgtcatactgcattagcttctacctttagtaagacatattttttaggtataaattcttatgctttaacattatttctggattgaaaatcttataaaacccttgaaaataaacagtctcttttttacaaagcctgtgttagagcacagatttacctaggcttgaagatttggaagaaataatatgtaagaatggcctcaaggcagaccactttaagtttggctagacttcatatcgtggaagtattgtctatttcagtgtgaaactatcttgaatttgcaaatatagtgttatattttataaagttttgtaaaatcccaaacaatatttctatttttgtaaaacaattgtatgtataatctgtatttgaaatcattttgcaatctatggaaatagagtagcaattgctatttctaaattgtgaactttaagtcaatctagatttattttgagaagtaattgttcactctttacttttgaggcagccattaggttgaaagtatatatttatcatataaaacttgatgcgttttgcactactctttccatttatatgctgcaaacaactacagtctttgaaatatggaaaatcagcagtctaaagtttgttttaaattctaaatttaaaaatcttcaatctgaatataccgcaaatgtcatgagaagtttgattcattaacttgtgatggaggattctttggtatcttactgtttggttaaggcactaattttacttacctattatattttgaaagtatctgaaatatacaaatctccctgtaggaaatgtgaaagaaaagcacaacaaaactagnnnnnnnnnnnnnnnnnnnnnnnnnnnnnnnnnnnnnnnnnnnnnnnnaatatcaggtggatttttgtttctaaacaatatatacataaaatcaaccaacatatctgaaaaggatcatgaaacctgagaaatgctaatggagatttgctggtacataggaatctaacaaattcaggaaccaaggggaaatgttgtgagataacatttacattgtcaacctttattgactttgt

SEQ ID NO: 187861 - DNA, 1465 bp, Homo Sapiens
tcacagatgacacgaatcacctggatgtagagcgccaggggcgcggtggtcagcagaatcaccaatggctgcccagagaagaagcgcgtagagcaggccccccgatgctctgcccggctatggtcttctgcacgtcgatggccccgtctgtgttctcgtcattgagagacccgaaagcgatggtgggcaggaggcaggcgaagtagaggaacagggtggtggtgatgtatttgcccacagccttgtttttcccaataatgccatcagtgaagtccaaggggtacaaggggaacctgcgtgcgatgtcctcccggatgcccttcccaaaagggacaaagtccttgcactttgggggctctgggtgtctgtgggcagggagggagactgtgctgcgttccttcgttctcggcgccactggaccgtggctcaccatggtgagcagctgtctctgatgcaccaaggcctccttgaattcctcctctgtgcgggtctccaggagcttctggcggaaggcgatatccgagaacatggtggcaaacgtgcgcgccacctccatcgcagtcttagtgcttttcatcttgggtggggccagcaccaggatgacgaaccgaacctcacaggaattctccccccagttctgtgggcgaaccaggcggctgatgcacacgtgccgcttctgtagggccttcatggtacagatgatgcagagccacgactgctggtaccgcacccctgtcactgtggcggtgaccccttggatggtatctgacagcaggtggactttaccccgcatgggtgccccggcatcggtgaagagcatggccatgagcaggtccaggttgcagttgggctcattgttgtcagggtcccgggcgaagcggcgaagcatggtccgcagcacgttatccagggaggtggccgtctcgttcaggacgatgctggcctgcgccaggaagccatctaggtcgcggtgcgcacggatctcttccttgaagttctttaacttcaggtactttcgggaggtgtgcaggagcacacagccaccggaagtcgcttcattctcagtgttggtggcctgcatctcaaggttgacattgacaaaaaaacggatactctcgccagacacgatggaggagttggcagtgtcgaaggcctcatcccccaggatctcctctcgggcttcgaaggtgtcatctgtgtcacacttgtagtagcttgaatcctcgaagtatccattctgcgacatggtgggagagttttctgcaagggaagcagaaaggtcaccagccccatggaccaagccctggacctcctgtgtgcacctgtctccccgccccccgacctggctcattccttcgctcttccgagggatgcaacccacgccaccctagggagaaagggaagcaggggacagtgctcgggagggggcgcggcgcatagcagggccaacttttttgtacaaagt

SEQ ID NO: 187862 - DNA, 2446 bp, Homo Sapiens
  misc_feature (1801)..(1810): n is a, c, g, or t
ttggattcctgttggacagatagttactattaaaccactgagtgaagacttctgttatgttctgggataccttctcacttggaaattaatactaactttcttcaaagctgcatcatcacagcttcgggctttgtattccatgtatcttcggaaaacaaagagtttgaataaattgctctatcacctgttcaggcttatgccagaaaatccaacctatgcagagacagcagttgaggtcccaaataaggaccctaaaacattctttactgaggagctccagctgagtattagagaaacaacaatgcttccataccacattccacacttggcttgttcagtctatcatatgacattaaaagacttgcctgccatggttaggttgtggtggaatagcagtgagaagcgtgttttcaatattgtggatagatttacaagcaagtatgtcagcagtgttctttcttttcaagaaatatcttctgtacaaacaagtacacaactatttaatggcatgacggttaaagctcgagctactactcgagaggtaatggctacttatactattgaggacatagttattgaacttataatacaactgccttcaaattatccactgggttcaataatagtagaaagtgggaaaagagtaggagtagctgttcagcagtggcggaactggatgctgcagttaagcacttacctcacccatcagaatggaagtattatggaaggcttagctttatggaaaaataacgtagacaaacgttttgagggtgttgaagattgcatgatctgtttctcagtcattcacggtttcaactattcccttcccaaaaaagcctgtagaacatgcaagaaaaaattccattcagcctgcttgtacaaatggtttacatctagcaacaaatccacttgtccactgtgtcgtgagacgtttttctgagatttttttcactggaagggatccctgaagtacatcaaacaaaggcattggatttggatccgtctgaaagtgtggatgtggggaagccagtgagcattacttttaaataggaccttctctggaaaattattttggttaatgtaataatcctaaaatcaggtttacttaactttagattgctttgtaaatgtttggaaactttcttttacaaaagaatattacatatttgagagaaaatatttctattaatggtttaatttctttgtatatttaaaaataaatatgaaaaacccctaaattacagaattggaatttgtgaaaagattgcacaactatattattgataaacccattccgtttgttgatctgtgttttagaatagtccaagtgaagcaaaacgaactgagagagctgatttacatctatagatattttaagccttatttattagttatgacaataaattagtattctgatatttgtagattattttaatgataaaaatgacactaagctattaatacggcttgtcttaagatatctggaggcatgctctgaaatcctatataaaagagtttaaactgaactttaaggtgcctccatttatcaagggttatgaaactcagaaaattaaattcttgatgctgacctttttgcttgtgggagaattatttctatatattagtgaaatttgaattgtaaacttgtcagtgaatttatcactctgagcgagtctctagagggtgagaatttgagagaaatagtaatttgattatttcattcatgaagcggagtggtagttatccttctattgagagggaagaaataaatgagtattactgaaacttaaagatcagtggnnnnnnnnnncatttaaaaatgttgtaggagactttcaattttggaagcaaactgagctattcttaccagccaaagttatactaaataagagacttgggggagcaaatgtttttcagccttcagaaatgaaagttaaggattttagcactaggtaaaattcagtataataggctgaagtggagtaagtgaaaacctgccttttgccactcttaaaaattgtgcccaaaatataaaagtgtggaactttagaacttggaataattttattgcagtcttccattacatggaaatagcatatctaatatctaggttacttgagagaccagctaatcatctctgttgcacatgtttaattggcaaaaagcaattcatgataaataaaattactgctttccatctactgggtaaaatgactattgaaatagtatgaatgtggtcagaggattatagttgagagtgaagtactatgtgtgagttatagatctctcgaattatatttatagatgcagtgtcctgcccagttttgtttgcctcctacatttttactgtaaaaatatttattgtcttctagcccttgagcctctgaggtcagtaagtgaggtacagatagcaaaatttactaccttcgttacccttttcttaaaa

SEQ ID NO: 187863 - DNA, 1194 bp, Homo Sapiens
actttgtacaaaaaagttggaattaaatgtctttacaagaagcagtgaaggcactggtcttaagtgagaatatttgcctgggagtagagataaagacacaaaccgaatgtgaaataccaggtaataattattttgcattaaactctttttatcgggaatagtatgatattttcaatgtcactccattcatgttgatttggagctgacagttattttgtgtaagcagagatttaattttatattgaaagtcagtgcaaaattatgaataggatatactaataaatacaaagtaataacaaaagtcaaagcagtgttctaaataaaaattctgggttccttaaaaattattttaaatttatctttgaaatagttttcttagattaatctcaggatatgagaaagtcaattaagtgtgagtaaagttagtatcattaaacaaattgtctattaaatgcaagacgtggtaatatacagaatttatcaggcattaccaagtctaggcacatataggaaatgcagcactcagaatggtttcaatgtagtagttgatgcttgtaaggtaggggagcttattcagacatagtagatagtttctctaatgctgtctcaattgctggcctttggctacctgtacttccccattatggcagcccattcagtcttgagttttcttctctggacaccttatgctctgaaatcatgagcgaggctgattcaattggtgatttgggtagaaagcagtatgttttgctgacattaagatgtaggttatagataggtttagcctttaagtgtatgtttttatactttaaaataagaaatataaccttttaagctattccacctcctcccccagcctatctcaaactggtggaatatatggagagatcttgaaagaggtaaaataaaccttcactgctccactccaggtgaatccgcccactcccactgacctagtaaaaatttgtaatttaatacttaccttctatttctgaaatcagttgtgaactgttgcctatgttcagaggtttaagaacctcagtgaattcattttttaaaatctgctattctgagaagcattgaatgaattcttaacaggaagactcatctgtagctgtttgctgactcctatgagcccataagggttctgtgcttagcattacaaaataaggtttataggtaagccaatgtatt

SEQ ID NO: 187864 - DNA, 1662 bp, Homo Sapiens
ttggcttgaattagcagagaagttctggtatgacatggcagctctcctgaccaccatcaaagacacccaggatattgtccatgacttggaaagcccaggcattgatccttccatcatcaaacaacaggttgaagctgctgagactattaaggaagagacagatggtctgcatgaagagctggagtttattcggatccttggagcagatttgatttttgcctgtggagaaactgagaagcctgaagtgaggaagagcattgatgagatgaataatgcttgggagaacttaaacaaaacatggaaagagaggctagaaaaacttgaggatgctatgcaagctgctgtgcagtatcaggacactcttcaggctatgtttgactggctagataacactgtgattaaactctgcaccatgccccctgttggcactgacctcaatactgttaaagatcagttaaatgaaatgaaggagttcaaagtagaagtttaccaacagcaaattgagatggagaagcttaatcaccagggtgaactgatgttaaagaaagctactgatgagacggacagagacattatacgagaaccactgacagaactcaaacacctctgggagaacctgggtgagaaaattgcccaccgacagcacaaactagaaggggctctgttggcccttggtcagttccagcatgccttagaggaactaatgagttggctgactcataccgaagagttgttagatgctcagagaccaataagtggagacccaaaagtcattgaagttgagctcgcaaagcaccatgtcctaaaaaatgatgttttggctcatcaagccacagtggaaacagtcaacaaagctggcaatgagcttcttgaatccagtgctggagatgatgccagcagcttaaggagccgtttggaaaccatgaaccaatgctgggagtcagtgttacagaaaacagaggagagggagcagcagcttcagtcaactctgcagcaggcccagggcttccacagtgaaattgaagatttcctcttggaacttactagaatggagagccagctttctgcatctaagcccacaggaggacttcctgaaactgctagggaacagcttgatacacatatggaactctattcccagctgaaagccaaggaagagacttataatcaactacttgacaagggcagactcatgcttctaagccgtgacgactctgggtctggctccaagacagaacagagtgtagcacttttggagcagaagtggcatgtggtcagcagtaagatggaagaaagaaagtcaaagctggaagaggccctcaacttggcaacagaattccagaattccctacaagaatttatcaactggctcactctagcagagcagagtttaaacatcgcttctccaccaagcctgattctaaatactgtcctttcccagatagaagagcacaaggtttttgctaatgaagtaaatgctcatcgagaccagatcattgagctggatcaaactgggaatcaattaaagttccttagccaaaagcaggatgttgttctgatcaagaatttgttggtgagcgtgcagtctcgatgggagaaattgtccagcgatctattgaagagggcgatcactagatgatgccaggaagcgggcaaacaatt

SEQ ID NO: 187865 - DNA, 890 bp, Homo Sapiens
gcttgtactttttcagttcccaaggagcttctcttgttcccgagtcagggccttcactgtgtctctaagcctgtccagctccacttcttcgtcagcactttctcactgatggtctggatgtcatcctctagctccaggatgcgtgccacatggtctccctgttgccggctcaggatgtccctctcttctgtgatctccccatgggaccgggaaatccccttgtactgttccatcagctccgtgtgctcctgcctggcagttgccagagccctctcgagctcctgcactcggctcctcagctctgtcacctgtccctccagctgtagcttcagctgcatcaggtcattccgttcttgctggctctcatcgagctggttctgtaacacagttgccttggggacaaccagcaggatgtcagagcccccatcagcctcctccagggtcaccagttcatccatgggccttggctctcggaactggaaaggggggctctgcccacacacctggccctggcggttcacatatcggaactggtagagctgagctcctggtttgggcaggtagctggcttggaactggacactggtgtgaatgggggaaccatcagttgtactttcaggcacggaagaccacacaaatgtgtggtaatcccgaacacaggcagcctccaccttgaagatgccaatccagtcactggcactgggcatggtgcctgggggaagggtgtagtgacattccaccttggtgttggggatgtaggtccgggctacattgagaaagttgactccaccacgggatggtgcccggcttagtggtgattcttccatcctggccttgagatatctgtcctcccaacagacggatcagctgttcccctcacctttcaccaa

SEQ ID NO: 187866 - DNA, 1046 bp, Homo Sapiens
ttggctcttccgctcctctcacagccgccagacccgcctgctgagccccatggcccgcgctgctctctccgccgcccccagcaatccccggctcctgcgagtggcactgctgctcctgctcctggtagccgctggccggcgcgcagcaggagcgtccgtggccactgaactgcgctgccagtgcttgcagaccctgcagggaattcaccccaagaacatccaaagtgtgaacgtgaagtcccccggaccccactgcgcccaaaccgaagtcatagccacactcaagaatgggcggaaagcttgcctcaatcctgcatcccccatagttaagaaaatcatcgaaaagatgctgaacagtgacaaatccaactgaccagaagggaggaggaagctcactggtggctgttcctgaaggaggccctgcccttataggaacagaagaggaaagagagacacagctgcagaggccacctggattgtgcctaatgtgtttgagcatcgcttaggagaagtcttctatttatttatttattcattagttttgaagattctatgttaatattttaggtgtaaaataattaagggtatgattaactctacctgcacactgtcctattatattcattctttttgaaatgtcaaccccaagttagttcaatctggattcatatttaatttgaaggtagaatgttttcaaatgttctccagtcattatgttaatatttctgaggagcctgcaacatgccagccactgtgatagaggctggcggatccaagcaaatggccaatgagatcattgtgaaggcaggggaatgtatgtgcacatctgttttgtaactgtttagatgaatgtcagttgttatttattgaaatgatttcacagtgtgtggtcaacatttctcatgttgaaactttaagaactaaaatgttctaaatatcccttggacattttatgtctttcttgtaaggcatactgccttgtttaatggtaattttaaagtgtttctggcttagaacaaaggggcttaattattgatgttttcata

SEQ ID NO: 187867 - DNA, 946 bp, Homo Sapiens
ttggagagcctgctacggtggactgtgagactcagtgcactgtcctcctcccagcgaccccacgctggaccccctgccggaccctccacccttcggcccccaagcttcccaggggcttcctttggactggactgtccctgctcatccattctcctgccacccccagacctcctcagctccaggttgccacctcctctcgccagagtgatgaggtcccggcttctgctctccgtggcccatctgcccacaattcgggagaccacggaggagatgctgcttgggggtcctggacaggagcccccaccctctcctagcctggatgactacgtgaggtctatatctcgactggcacagcccacctctgtgctagacaaggccacggcccagggccaacccaggccaccccacaggccagcccaggcctgccggaagggccgccctgctgtgtccctgcgagacatcaccgcacgtttcagtggccagcagcccacactgcccatggctgatactgtggaccccctggactggctttttggggagtcccaggaaaagcagccaagccagagggacctgccaaggaggactggcccctctgctggcctctggggtccacatagacagatggacagcagcaagcccatgggggcccccagagggaggctctgtgaagccaggatgcctgggcattccctggcaagaccaccgcaggatgggcagcagagctctgacctaagaagctggacttttgggcagtctgcccaagccatggcctcccgccaccgcccccccccagcagtgtcctcagaacactctactcgcacctcccggtgatccatgaactctgacccctccccagtaaaggcttctgtagagagcatgctggggtctgcatctcctctcgtctcctccatggtggtcactgcccctggcaggtctcctgaaaagg

SEQ ID NO: 187868 - DNA, 1536 bp, Homo Sapiens
  misc_feature (329)..(341): n is a, c, g, or t
  misc_feature (838)..(847): n is a, c, g, or t
  misc_feature (1130)..(1138): n is a, c, g, or t
ttggattaattttccaaggtccaattgactgacgcccttgacagccatctacgactttattaacaggttactgtgaagattttgccactaactctagattttacctttttgtaatgctgtttatcagaggagggtgacaggggctggaaataaagagaggggacatggtgatgaaacatggcaggagtgtaacagataccagtggtgtgttgcatgctcaaaacagcagcgtcgtcattgaagtctgcttgattaaaccataatatctttgtaataattggatttaaaatgctatgcttctatttttaaccttgggtttttaaccaagnnnnnnnnnnnnngtaatcttggacaagactttaaatcatattttacagatgtagaagaaatttattcaaaagtgtgggctcatgaagttcacttcagtgcagtgtggtgtaggtgttacgcgaagggcgcacagtgtctagaaatacttgatcgtggctcaaacctgaccagacagcagaggggcggctctgtacagtgtgactggtggacagatggccttaggcacaggtggttttgaaatctggggctttttctgatttatttttctgacttgtagtaaattcagcttaaatataagttgaaatttgggaaataatttccaagctcttggaaggggtaacagtgaaccgccctccatgggctccacatcttttcctttggcttccaaagtcaggtcccgcccaccctgcctaaggaactgcagagaggtggcaaatcagcaaaaaggacaccaggctcttcttggccacttgtaggaagatccctttacaattttgactaaggagannnnnnnnnncacagttgagttagtttgtgaaaataaagaactctgtagctcaccaaggtggagaaacgcaattcagaaaagtaatttctccaaggtcacttctttttttatgtcttgccatcactttaaaggactagccccactcccccatgtgtatacacaaggaaattgcagaccaattagttgtcttggcctgactctaatgccttttgcaagtagctttccagaagtaaaagtcccagtgatgtattcccatagaaatatttttcagttgtttatgtcgtttactacnnnnnnnnngattcagagtggatggagtacaactctgagtatttttctagtccggaattttttattaataatcggtgctgccgggtcatgcatgctgcaactctcaacatttcccttatttggttcagcttttagcaaaaagggctacagttcaccctgcagagtattaaggtttctggatttttttctcccaactgtggcccaaaagaattaaaatctgttaatataaatagagaacatatttatcattcctcgatagttaattatagactttggtacctttgtgcctcagggaagccacgtgatataactggttatagaatttcagggttagggtttaaagaaaggagaaagccattggaaaaatgatgggctccattaagagactaatgaatctggatgcagaa

SEQ ID NO: 187869 - DNA, 1486 bp, Homo Sapiens
  misc_feature (56)..(65): n is a, c, g, or t
  misc_feature (348)..(356): n is a, c, g, or t
  misc_feature (890)..(903): n is a, c, g, or t
ttggctcttcttggccacttgtaggaagatccctttacaattttgactaaggagannnnnnnnnncacagttgagttagtttgtgaaaataaagaactctgtagctcaccaaggtggagaaacgcaattcagaaaagtaatttctccaaggtcacttctttttttatgtcttgccatcactttaaaggactagccccactcccccatgtgtatacacaaggaaattgcagaccaattagttgtcttggcctgactctaatgccttttgcaagtagctttccagaagtaaaagtcccagtgatgtattcccatagaaatatttttcagttgtttatgtcgtttactacnnnnnnnnngattcagagtggatggagtacaactctgagtatttttctagtccggaattttttattaataatcggtgctgccgggtcatgcatgctgcaactctcaacatttcccttatttggttcagcttttagcaaaaagggctacagttcaccctgcagagtattaaggtttctggatttttttctcccaactgtggcccaaaagaattaaaatctgttaatataaatagagaacatatttatcattcctcgatagttaattatagactttggctttgtgcctcagggaagccacgtgatataactggttatagaatttcagggttagggtttaaagaaaggagaaagccattggaaaaatgatgggctccattaaggagactaatgaatctggatgcagaaatatgtcagaaactggcataaacatgattgtagtagaatttattttccagtaccaatagggaaattattttaagttattacatttactgtattgggaaacttgaggagaactctttagttcataaagcttcaatgtcnnnnnnnnnnnnnncatggaaaaactcaaacctctgttatttgggagctcagtattgtgtggacacttacgagagttttctgcttaattgaagtgtaatataggttgtagaattgttacctgcagttctatggttttgtttcacttcttttcttttttaaagccattctgttctttggatgtgcttgaaagggtgtgtgattacaccattgttaatgctgggtaaaaactatcttcttgcagccttgcctcataacagtggaatttctgatagacaaaccacaggactttgattttaagccaaatccatctccatccctttactgtcaatcttctgtcccagtagtttagcctttgtggcttaggttatgatgcgcctccttctgtgcgaccaatgagacgacttcagcatctttttaaaataatctaagcatcattgaagcagtaacacaaaaaaaaggttcagtattttctttttagtataacttacatcctttcaaataagtctttgccctcatgaaagatccctagagggaagataaggaaaataagtattttccagttttgcttgacagtttctaaacaaacaaaaataaac

SEQ ID NO: 187870 - DNA, 971 bp, Homo Sapiens
  misc_feature (120)..(133): n is a, c, g, or t
ttggcatgattgtagtagaatttattttccagtaccaatagggaaattattttaagttattacatttactgtattgggaaacttgaggagaactctttagttcataaagcttcaatgtcnnnnnnnnnnnnnncatggaaaaactcaaacctctgttatttgggagctcagtattgtgtggacacttacgagagttttctgcttaattgaagtgtaatataggttgtaaaattgttacctgcagttctatggttttgtttcacttcttttcttttttaaagccattctgttctttggatgtgcttgaaagggggtgtgattacaccattgttaatgctgggtaaaaactatcttcttgcagccttgcctcataacagtggaatttctgatagacaaaccacaggactttgattttaagccaaatccatctccatccctttactgtcaatcttctgtcccagtagtttagcctttgtggcttaggttatgatgcgcctccttctgtgcgaccaatgagacgacttcagcatctttttaaaataatctaagcatcattgaagcagtaacacaaaaaaaaggttcagtattttctttttagtataacttacatcctttcaaataagtctttgccctcatgaagaatccctagaggaagataaggaaaataagtattttccagttttgcttgacagtttctaaacaaacaaaaataaactcaatgaaaggaaagatgtttctttttagctgagatgacagattgcttctctgtattaaatagtctagaagttaaggggatgggtcacatttaccatgtattgtgttattagcagttaaattttatgaatatgtttgtaaaattgttgttttatatttcatgtcaaattgaaaagtttatttcttcactattgtacctgtggaaatacaagccattttacaggaaaaaatcttcaaaaactattaaatggatatca

SEQ ID NO: 187871 - DNA, 906 bp, Homo Sapiens
ttggctcttgatggttaggaaaaaaatagtaaagccaagtatgtttgtacagtatgttttacatgtatttaaagtagcatcccatcccaacttcctttaattattgcttgtcttaaaataatgaacactacagatagaaaatatgatatattgctgttatcaatcatttctagattataaactgactaaacttacatcagggaaaaattggtatttatgccccaaaaaaatgtttttgtccttgtgagtccatctaacatcataattaatcatgtggctgtgaaattcacagtaatatggttcccgatgaacaagtttacccagcctgctttgctttactgcatgaatgaaactgatggttcaatttcagaagtaatgattaacagttatgtggtcacatgatgtgcatagagatagctacagtgtaataatttacactattttgtgctccaaacaaaacaaaaatctgtgtaactgtaaaacattgaatgaaactattttacctgaactagattttatctgaaagtaggtagaatttttgctatgctgtaatttgttgtatattctggtatttgaggtgagatggctgctcttttattaatgagacatgaattgtgtctcaacagaaactaaatgaacatttcagaataaattattgctgtatgtaaactgttactgaaattggtatttgtttgaagggtcttgtttcacatttgtattaataattgtttaaaatgcctcttttaaaagcttatataaaattttttcttcagcttctatgcattaagagtaaaattcctctttactgtaataaaaacaaattgaagaagactgttgccactttaaccattccatgcgttgggcactttatctattcctgaaatttcttttatgtgatttagctca

SEQ ID NO: 187872 - DNA, 1950 bp, Homo Sapiens
  misc_feature (1079)..(1088): n is a, c, g, or t
  misc_feature (1345)..(1389): n is a, c, g, or t
ttggatcttatcaaacaatcttctaaagaagcttccccatggtcttggaaaccttaggaagttaagagagttggatctagaagagaacaaattggaatccttgccaaatgaaattgcatatcttaaggatttacagaaattagtcttgacaaacaaccagttgaccactcttcccagaggcattggtcaccttactaatctcacacatctgggccttggagagaacctacttactcaccttcctgaagaaattggtacactggagaacctagaagaactgtatttgaatgacaaccccaacctgcatagccttccctttgagctggcactctgcagcaagctttcaatcatgagtattgagaactgtccactcagtcaccttccacctcagattgttgctggggggccttctttcatcattcagttcttaaagatgcagggtccatatcgtgccatggtctgatataaatctgctggtcccacacactgttcaaaaatagactgccattaatgtttcttatctatatctgtatctatttatgtagatattggtatatggcagatttataaaaattgcattatgtgtttctgctaatagaggaatcatagccatttagaattttttttaaattctgtacaaaaggcttatataagttttctttgctgaatttgatggatgtttttctgttgtgtaatctgatatgccagtttgcttaaaacatttgccaacacattatgaagttattaaatttaagggacagaggtagtatagttagatatactttctcttaggaaaaataatgggcaaaaatttttgttgcaacttttcatatatattttccccttaccaattgttttatccttatagtattgtaggccctgaaagtagaatttttctttaacttattttgagatttgagatttaaattttatgtattgtttacagtcagagtaaatcactggatttcttttgtttgttttgatttgctctgttttattcagtcaaatctagagtttgaatcctctgctaaagaatttgcatccactggtgtaaacagtgaaaggtatttgcttgttgnnnnnnnnnnctggcaaagtgaaaagatacagtcaaaaatctagaatttctttaattttgcttctctgacgagttgtgaagcaaaatacctgaagtgagtctttgggtaggggaagggtattgagaccttttctagtatgaatattttttaagtttgggggaagagaaacttgcagtgaaaaggagttttttcattcctgaaagttgcagatccacaaaactaacaggataattgggcaaataaattacatataaacacacacaatnnnnnnnnnnnnnnnnnnnnnnnnnnnnnnnnnnnnnnnnnnnnncataaactacagtaggtaactttaaggatttcttcctatccttgtacaatgacatgaatgtctttctttgaaaactgcaatgtatgtatgtttcaaggttatttaacagtgtactatggttttatatcttgacttgccttgtacatctttcaattctggaatatctgtgtctaagcacaatatcttcacactgtgctgtattgctgctgaactaaatgcacttttccccacatatggggcactggcttcaaacaattcagttcagtatcattacttttaatctcatctttcctttcttggtagttgttaatacagttatggaaaagaggcacattgcatagaagccattggggagttcagtggaagttctgtaagatgtgcatgtactatttgatgcgttttctttgcttcactgcttttaatacttagcagtattgttggtctaagtcaatttgattattgaggagtctcagagcaaggtgcgttctagatgtcatcctaaaaaacacttcatatataattaatcactattttgtataattacatattgctgcgtgtgtg

SEQ ID NO: 187873 - DNA, 1053 bp, Homo Sapiens
  misc_feature (1020)..(1032): n is a, c, g, or t
cctataaaagccaactttgtacaaaaaagttggattatattggtgtaggtaacaggacatatgtaaaaactatcatctttgcagattactctgcctccaaatgcagggcctttcagagatgcattgtgattgtaattactgagttgaagctccaaccaatttgaatttgtttcttaaccttgaaaaatcattaaagccaaggtattaaaacctttgtgcattaataccttctaggggtttggttcatttggtttttgtcatgtgcaaggaaggacaatagtcctctttccaagtgtgttagcatagacttctctatatgtttctactagacctaggggatgacgtcttttaataatactggccctaaacatgtaaataatcttgtaggtgagactttttcttttgtgtttcggaaatttcctatgtggctttcagttgtctgtttgtatagcctggatttttttgaggtaaatgaaactttctcatttgtatatttggcttgatatggtcttaatattatctttccacgaaatggatatatttctagaaaatatatatttactaccataatttctaccaccacccccattttgctctgcattatacacagtagagaagaactgaagacactgctgtgacagtattgcagtccaaggcatcatgtgctcttggtgggatactctgattatcagcatcaacagtactttactgagcaagactttgaaggcctgagaagagagcaaagttatggaaagtatttaactcttattttatattgaacaaacaaggtttaatcatgtcatacatttttggttttctaagcagagactaatacaaatgcagccacataaaggcagtgtactgggggtgggagggaaggaaacaatcacataaaatcagctgactcaaaattgaggatagttaataggttgaaagggaaaaagtatgttgaaaatttagacataaatgaaccaagaatattccttatctggtgatgattaaagttaggaaaacatacannnnnnnnnnnnnaattagtagctgctatcagag

SEQ ID NO: 187874 - DNA, 2115 bp, Homo Sapiens
ttggaagagattttaaagaatgtggagtcttccagaactgttcagccacatttcctagaatttttgctttcccttggctggtcagtagatgtgggcagacaccctggttggactgggcatgtttctaccagttggtctattaattgttgtgatgatggtgaaggatctcaacaagaagtgatttcctctgaagatattggagctagcattttcaatggacagaagaaggtgctgtattatgctgatgcccttacagaaattgcttttgtggttccttctcctgtggagtccttaactgattcattggaaagtaacatctcggaccaagatagtgattcaaatatggatcttatgccaggaattctgaaacagccatccctgacacttgagcttttccccaatcatacagacaatcttaattcctcacagaggctcagtcccagttccagaatgaggaagctgcctcagggtcgccctgttcctccccttggacctgagacaagagtttctgtagtctgggtggaacgctatgatgatatagaaaactttcccctctcagagctgatgacagagatcagtactggtgtggaaactactgcaaatagtagcacttcactgagatctacaactcttgaaaaagaagttcctgtcatcttcatccaccctttaaacactggattattccggataaaaattcaaggagccactggaaaatttaatatggtcatccctcttgtggatgggatgattgtcagcaggcgagctcttggctttctggtgaggcagactgtaattaacatttgtagaagaaagagactggaaagtgactcctacagtcccccccatgtccgccggaaacagaaaatcaccgacattgtcaacaagtaccggaacaagcagctggagccagagttttatacttcacttttccaggaggttggactcaagaactgcagttcttagaccactgaatttctaagactgttgaactccagtttgggaactataacacagcagaacagtttgataggtgatcactgtaaaaataaaaacaaatcactcccaagagcttactgtttaatcaccagaatagaagaaacacattataacccatttgatagaagactttgggctatctagtgaaatgggctcccagacacaatcatactcctgctgataatgatgatatacattttagccataaactttcttttaaaagtgacaattttagttaaacataagccttttgaggagaaaggcttttatgcatctcagttaaacacgtgcattggtagtatcaacaaatttgcaatatagaagttgaagatagttttttacctcactttttaggaggttgtattcaaaattaaaatctcagaatcttacaggacatttaaagactcatgttgatagcatggaggagaaggaaagaagtcacagccttctactcagttgtaggtcttcttgtcatccagctgtcacactgacaaaaagaaaagatgatacatgttttttgctcagataagaagcctgacattaaaagatgtcatatttttttctccacatttcaaaaagttgtccttctcatcactgcacagatctgtctgaaagcctcagtttctgagtgacccaggaacagatcagaaatggagcatggccttgtcctttaatggggatgcaaataaagtttgtggggttaaaagttataagacagcagtgataccccactctctccattattgtccagcggggtgacataatgacaggttaaatatttgtgattcattgattaaatattatttaaagaaatgtaaattcacaataagggttgaaaattatttggtttcatccattgtctcttatttcaggaccaagcagcaaactgcagtagtttgtgaaggattctaatatggggttcaggaatagcctctcaacgctactaattcagatctctcccagagaactactggatttcctcataattgacaaacatgagtgaccacctctttgggtggctactgttagaaatggctgttgtcatgttttctggactttgccagccaacagatccctgccaggttttggaaatacttctattacctcgctgctactttt

SEQ ID NO: 187875 - DNA, 1363 bp, Homo Sapiens
ttggggaagcgtgaaccgggtcctttccctttccgtccatcccagaccccgacttgctccgacacagccgctaggtcccagggagaaatcagctagtgattcccactttccgccctgtatcttgttcttcccccgcttgtttttgtgttcttgccccatgcctgatttctcgtcccccacccagggagcgagtcaaggccatgttctaccacgcctacgacagctacctggagaatgcctttcccttcgatgagctgcgacctctcacctgtgacgggcacgacacctggggcagtttttctctgactctaattgatgcactggacaccttgctgattttggggaatgtctcagaattccaaagagtggttgaagtgctccaggacagcgtggactttgatattgatgtgaacgcctctgtgtttgaaacaaacattcgagtggtaggaggactcctgtctgctcatctgctctccaagaaggctggggtggaagtagaggctggatggccctgttccgggcctctcctgagaatggctgaggaggcggcccgaaaactcctcccaggtcggcaaccacattgatgtgctcactggcaagtgggtggcccaggacgcaggcatcggggctggcgtggactcctactttgagtacttggtgaaaggagccatcctgcttcaggataagaagctcatggccatgttcctagagtataacaaagccatccggaactacacccgcttcgatgactggtacctgtgggttcagatgtacaaggggactgtgtccatgccagtcttccagtccttggaggcctactggcctggtcttcagagcctcattggagacattgacaatgccatgaggaccttcctcaactactacactgtatggaagcagtttggggggctcccggaattctacaacattcctcagggatacacagtggagaagcgagagggctacccacttcggccagaacttattgaaagcgcaatgtacctctaccgtgccacgggggatcccaccctcctagaactcggaagagatgctgtggaatccattgaaaaaatcagcaaggtggagtgcggatttgcaacaatcaaagatctgcgagaccacaagctggacaaccgcatggagtcgttcttcctggccgagactgtgaaatacctctacctcctgtttgacccaaccaacttcatccacaacaatgggtccaccttcgacgcggtgatcaccccctatggggagtgcatcctgggggctggggggtacatcttcaacacagaagctcaccccatcgaccctgccgccctgcactgctgccagaggctgaaggaagaaccagtgggaggtggag

SEQ ID NO: 187876 - DNA, 1547 bp, Homo Sapiens
tttgccctttctctctttccaccaaagtgacaaggagctgcacggtgtcattgcaaggtcctgctcactactccagactgagaggttactgatgactttttgtaagaggtagccaattatccactgagaaccctctgtatctgctccgaacgctgtactgaatggcagacttatctgatcatacagtttttcatccaccaggagataagtctttgcccagcgttttaaaaaccaaacaatatctttgcccatctggggacttagtagatgagtgagatctgctcttattgctcgagattcaacttctgaaactctgagaatggcagacaacagcctaatcacagaatctgttctgttgtaccctgggatggaagaagccttttctcctggagatcccaaaatttgaagtgttgtattaatgtcaacttcagatgaatgcttaatggaatattccattatttctggaggtattagcggagtctctccctgagtatcatcagctaagaggtagcctgtaactaaaataagccagtgaatatcttcatagagatcatcaagcattttgttgtcaacagtgcttgaacccggtgaagcaagtaactgttgctgatgtcgttgtaactgaccatggagtcttgttactctttcttctaataaacttgtcagaagaggtatacagtgttctgcagcaattcttcctagcattcctacactggccagttgatcagaaaactggtctcgatcatcctcttgaagttcacttatttcttcctcctcacgagaggccacaccattggcagtcaaatttcttgtgccatctggagcagctaggtggcactgaatataggaattgaaaacttgaactgcatgttgggtaaaaaagcctttatggaaatgtttgtcatcttgaaccaaagttaaccaggactccaacaatttatcatatgcttccatgtataccatgtcatctttatcaagcacttcttccaatgcagcacttcgcccaaaagaacaagtgaggtgtgtgaggcagttaacaaaggaggagaaaagttcacttggaatggcagttaaaacatttcgtgggaacacggttatcaggttgctgataatgctggagatccccacagcttcagaatcttctatttcaattccattgatagtattcagtaatccctcaatgaagtgtgctagataatcaacttgtgatccttcatctgggaagatgggtccatgaagagaagctaactgggcaaggcactgcagagaatcttgtgccatatctgaatcttctctgatttttcgatgtactgtgaagaaaagctccataactctgctgtccagaagagtctcccgccaggactctgttggcttcaacagcacattttgcgaggattcaaacatagctatataatgtctgcccaaatttggaggaagaaagttccagctcaagacttgattggcgagtgcaaggtaacgctgaaatactgaagacatctgagcattgaggttttcccgcctgctgaactcctgcagaacttcaccaa

SEQ ID NO: 187877 - DNA, 1058 bp, Homo Sapiens
tattaatgctggagtgtagagaatatcattaaatatatcaaaaatatatctttaagcctagaaaatggatgcctttggattacttcatttcagggtagagaaaagcccttctactgaattaggctctgaacatgtgatttctttccctaacactagtttttccaatctactaatttatttataaacaaagcaaagtaagagatatttttgctgttactttggcaattctctctctccaatccccaacatcccgagttcagtgcacatctaacaattcactcaagactaggcacctgacaataagtgtttacttagtgtgtaaagtgaacaagaaaagcagcataataaaggagctgtgtttttatcagaggagccttccttctgagtttttacataagttgatgccttcactgcaactttgaatacaatgctttgaattttgaaacacttgaataaaatgtttgaatgctttgaataaaattcctcctctttcagagtaaaccttattttagtcaccagcatttccttccatagcacataaatatgttcaaaatgtacattgacatatatttgtaaccacatagtgtaaactaagttttaatcctttgcatggcaggaaaatgctggtattctgacaccaatatcttttgatgtgaacaagaggcctaaaatatcagtctagtgaaactgctaaccaccatcttcacactcactccctttcttattcttatcaaaaacagatggaaaactgaggcttatttcttcaggatttgatataaactcaggagttattctacattaaaaaataaggagctggccatctgttaactcctgtagtcttgcactaagttctcctgggtcacagaaacaagctccattcctcattggatcagtgttctgattaaggagttttcgttgctgtcgtttgttttggaggaaacaagggttcacacacaaacattcaggaagcagcactggtgcagacccactttgatcccgtaaagtgtcctgagtgtccctcttcacatggccacttcttttgccaggttctttgccaa

SEQ ID NO: 187878 - DNA, 896 bp, Homo Sapiens
atggccaactttgtacaaaaaagttggacaagattctctttttgtgcggtggcaactttggctttgttggggaagcttgatgctattaatgtggaaaaggcaatcgaatttgttttatcctgtatgaactttgacggtggatttggttgcagaccaggttctgaatcccatgctgggcagatctattgttgcacaggatttctggctattacaagtcagttgcatcaagtaaattctgatttacttggctggtggctttgtgaacgacaattaccctcaggcgggctcaatggaaggccggagaagttaccagatgtatgctactcatggtgggtcctggcttccctaaagataattggaagacttcattggattgatagagagaaactgcgtaatttcattttagcatgtcaagatgaagaaacggggggatttgcagacaggccaggagatatggtggatccttttcataccttatttggaattgctggattgtcacttttgggagaagaacagattaaacctgttaatcctgtcttttgcatgcctgaagaagtgcttcagagagtgaatgttcagcctgagctagtgagctagattcattgaattgaaagttgcatagtatagttttgccattttaacatttctgtatttgaagtgcttatcgaatctaaaagtgactactgttaatattttgtatattgtgttaaattaattttaataaattatataattatacatattgtaaaataaagaccggtattttattttctgctttttattctgaagtcctgttattctgactacagttctttgtgtatacttctgtgtctgttatgttcaataactgagctaacataaaataactctaaggtttcctacttgatttttccccc

SEQ ID NO: 187879 - DNA, 1288 bp, Homo Sapiens
ctttgtacaaaaaagttggcagaaggatgttattatcaagtcagatgcaccggacactttgttattggagaaacatgcagattatatcgcatcctatggctcaaagaaagatgattatgaatactgtatgtctgagtatttgagaatgagtggcatctattggggtctgacagtaatggatctcatgggacaacttcatcgcatgaatagagaagagattctggcatttattaagtcttgccaacatgaatgtggtggaataagtgctagtatcggacatgatcctcatcttttatacactcttagtgctgtccagattcttacgctgtatgacagtattaatgttattgacgtaaataaagttgtggaatatgttaaaggtctacagaaagaagatggttcttttgctggagatatttggggagaaattgacacaagattctctttttgtgcggtggcaactttggctttgttggggaagcttgatgctattaatgtggaaaaggcaatcgaatttgttttatcctgtatgaactttgacggtggatttggttgcagaccaggttctgaatcccatgctgggcagatctattgttgcacaggatttctggctattacaagtcagttgcatcaagtaaattctgatttacttggctggtggctttgtgaacgacaattaccctcaggcgggctcaatggaaggccggagaagttaccagatgtatgctactcatggtgggtcctggcttccctaaagataattggaagacttcattggattgatagagagaaactgcgtaatttcattttagcatgtcaagatgaagaaacggggggatttgcagacaggccaggagatatggtggatccttttcataccttatttggaattgctggattgtcacttttgggagaagaacagattaaacctgttaatcctgtcttttgcatgcctgaagaagtgcttcagagagtgaatgttcagcctgagctagtgagctagattcattgaattgaaagttgcatagtatagttttgccattttaacatttctgtatttgaagtgcttatcgaatctaaaagtgactactgttaatattttgtatattgtgttaaattaattttaataaattatataattatacatattgtaaaataaaagaccggtattttattttctgcttttaattctgaagtcctgttattctgactacagttctttgtgtatacttctgtgtctgttatgttcaataactgagctaacataaaataactctaggtttccact

SEQ ID NO: 187880 - DNA, 1533 bp, Homo Sapiens
ttggctttgtgcttttccagtttgcaagttttccacatatggtgctttctcttcatcagaagttagcagggcgaggactgattaaaggcagagatcatcttatgtgggttctcctgcaattcatttctggaagtattcagaaaaatgcactagctgattttctccctgtgatgaagctcttcgacttgctatacccagaaaaagaatatatcccagttcctgatattaacaaaccccagtcaacccatgcctttgcaatgacctgtatttggattcatctcaatagaaaagctcaaaatgacaactccaagctacagattccaatacctcattccctaagacttcaccatgagttcctgcagcagagtctaagaaataaaagtttacagatgaatgactataagattgctctattgtgtaatgcatactctacaaattcagaatgttttacattacccatgggagctctggtagaaactatttatggaaatggaattatgaggatacctctccctggaacaaactgtatggcttcaggatctattacccccttacctatgaacctcctggattcactgacagttcatgccaaaatgagccttattcacagcattgcaaccagggtgataaaacttgctcatgcaaagtccagtgtggccttggctccagccctagtggaaacttacagtcgtttattggtctatatggaaatagagtctttgggcatcaaaggatttatcagtcagcttttgccaactgttttcaaatcacatgcatgggggatcttacacacactccttgagatgtttagctaccggatgcatcatattcagcctcattacagagttcagctcctgagtcatcttcatactttggctgcagttgcacaaacaaaccagaaccagctccatctttgtgtcgagagcactgctctcaggcttataacagcattaggtagctcagaggtacaaccgcagtttacacgcttccttagtgatcccaaaacagtgctctcagcagaatctgaagaactgaaccgagccttgatattgaccttggctagagcaactcatgtaacagatttttttacaggctctgattcaattcagggaacttggtgtaaagacatacttcagaccatcatgagtttcactcctcataattgggcttcacacaccctgagctgttttccaggcccactacaggcattcttcaaacaaaataatgtgcctcaggaaagccgttttaatctgaaaaaaaatgtggaggaggagtataggaagtggaagtcaatgagcaacgaaaacgacattattacccacttctctatgcagggctcccctcctctctttctttgtcttctctggaaaatgctcttggaaacagatcatattaatcagattggctatagagtattagagagaattggagccagggccttggtagcccatgtgaggacatttgcagatttcctggtatatgagttttctacatcagcagggggtcagcaactcaataaatgcattgaaattc

SEQ ID NO: 187881 - DNA, 1190 bp, Homo Sapiens
  misc_feature (481)..(602): n is a, c, g, or t
aaaaggattcagaatagaaagccaaagcaggggacttgtgttaaccccgaatatcccattatgcatagaaacagttcacatatcccagggactcaaaacaggggcttcaaaatggttgtgaagggtcccaaaatgacatctagggcctcagtttcctctctgtagcatgaagaaattgtgattcttaactcttctgggtcacagccccccttggaaaacttgctagcgatggatcatcattcccctaaaacgcacattcccacaaattcccatcattcccccaaaccgcacattcccacaatttcaggaagtttggggatccccaactccaatccaaggttcccaggttcaaaacccaaggattggggaactgctaagttttcttacaactcaaaaaaaattataaacaataaccatcctttacgtacacccacgctttatagtttacaaagcgatttcaaccccacacacattgataggnnnnnnnnnnnnnnnnnnnnnnnnnnnnnnnnnnnnnnnnnnnnnnnnnnnnnnnnnnnnnnnnnnnnnnnnnnnnnnnnnnnnnnnnnnnnnnnnnnnnnnnnnnnnnnnnnnnnnnnnnnccggggctgccgccagagctcccgcccctcactaaggcggcataaggaggaaaaggcaaagtagaaatcccacaaccaaccatcctccggccccctcctgcccccccaactgggtccttgcaggccccgaagggtggcgccaggcctccaagccggccccggccacccccgcctccccggccgctccaaatcccgcggccgctgccgccgccgcctcccccggagcggggcggagcagctgcccgccgccgccgaccacccggacgactcctcgtcgaatcgcaaacgcataggccgccgcccgagttctgcgtacgagccaagaaagacgcggcgcgagcgccaacggccaccgggcgcgcgccgcggcggccgggcctgcgccccaagagctggatgccagagcaggagaaagagccgccaaccgatcgctcgatcgaccgcacgcccgttccttcgccctaccagacccgggagggggggagggcgcgccagggcttcttcgatttaggggcctgactccccggcgacgagacaagatggctcctccggtccgcaccgcagctaccgtcccggctgcgtcgccaa

SEQ ID NO: 187882 - DNA, 1201 bp, Homo Sapiens
ttggagcaaaacagcaagcaccaacaatatagcccaggcaaggagaactgtgcagcagttaagattagaagcctccattgaaagaataaaggtttcgaaggcatcagcggacctcatgtcctactgtgaggaacatgccaggagtgaccctttgctgataggaataccaacttcagaaaaccctttcaaggataaaaaaacttgcatcatcttatagtggaatagagaaacagctcctcgcctcttcccaacaacgcaaattatgagcagctccttgaagagatttaccttcagcttattgggtaaccactgctaataactaaaatgttctcagcttggaataatggactctgaagtctctattttccaagttgtcctttctcttaaaataccctttactgatttaatacagaataacaatcttattttccacttggtaactatggctttatgttgggttactgtttaaggaaagttgatctgggcctttttaaaaacataattatatactttagaaatacaagggattccgatatgtcaggacctaaatggcctaagcacctgtcaaattaaaattccaaaattcattgaaatcctaaagccttgatattatattctttataaggcgtgtgccagcctgtatagtatataagagagaggggtgtttgtgtgtatatatatatgcctttgtgtatacacttatcaaagctattttcttatgaaaacgtccctctctccataccatcagtttctcagttccagaagttatacctttattttgagctgtgtataggtagaataaaaaattcctttcatatcgttattgtacaaaaagtaaagagtatcctaaagattgtattcattgtaatcaagtaatgcaatcatctctcctctcttgaaatcttgctggacctcttaggctacaataaactgtaccaaactaaactgacagtccttcgataatatgaaacattaatttacaaggacccgttagggcttcaatgatgctgagtctggaaaaggggaggagactcttgggaggactccaggcagctgtgctctcagggctcatgttctctactggattagggataggcacctctgaaatctccaccctgatgattggaatgaaacggagtgaacatgagcccagctgagagaggagcacgaatgtgtgaaaaacagctgctctccttgtccc

SEQ ID NO: 187883 - DNA, 1860 bp, Homo Sapiens
ggcgccacgaaggtgggacaggtctagcagccagtcggggccaagcaggtgcgtgaggcggcggccgccgtccagcgggtgggccgcgaaggggcgaggaagcgcacaccggcccgctggtactgcaggtggcagccacgggcgcgccgctcggcctcatctgacgcctctgcagcgggttccgcaggcccttcagcagggccaggtaccctccagccgcggacctgctcgagggtggtgtcggtgagctcgatacgcagcggtagcagcggggcccacacggtcagccgcagcgaggcgcggagccggcgccaccagaagtccactcgcaccccccgggcgccccggctctccttgccagccacgaacacggcatcacaggcctcagacacctgcaggacctgtgtgttggcagactcgcagccgacatgctctgtcacctccaccaaggcccccccgccgtccacagtgacaaggcgcacggggacatgctggggcactccagtcagtggtgctgtattcaccagctcctcagccttggccagtgggataagggctctgatgtcccgctcagacaccaggatttcccacaccattttgtccttctctgcttcaggggcctggcctgggtactccagctgccacgtgacggggcgagtgaccgctacgcccccaccagtgctattctccaccacaaagtccacccataggaactcagacagttcaaggggactgctggaatctggctctgtgagcccagcacggtggcaggtgatgagggtggtgtggtgcctggagcccttgaagcggtctagcttggcagtccagagtgtgggctgggctgggcgggcggctgtcacatgcagccccttcttcaccttgatccgcagggtcaggaggctggctgtgaagttgtgccgaagcaggagggtagcactaaagagctggccgggccgcactggcatgtcaggcacccgcagagtcacagcctcgtccagaggtacctcctggtactgcggggggtctgctgggcgcagctccacaccccccactgggagggcctgctccccagggtcgttctcctcgccggagccacagcccccagggccctcagctgcaggctcaagcgtgtaggccagctcggcccgtgtggtggaggcctgtgagaaccagtgcgagggaagctccagctccaccacgcaggcgcccagggatggctggaagcggcaggcttggtgagcagtgcctgcagggtgtgtggcatggagccgggcacagggcaggctgccagaccctggtggccaatcctgccctttgaggtggaagagaacccgggcgtagggctctgctggagtcacagccgcttccactgaaacggcccgcacgtcccatgggactggccgttggtggggctcagtgactcgaggggggaccacctgctgagtggcaaaaggtgggtaggaggcccggagaagtggctgggccctgggccagggctgtaggagcagaaaggtctcagatcgggagctcagagaggagttggcaggtgggtagtggcccacctgctgcacacggaagtgttcaggggcgtctaggagctccagggctgccggcaggtagacagggtccaggggagcctggccacagtccactctcacgacgtccagggcgagggccaccaggaggcagagccaggggccgtagggcccccgaggggccgctgttgtgcgaccggccatccgcgcgcacatccttcccacagaaggcggggacgaggcgggcggctcaggtggccccagtcccgcacggcatctcccgcacccgctccgcgccgtccccacctggcccgctgggtcccaa

SEQ ID NO: 187884 - DNA, 1087 bp, Homo Sapiens
ttggtgaatgaacaggaacttcagttgggagccgctgagtgtcttctcattgcagtcagcagaaaaggcaagttggaagaccggaagcccttgatggtcttatttggagatgttgccatgcattatatactctccgccgcacagactgctgatggaggaggtttggtagaaaaacactacgtctttctgaagaggctctgtcaggtgttgtgtgcgctgggcaatcagctgtgtgcattgctgggtgcagattctgatgtagaaacaccatcaaactttggaaaatacctggaatcttttcttgctttcacaacccatccaagtcagtttctacgctcttcaactcagatgacttggggagccctcttcaggcatgaaatcctgtcccgtgatcctttgctattagcaataataccaaaatatcttcgtgcttccatgactaacttggtcaagatgggctttccttctaaaacagacagccctagctgtgaatattctcggtttgattttgatagcgatgaggacttcaatgctttcttcaactcctcccgagcacaacaaggagaggtgatgaggttggcatgtcgtttggatcccaaaactagcttccagatggctggggagtggctaaagtatcaactatcaacttttcttgatgctggttctgtgaattcttgttctgcagttggaactggagaaggaagcctctgttccgtcttctcaccttcattcgtgcagtgggaagccatgactctttttttggaaagtgttatcacccagatgtttcgaacactaaatagagaagaaattcctgttaatgatggaatagagctattgcagatggttctgaactttgataccaaggatcccctcatcctgtcctgcgtccttactaatgtctctgcactctttccatttgtcacctacagaccagagttcctgccccaaggtcttctctaagctattttcatctgtcacttttgaaactgttgaagaaagtaaggcccccagaacccggggcagtgaggaatgtgaggaggcatgcttgttcctccatcatcaagatgtgtcgtgactacccccagct

SEQ ID NO: 187885 - DNA, 1578 bp, Homo Sapiens
ttgggagatcttaagtgcgagcggaaaagggagcgatgttgatctcaggaagcacaaagggaccttcctagctctgactgaaccacggagctcaccctggacagtatcactccgtggaggaagactgtgagactgtggctggaagccagattgtagccacacatccgcccctgccctaccccagagccctggagcagcaactggctgcagatcacagacacagtgaggatatgagtgtaggggtgagcacctcagcccctctttccccaacctcgggcacaagcgtgggcatgtctaccttctccatcatggactatgtggtgttcgtcctgctgctggttctctctcttgccattgggctctaccatgcttgtcgtggctggggccggcatactgttggtgagctgctgatggcggaccgcaaaatgggctgccttccggtggcactgtccctgctggccaccttccagtcagccgtggccatcctgggtgtgccgtcagagatctaccgatttgggacccaatattggttcctgggctgctgctactttctggggctgctgatacctgcacacatcttcatccccgttttctaccgcctgcatctcaccagtgcctatgagtacctggagcttcgattcaataaaactgtgcgagtgtgtggaactgtgaccttcatctttcagatggtgatctacatgggagttgtgctctatgctccgtcattggctctcaatgcagtgactggctttgatctgtggctgtccgtgctggccctgggcattgtctgtaccgtctatacagctctgggtgggctgaaggccgtcatctggacagatgtgttccagacactggtcatgttcctcgggcagctggcagttatcatcgtggggtcagccaaggtgggcggcttggggcgtgtgtgggccgtggcttcccagcacggccgcatctctgggtttgagctggatccagacccctttgtgcggcacaccttctggaccttggccttcgggggtgtcttcatgatgctctccttatacggggtgaaccaggctcaggtgcagcggtacctcagttcccgcacggagaaggctgctgtgctctcctgttatgcagtgttccccttccagcaggtgtccctctgcgtgggctgcctcattggcctggtcatgttcgcgtattaccaggagtatcccatgagcattcagcaggctcaggcagccccagaccagttcgtcctgtactttgtgatggatctcctgaagggcctgccaggcctgccagggctcttcattgcctgcctcttcagcggctctctcagcactatatcctctgcttttaattcattggcaactgttacgatggaagacctgattcgaccttggttccctgagttctctgaagcccgggccatcatgctttccagaggccaccctgtagtacagggatgagtcttggtgtgttctgcagggacaggcctggatgatctagctcataccaaaggaactttgttctgagaagttcttgcctgcagagaagctgtcacatcctcaagcatgtgaggcaccgtttttc

SEQ ID NO: 187886 - DNA, 1338 bp, Homo Sapiens
ttgggctgtgtctctcaggctttgcacaatgactgggtggtgtctgttacaggctggatccagacccctttgtgcggcacaccttctggaccttggccttcgggggtgtcttcatgatgctctccttatacggggtgaaccaggctcaggtgcagcggtacctcagttcccgcacggagaaggctgctgtgctctcctgttatgcagtgttccccttccagcaggtgtccctctgcgtgggctgcctcattggcctggtcatgttcgcgtattaccaggagtatcccatgagcattcagcaggctcaggcagccccagaccagttcgtcctgtactttgtgatggatctcctgaagggcctgccaggcctgccagggctcttcattgcctgcctcttcagcggctctctcagcactatatcctctgcttttaattcattggcaactgttacgatggaagacctgattcgaccttggttccctgagttctctgaagcccgggccatcatgctttccagaggccttgcctttggctatgggctgctttgtctaggaatggcctatatttcctcccagatgggacctgtgctgcaggcagcaatcagcatctttggcatggttgggggaccgctgctgggactcttctgccttggaatgttctttccatgtgctaaccctcctggtgctgttgtgggcctgttggctgggctcgtcatggccttctggattggcatcgggagcatcgtgaccagcatgggcttcagcatgccaccctctccctctaatgggtccagcttctccctgcccaccaatctaaccgttgccactgtgaccacactgatgcccttgactaccttctccaagcccacagggctgcagcggttctattccttgtcttacttatggtacagtgctcacaactccaccacagtgattgtggtgggcctgattgtcagtctactcactgggagaatgcgaggccggtccctgaaccctgcaaccatttacccagtgttgccaaagctcctgtccctccttccgttgtcctgtcagaagcggctccactgcaggagctacggccaggaccacctcgacactggcctgtttcctgagaagccgaggaatggtgtgctgggggacagcagagacaaggaggccatggccctggatggcacagcctatcaggggagcagctccacctgcatcctccaggagacctccctgtgatgttgactcaagaccccgcctctgtcctcactgtgccagccatagccagaggccaccctgtaatacaggggatgagtccttggtgtggttctgcagggacaggcctggatga

SEQ ID NO: 187887 - DNA, 1351 bp, Homo Sapiens
ttgggttcttttctatttataagtgactttaaactttcccttggctgttaagaagtttgttatagatttagctatttattgttcgatgcctgcatgctgaaacaatgcctacagctgtcttcacatgtatggacgtgtgtgaatggttgtacgttttgcacattttgtggctgttgagatgtgctttgctgcacaaacatgaaaatttttgagttacaatttggagcataactggagggtgggttggggaggggtggatttttaaaatgtcaagacagggaaggaggacaaaatggaaatttaaatgacatcctagaggtagagaaaccgtggagatcgcttttctcagactcaccaacttttaatgggatttcatggggtttggttgtgctgatagggtaaggggaggctgctttctgcccttctccccactcccatctgatttacttaattcagtctcagctgctgaaatttggaaaggaccaaattgctttacagtttttttctttgtgtagtatcttgaaatcctggaaaattctatggaatagttctgtatatagggcacaagtaaaggcattgtccaaagtttatttatttatttattaccctaagaatgctttgccataaccacatttaatgggaaaaacggcagtatcacagatgtaaattaactcaccagatttactgggcctgaactcattctcttcttgctatatgatttagcaagttctagaaggtctccaagacaataattacattggcacaatgtatacttcagtgctcacccgtaggcaaatctctttttaaaaaactctttggtgcacaagtaacacatttggccacaaaacaccaaagaattgtaggcagtggcccctattgagaagttttccggtagagttggaaatcagttgtgaatacattctttgctagttggagtgcttgtttactaagcatgtgccgtcgtaggtattagtgctagtctcaaataggtgcttcccctgaggtgcaggggaagaccaaagtttgcaactcgaactgctttcgtccatgtttctcacattgctgtattttagaaaataggggttaagactgataacaaccttttacattgtgactgtgtttgcattgtctaatgacagataaatccttaacatttctctccaccttagtactttagactaattgtgtttgtccgtccatgccatgaatgagtgggctgtagttgggcctaaataaatgagctgttggaagaaaagaatcacagtactttccagcagtcagtccctggttcctatatgtgttctaagcaatgcaaatgtctaattgtcccccagtgggcatagtcagtgtc

SEQ ID NO: 187888 - DNA, 1348 bp, Homo Sapiens
  misc_feature (1231)..(1284): n is a, c, g, or t
caaccctgtcccacagctttagcaaattctctttaaagatgtatctatatcttcactcttttcagtatactttcttttggattcactgtgcagttgttaaaataggaaatcagattttctgaaggttgatcacttgctgaatttaaaatcatcattaattgttggatagtgttcataacagtcctaactggagtgtgtggaggaattacattcacctcttcatcaaggttactttttcgtggtgttctctgtgtttcaaaactgtctatagaatcagtctgaagagttttatcatgatccaaaaataatcttgcatctagatctttatttttaagataaatttcttcgtatcgtttagaaagattttcaacctctggaagtccattagatgttacaagtccaagagaattcataaaaggtataaaatttttgaaataaacatttttcacctcatctatattacattcatgttctttacagagaacttcaataattcttgtatcattttctagttgttttgctatccgtgcactcctgttctgacctcgcctgggtgttcgaggtgaaccattaatgggtataacagctgttttatatggttctttgagcaacatgggaggtgagagtttaataaaatagtcaaggacacatagcattaactgaaatgaaatcaccagatcatcttccatttgtaatacttcccctttagctaataaaaatgtgatccaagaaacttttagcaccaatgcagaatttatttcagtagatatcgaactgctgggttgtgtcaaatatataagttcacatgtcctttccaatttgctgaagagtgcaaacaatacatcatacttcttcaacagtcttgacatagcattatcaactttggtactggtatcaatttcttttagtaagttaaagaatttatggacactgatttctatgtttttctgtagctcagtaaaagtgaacgacatctcatctaggtcaactgctgcaataaagatacagattccccacagttcctttttcttttgaatataacctcccaatactccatccacagatgaaactttctcccaagttaaccaagctctctctctgacatgatctggtatctttaatttctgacataatgcagtaaaatcaggttcttctgtttcttcaaactcaagcctgacgagaggcaggtcctccgggccgctgtcctgctctgggtcctcctcaggagggnnnnnnnnnnnnnnnnnnnnnnnnnnnnnnnnnnnnnnnnnnnnnnnnnnnnnngtttttcggggggttttgggcggcatgacgcctttccgcggcgggagccagcgagctgtgccaa

SEQ ID NO: 187889 - DNA, 969 bp, Homo Sapiens
cttttttataatgccaactttgtacaaaaaagttggcgaaaggaggaagaggtggcgaaaaatcaactgccctgctggatttgtctttctcagcaccttggcgaagccttgggtttctttcttaaaggactgatttttagaactccacatttgagaacggccggtttgtgggcgatgctgaccttgaaagacagaaattttcagatttgaaactcaacggaccccaggatcacagtcaccttctatatagcaccatccccaggatgcaggagccggggcagattgtggagacctacacggaggaggatcctgagggagccatgtctgtagtctctgtggagacctcagatgatgggaccactcggcgcacagagaccacggtcaagaaagtagtgaagactgtgacaacacggacagtacagccagtcgctatgggaccagacgggttgcctgtggatgcttcatcagtttctaacaactatatccagactttgggtcgtgatttccgcaagaatggcaatgggggacctggtccctatgtggggcaagctggcactgctacccttcctaggaacttccactaccctcctgatggttatagtcgccactatgaagatggttatccaggtggcagtgataactatggcagtctgtcccgggtgacccgcattgaggagcggtataggcccagcatggaaggctaccgggcacctagtagacaggatgtgtatgggccccaaccccaggttcgggtaggtgggagcagcgtggatctgcatcgctttcatccagagccttatgggctagaggatgaccagcgtagtatgggctatgatgacctggattatggtatgatgtctgattatggcactgcccgtcggactgggacaccctctgaccctcgtcggcgcctcatgagctatgaagacatgattggtgaggaggtgccatcggatcatactactgggc

SEQ ID NO: 187890 - DNA, 1326 bp, Homo Sapiens
ttttgattgagtcatgggatgaaagattccacagggttccgggtaataacttcagtaaaggtccatatcacgagcctttcgaagcaatcgcacaagggcaggcacaccatcacagttttttatggcaatcttgttatcctggtcacgtccaaaagagatattcttgagagctccacaggctccaaggtgcacttcctttttgggatggtctaacaatcccaccagtactgggatgcccttgagcttccgcacgtcagtcttcaccttgtcattgcggtagcataagtgttgcaggtatgcagctgcattggacttgacagcatccaagcggaatccaagcatggcgatcacctctggcagctctggctgtctccaattaggaggtggaggccctcctttgcgcaggctatccaagcttgctaaacttcctcgctcatgctgggccaaaggagcccagtagtattgatccgatggcacctcctcaccaatcatgtcttcatagctcctgaggcgccgacgagggtcagagggtgtcccagtccgacgggcagtgccataatcagacatcataccataatccaggtcatcatagcccatactacgctggtcatcctctagcccataaggctctggatgaaagcgatgcagatccacgctgctcccacctacccgaacctggggttggggcccatacacatcctgtctactaggtgcccggtagccttccatgctgggcctataccgctcctcaatgcgggtcacccgggacagactgccatagttatcactgccacctggataaccatcttcatagtggcgactataaccatcaggagggtagtggaagttcctaggaagggtagcagtgccagcttgccccacatagggaccaggtcccccattgccattcttgcggaaatcacgacccaaagtctggatatagttgttagaaactgatgaagcatccacaggcaacccatctggtcccatagcgactggctgtactgtccgtgttgtcacagtcttcactactttcttgaccgtggtctctgtgcgccgagtggtcccatcatctgaggtctccacagagactacagacatggctccctcaggatcctcctccgtgtaggtctccacaatctgccccggctcctgcatcctggggatggtgctatatagaaggtgactgtgatcctcaaatgtggagttctaaaaatcagtcctttaagaaagaaacccaaggcttcgccaaggtgctgagaaagacaaatccagcagggcagctgatttttcgccacctcttcctcctttcgggatctttcccaa

SEQ ID NO: 187891 - DNA, 835 bp, Homo Sapiens
aaagcgatgcagatccacgctgctcccacctacccgaacctggggttggggcccatacacatcctgtctaattaggtgcccggtagctttccatgctgggcctataccgctcctcaatgcgggtcacccgggacagactgccatagttatcactgccacctggataaccatcttcatagtggcgactataaccatcaggagggtagtggaagttcctaggaagggtagcagtgccagcttgccccacatagggaccaggtcccccattgccattcttgcggaaatcacgacccaaagtctggatatagttgttagaaactgatgaagcatccacaggcaacccatctggtcccatagcgactggctgtactgtccgtgttgtcacagtcttcactactttcttgaccgtggtctctgtgcgccgagtggtcccatcatctgaggtctccacagagactacagacatggctccctcaggatcctcctccgtgtaggtctccacaatctgccccggctcctgcatcctggggatggtgctatatagaaggtgactgtgatcctggggtccgttgagtttcaaatctgaaaatttctgtctttcaaggtcagcatcgcccacaaaccggccgttcgtaagacaaaaattcgacttgcttatcctccttttcccgtcagtacatacattttcttcaaaagccacacacctcaaatgtggagttctaaaaatcagtcctttaagaaagaaacccaaggcttcgccaaggtgctgagaaagacaaatccagcagggcagctgatttttcgccacctcttcctcctttcgggatctttcctg

SEQ ID NO: 187892 - DNA, 1564 bp, Homo Sapiens
ccaaaggtcggtctaggagaaggatatggccatatatccaaagcaggttttgcattgtaattaaaataagggacctctcggattcctccttttcgggccaacttttttaagtcatcattaggcaaaacaaaaatgctcttcttgctgctcttggtaacaaattttctataggatggcagagctgtacctgaacgagtcttctttggtcttgaaaatttcatcagtttcactttgtctcgtgtggaatactctttgctcacagtcatagatgtaaccagtgtgcctcccgtggtggtcagggagtctgtcactgtcgtggtgaccacggttttgctctgctcctttacagagatgatgtccacactgccgcctgtggagggtgtggaaagcttggtcactgttgtagtggtggttgtgacagtggattttgcacaattttctgtggaagaaaccacagtttgcttatcgcctttttctaccttgatcacagtttttgattctgtggccactgtggaggtcatcgtggtgacttctgtgatgacggtttttcttttagattctccattgacattttcatttttgttgatgggcagaccattttcatcaataaagtcattactgagattagattcctcttcagaagtaataggtgatgaagtaactttcttaacttctgaggtttctatttccatatcttctacctgattaactgaattgctttctggacaagatgctgagggtgtggtcgtctgtgtactgtcagactctttggttgatggcagggtctcaaggctatctcggtagttaccttcagcatctgaagaactcagcaaatgcgattttgtttcggagctgtttctttcattaaaatcttccatgatgacatcaccattaatgaatggccttatagcagattctttaacagtcaatgatttaatatcattctcagggattattttatttatattattaacctttggttcaacattaccacttactactctactctcagaaatttctttcaagcattcacctttcaaatatattttgggtttattatcttttccatttatttgaaatgtacttgttctctgtcctttcttttcagactctcgattttcattattctttttgtcagtggtattttttagctttatttgatcactacatttattaactggtctctcctctaatttcttctgctgacttggttttttaccatttgcttcagtccccttgaccggcagcctgtcctcacagtttccagtggactcaccagaaaccaactcacactttaacggctccaagacttcaacatcttgttctcgagttctgaactgttcagaaatgctttcattgctattctgaacaatcatatcttcttcactgctatcctgaatagacacggtatcagaactattttccaaagtgctattagattcagagtcacatcccagttttccttcaaagtccattgctcttgacagaggtgtggcatctctgtcattggtacttttaggcactgatgaatgtaaagcactcttggaagaagaaacaatgccaa

SEQ ID NO: 187893 - DNA, 1267 bp, Homo Sapiens
aggtggcatctgggcaataatatgtccaggggaggggttattggtggtggagcagaggtcattggtggaggtggagcttggctatataccaagtgaggagtacctgcagcctggggaggatgtggcatttggatggcttattggtggtggaggaggtgggggtggtgcataatgttgctgtggaggcataatatgatgagggtgcgataccactggttgacttgatattcaggatgatggtgagcaggtgctggggcaggaggtggtggttctctagcacctgaatttgagtcatcctgaatagggacggttattaaattgctgtgttttcttgttgaaatacgaaaggtttcctgactgaccgatcgaggtggaggtggagccatggacaattctgctggaggagcacgaatatcctcatgtggctgattatagtgctcatgtggcacatgttgcaaaggaggtggtggcatcatgatgtgctgctttggcggaatatggctcatatggtgcttgtctggtggcattataaaacgctcagggatttcagttggtggtggggcaataggaggatgaacattttcaagtgaagcacgggtaacaggttttccagctctcatatggcgatggttgatatgagcctgtaagtctctctgagacaaatatgttctcttgcacccttgaacaatgctacacatgaagagagaacctcgtgtacactgctcaattcgctgcacaggatcactacagcctggacacatcttatctccctttttttcatgtaaaatagcacagtcatagcaaaaaacatgcttgcatggaatcattctcccatagattttaataggcaatccacacttgtcacagaaatgaactggtgtatcatccttttcacctaagatgtttatctgaaagtcccaaaaaaggtgccaggaaatcttcgctgatttgcaaacagctcaccccctttacagtcataccgttcttcttcattataatcaaatccttctaaagtaaagctgagcagacaaatatatccctccaaggagccaggcttctcacgactcttttggccctagaacttcatcaccaggtggagcctttgcaggcatcctgtttatagttctttgagttcgcggtgcaggtttcgctttgtttgcttgtttggagatgagctttataggaattcgtctgcgaacatcaagaccacccaaggatccagaactattagtgccttgtaactcattgtcagtgtgatccatgccaa

SEQ ID NO: 187894 - DNA, 1537 bp, Homo Sapiens
ttggggtagtggcagtgttcgtgtgctcaggtctgaatcgccaccactgccaccacggtcgcctgccacaggtgtctgcaattgaactccaaggtgcagaatggtttggaaagtagctgtattcctcagtgtggccctgggcattggtgccgttcctatagatgatcctgaagatggaggcaagcactgggtggtgatcgtggcaggttcaaatggctggtataattataggcaccaggcagacgcgtgccatgcctaccagatcattcaccgcaatgggattcctgacgaacagatcgttgtgatgatgtacgatgacattgcttactctgaagacaatcccactccaggaattgtgatcaacaggcccaatggcacagatgtctatcagggagtcccgaaggactacactggagaggatgttaccccacaaaatttccttgctgtgttgagaggcgatgcagaagcagtgaagggcataggatccggcaaagtcctgaagagtggcccccaggatcacgtgttcatttacttcactgaccatggatctactggaatactggtttttcccaatgaagatcttcatgtaaaggacctgaatgagaccatccattacatgtacaaacacaaaatgtaccgaaagatggtgttctacattgaagcctgtgagtctgggtccatgatgaaccacctgccggataacatcaatgtttatgcaactactgctgccaaccccagagagtcgtcctacgcctgttactatgatgagaagaggtccacgtacctgggggactggtacagcgtcaactggatggaagactcggacgtggaagatctgactaaagagaccctgcacaagcagtaccacctggtaaaatcgcacaccaacaccagccacgtcatgcagtatggaaacaaaacaatctccaccatgaaagtgatgcagtttcagggtatgaaacgcaaagccagttctcccgtccccctacctccagtcacacaccttgacctcacccccagccctgatgtgcctctcaccatcatgaaaaggaaactgatgaacaccaatgatctggaggagtccaggcagctcacggaggagatccagcggcatctggatgccaggcacctcattgagaagtcagtgcgtaagatcgtctccttgctggcagcgtccgaggctgaggtggagcagctcctgtccgagagagccccgctcacggggcacagctgctacccagaggccctgctgcacttccggacccactgcttcaactggcactcccccacgtacgagtatgcgttgagacatttgtacgtgctggtcaacctttgtgagaagccgtatccgcttcacaggataaaattgtccatggaccacgtgtgccttggtcactactgaagagctgcctcctggaagcttttccaagtgtgagcgccccacccgactgtgtgctgatcagagactggagaggtggagtgagaagtctccggctgctcgggccttcctgggagagcccccgctccagggctcgct

SEQ ID NO: 187895 - DNA, 1022 bp, Homo Sapiens
ttggctgcttgccgctggacgcctcctgccacccccaggcctgcgccaatggctgcacgtcagggccagggctactcgggtccccctatgcgctatggagagagttcctcttctccgttcccgcggggccccccgcgcagtactcggtcaccctccacggccaggatgtcctcatgctccctggtgacctcgttggcttgcagcacgacgctggccctggcgccctcctgcactgctcgccggctcccggccaccctggtccccaggccccgtacctctccgccaacgcctcgtcatggctgccccacttgccagcccagctggagggcacttgggcctgccctgcctgtgccctgcggctgcttgcagccacggaacagctcaccgtgctgctgggcctgaggcccaaccctgggctgcggctgcctgggcgctatgaggtccgggcagaggtgggcaatggcgtgtccaggcacaacctgtcctgcagctttgacgtggtctccccagtggctgggctgcgggtcatctaccctgccccccgcgacggccgcctctacgtgcccaccaacggctcagcctcggtgctccaggtggactctggtgccagcgccacggccacggctcgctggcctgggggcagtgtcagcgcccgctttgagaatgcctgccctgccctggtggccaccttcgtgcccggctgcccctgggagaccaatgataccctgttctcagtggtagcactgccgtggctcggtgagggggagcacgtgatggacgttgtggtggaaaacagcgccagccgggccaacctcagcctgcgggtgacggcggaggagcccatctgtggcctccgcgccacgcccagccccgaggcccgtgtactgcagggagtcccagtgaggtacagccccgtggtggaggccggctcggacatggtcttccggtggaccatcaacgacaagcagtccctgacctttcagaacgtggtcttcaatgtcatttatcagagcgcggcggtc

SEQ ID NO: 187896 - DNA, 1127 bp, Homo Sapiens
  misc_feature (675)..(738): n is a, c, g, or t
ttggcaacagcccactaaagagaaagacggagaggcagagacccaggggagccgaggagcggagacacggacccagcagggtcacgcgggaggagactcgggacacccactcgctggctgccaccgggagcagaggggggctcggccgccccctcccacatcagtctccagacccttggggcttcagaggccgctcctaggctcctcggaggaggcgcgggtttcttcttttccggagagcaaactttcctcggagatgcctggcaggatgagccgcggcccccggagaggacgggacagcctctgatcgccgcctgcgtgccccgccactgcccatggccaggaggccccagggaacggacagcccgacctcttaggcgccgggaccctcaggctcagatcagtggccgaggccccagagcaggcacccccggttcccgccaggccctcctgccatgtcggacccagacgtccccaggggctcggatgtccccgccatgtggcccccttgttccaggggtgcctgagccccttcaaggagccccaacccacccccaaccttggcccagccctgagccccagggaccatgagcgggggcaagaagaagagtagtttccaaatcaccagcgtcaccacggactatgagggccctgggagcccaggggcttcggatnnnnnnnnnnnnnnnnnnnnnnnnnnnnnnnnnnnnnnnnnnnnnnnnnnnnnnnnnnnnnnnnatccggggggcaagggcaccccccggaatggctccccaccacctggggccccttcctcccgtttccgggtggtgaagctgccccacggcctgggagagccttatcgccgcggtcgctggacgtgtgtggatgtttatgagcgagacctggagccccacagcttcggcggactcctggagggaattcgaggggcctcagggggcgccgggggcagatctttggattccaggttggagctggccagcctcggcctgggcgccctcaccccaccgtcaggcctgtctcaagccccacctcctggcctccgtccaccccccacctctcctggacctcagcccgctccttcactgggggactgggcagctggttggtgcccagcaaagccaagg

SEQ ID NO: 187897 - DNA, 859 bp, Homo Sapiens
  misc_feature (106)..(144): n is a, c, g, or t
  misc_feature (387)..(450): n is a, c, g, or t
cttcaccaccggaaaacgggagataggggccccaggtggtggggaacccatccggagggtgcccttgccccccggatcggggctggtctccccatttgggcaggcnnnnnnnnnnnnnnnnnnnnnnnnnnnnnnnnnnnnnnntccgaagcccctgggctcccagggccctcatagtccgtggtgacgctggtgatttggaaactattcttcttcttgcccccgctcatggtccctggggctcagggctgggccaaggttgggggtgggttggggctccttgaaggggctcaggcacccctggaacaagggggccacatggcggggacatccgagcccctggggacgtctgggtccgacatggcaggagggcctggcgggaaccgnnnnnnnnnnnnnnnnnnnnnnnnnnnnnnnnnnnnnnnnnnnnnnnnnnnnnnnnnnnnnnnnggtttttcctgctgctgttgctgctgaactccagagctgagtttgcaaactctggggcctcggccactgatctgagcctgagggtcccggcgcctaagaggtcgggctgtccgttccctggggcctcctggccatgggcagtggcggggcacgcaggcggcgatcagaggctgtcccgtcctctccgggggccgcggctcatcctgccaggcatctccgaggaaagtttgctctccggaaaagaaggaacccgcgcctcctccgaggagcctaggagcggcctctgaagccccaagggtctggagactgatgtgggagggggcggccgagcccccctctgctcccggtggcagccagcgagtgggtgtcccgagtctcctcccgcgtgaccctgctgggtccgtgccaa

SEQ ID NO: 187898 - DNA, 1729 bp, Homo Sapiens
ttgggttctgttccatgtctgtgttgtggacattccgcggcatgaccgcgtgaactgcacggtggagctgcctcagggctgtcggtcaggttggtccagtgaggggtgactgcagccggtcaggtgggcgaggagaaggggggctgcccctttcctacctgtgcttgaggggccggaggcaggtgctgcctggcagagctgtgttaccgtcttggcctcggggtctggtccacactctgtgctcccagccttgaggctgcagtaggactctgatctcacctgccagaagagaggcggggccgcgtcctcctggcgtcaccggcgtcactgtcattccttggtgtctgtgctgggcatggttggcttgggggtctgtggtttcctgggccttgtggcagggtttctcccgtgggagaatttggtgtggaaagcataggaggccccttccgaggttgacaccgtgtcctccgcggtgtttctcgcctggtagtctcgtcgtgtggacgctgccgttctggttctcggaggtgtgtccttcgccgtgttggggttatttgtctgtgttcctgcacttttcccgggctctgagctggattgatggggccagtctcccccctcccatcttgaggtcgttctccacattccttccagcacacctgtcctttccatagccctttttggacctttagaaccacagatgataggaccagcccaatgagccacagtcagagagtagattgtgcatgtgtgagcacccagctactggggacgggggctctcccacgacccctcctcctgtgtttgccagagctcccatctgccccactcgcctttgccccgtcatcgatgattcaggcagagccagattcgttaggtccctggaggaaggactgactggaccagagggaccctctggctcaggagggttgggtccctgggaggccggcagccaggccacagaatccacacgtggaccattgtgggtccctgggaggccggcagccaggccacggaatccacacgtggaccattgtgggtcccttgggaggccagcagccagactacggaatccacatgtggaccatgggaagtcagtctcttgcgtgtcctagaccttgtgggtggcgccctgcataggggagcagggggaacgggtctgatgtccctgtgctggctgagggctcagagctgcccgcactccgtagctcatgggatgtgctgggcctgcctttggcgccatgctgcagactccagtgggcctggtttctgcagaatgtccatggtggccgctgcagagttgcagaggtccctgtagagataaagctgaggaggaggctgtgtgtgatggctctggctcggaccaaccagatgagcctcctgaagcccccttccctgcctgcctgctgacccgtggccccagctcactcattgccctcagcagccacccgaggctgtgcagaagggtaggttcaggttgaccaggaagctgccaaaagggacatggatatgaggatacatctggacgtgcttagaacagggtgctggttgagggcccccagctgacccctactgcagatccgcatgtggaccatgagccggctgccagcactaggtcctgggcagctttgtttgtcccacttttctttgtttcttctcactaaaatgatcacgaagacctttgacaagagggagagatatgcactgtgatattaaaattcaaaataattta

SEQ ID NO: 187899 - DNA, 1258 bp, Homo Sapiens
ttttgaagaaccaatgtggtcttttacattttcttgttgggagagcaaattttgatcagcattagtgctgtgaaatacttttggattatcatccccaaagtataggtgagatcatgagaaaatttggcagtccttctctcagatttagttcactaaaatgcttggcattcttatgcacaagctcaatctaaataatggggctttagtatggatgataagaaggtctaatggcagatagaatagtgaactctgcctgtttgtttggtaaatgtcactgacaaatttgaacttttgggtgaaggactgctagaagaattcaacagcacctggaggtaaggttctgttacagagccttcttttgccctcactggctacgttgattcattgtggctcatggatttgcctccgttcagcacgccagagacacttctgctcttggttggggtcccgcttccagatcgggagaactccgtgagatcgtgcagtgatggctccttgtacatggccactttcagtggtttaggcagaaaatgagctgcaggcttgttcttcttcacatggttgcctttcatgatctctccttctttgttcagacccagataccaccctcggcctgactgctgctgacggtatatcattgatgaatatgtcacataataattttcaaacactgattctttgaatttgcactcaggtgtgaaaagttccgaggtgtacaagtatccctcactgttcattgccaagtacagcttggtttgaactccttggatagccaccactcgcagacccacagggatgaggttaaacagagtgtaagtgctgtcctcatctttggtgccatcaatggttccatccgcctgcagctgcaagtggtagccttgtcggctgtatagcttggtaactatacccttaagctgaggctcttccggctctgtgttctctttgtggtgtacttgcttcagcgggcagcagaagatttcgtgacacttagcacgaaagggggactcttttttctttaattccgcagattggatggaatcttgtcgtaacataatgtattcctgtgtgccagggggggcgtcatccagaaccttagaagcatctttctcctctttgggcttggtcacctttccactcatagatcccagcttgcttgacaaggttcgctcagaagacggaagtcctcgccgagcgggtcggacttgggagagtgcttagggcggcaagtctcgaccacgagctcccctcggtgtgccaa

SEQ ID NO: 187900 - DNA, 1058 bp, Homo Sapiens
ttggggaagatcccggtgctgtgggagtggagcaggtggttgaatgccaggctggcttggtccttctctctgggtgccggctgtggctcccgcccaggcccggcctgcatgcctacgaaaaggaggacagtgatgaagtccacctggaggagttgagtctgagcaaggaggggccaggcccagaggacactgtccaggacaacctgggggccgcaggggctgaggaggaacaggaggagcaccagaaatgtcagcagcccaggacacccagccccttggtcttggaggggaccatcgaacagagctcgcctcccctgagccctaccaccaaactcatcgacaggaccgagtccctaaaccgctccatagagaagagtaacagtgtgaagaaatcccagccagacttgcccatctccaagattgatcagtggctggaacaatacacccaggccatcgagaccgctggccggacccccaagctagcccgccaggcctccatagagctgcccagcatggctgtggccagtaccaagagtcggtgggagacgggtgaggtacaggctcagtctgcggccaagactccgtcctgcaaggatattgtggctggagacatgagcaagaaaagcctctgggagcagaagggaggctccaagacctcatcaacaattaagagcaccccatctgggaagaggtataagtttgtggccaccgggcatgggaagtatgagaaggtgcttgtggaagggggcccggctccctaggcgtcccatctcgcttcctgggtctgcaggtccagccggctggcaccctccatgtacccaggggagattccagccagacacccgccccccggccctggctaagaagttgcttcctgttgccagcatgacctaccctcgcctctttgatgccatccgctgccacctccttttgctcctggaccctttagcctctctgcccttccactctctgaccaccgcccccgccctccccacccagctccgcttcttgttacttgggggaggaaagaaactcctgatcatgggccaaagggactt

SEQ ID NO: 187901 - DNA, 1222 bp, Homo Sapiens
  misc_feature (223)..(263): n is a, c, g, or t
ttggcaccaactcgggtaaagctcctcggcctcggcgtgctgcgcctccgcggctgccctgcgccagaattcggttccctcaaaattataaaagcaggaaagctcaagacaaagaaatccaacaaggctagtgatttcagtgatatggagaattggccaacaccaagtgaattagtgaacactggatttcagagcgtcctcagccaaggaaataaaaagccannnnnnnnnnnnnnnnnnnnnnnnnnnnnnnnnnnnnnnnntaacagtgacagcaaagaaaaccgggaaacaaaattaaatggtcctggtgaaaacgtcagtgaggatgaggctcagtcaagtaatcaacgtaagagagctaataagcacaagtgggtaccactccacttagatgttgtaagatcagagagtcaagaaagacctggatcccggaacagctcaagatgtcaacctgaagcaaataaaccaacacataacaataggagaaatgatacacgaagttggaagcgagatagagaaaaaagagatgatcaagatgacgtttccagtgtgagaagtgagggtggtaatatccgaggttcctttagaggtcgaggaagaggccgaggacggggaagaggacgaggcagaggaaatcctcgattgaactttgattattcatatggttatcaagaacatggtgaaaggactgatcaaccatttcaaactgaacttaataccagtatgatgtattactatgatgatggtacaggtgtacaggtgtatcctgtggaagaagcgttgcttaaagagtatattaagcgtcaaattgaatattacttcagtgtagaaaatttggaacgagacttctttcttcggggaaagatggatgaacaaggtttcttgcctatttccctgattgctggttttcagcgtgttcaggctctcactacaaaccttaatctcatcttagaggcactgaaggatagcacagaagtagaaattgtggatgagaaaatgagaaaaaagatagaaccagaaaaatggccaattccaggccctcctccacgcagtgtgccaccaacagacttctctcaactgattgattgtccagagtttgtaccaggccaagccttttgctcacatacagtcagggtgatgatcttctgaagctcttggatgtcatttgatcggaatatgcagtggaataggtgactcactgaaatgcctttataaatac

SEQ ID NO: 187902 - DNA, 1710 bp, Homo Sapiens
tttgccatagctgtaatctgatagccataatcccaccaggacatgaccttcgcatcctcttggagtattatgacgaagccaataatatgcttctcgagaagtcatcaaatatgatcctactgccatccccaccacgggcagatagtacaatggacgagagaagagtaggcctcactggtcacccaggttgaatgaaaggtgtaggtgatgagaaagaaagccatgaccagtatcatcccacttgccacttcattcttaatagagtaggtggaatcctgttgcttcttgctcttcttgtctggacgacttatgtccagattcttcatgtatgtggacagcacctgggagactccaatgccagagagaatgcacataacaggtgccaacactagcattagacgcaccattacagctgaaaagtacatgctggtcacaccatacatgatgataaaaatccgggcatcagacaggttgctaaagcagtaatagaggccaactggaaacatgaagacgaggagctgcaggtcaaaatagtatgaggaccaggttgtgggctgatgctcagacacagaagcaatgatggggatgttgttcttagcataagagggatccagcagcgagtagaaacgccccgtccagggagatatttttcctgtcagcatgaggagagctcccacggtgagaaggacaaagcctaccagagagatgacgctccggaaaagaacttcaaattgttgtggattcaacttgctgcgcaggtaatccacaaaggcatggatctggcagagaccaaagaccccaaaggctgccatgtgctctgatgaaaggacaggctggaaacccacaaaggagatctgcatagaaagtatagtgcccaggcagtaaacagtacagtaggccacatagatccggtgagagaaacggcctgtgagcatcagcacgaggacgtggagaggaattaagttgatcaggaacacataacctccccatgacgagaccatgtagaaataagcaagggcacacttagctgcccaacagatggaaccagtctttactgccttgatccacatgtagtaggtgagtagcatgcaaaagatggcaatcccttcattatcataggagccagccacagatcgggagatatatccaggaactacagcaatcatggcagcagcaagaagcccagcccctgcatccttgagctctttggtaaggtggtacgtgacgatggtggtgaaggaggagaagagaggggccaggaacacacagacattccgaatgtcgatggtgatgtggaaaaaatggagtacatggtagattgcagcagaggtgatcattaaacctgggtaaattgttcctccaatgattcgtcccaaagggtaccaggctcggtcatcaaaccagttatggaatttataaaacccctcctcagccaggaacctggtagtccgataattaaagtacggatcaaactcatggataacactttcaaatctcaggacagcaaacagacgagtggagaaggataatacagcagccattgacagaatgagaagcttcaaaagtgtgtcctgcttctcataggacaatcgcaaaaatccaaacttagtcatcttgacatgaatgggtggcaacacacgacgatcagctggccggctttcctaaacgatccgcggggctccctcagccacccaacttttttgtacaaag

SEQ ID NO: 187903 - DNA, 1611 bp, Homo Sapiens
tgtacaaatgagctggatcactcacttggatttttgtgttgacattttattctgagggttgatgttacactatttaaggagtcatcaatgcaaacagtcacattaggtatgtcatcatctttagtcagtaaaaaccttgtaatgaggagtagtaaataaacaagagaacattagactttttggttaaataattgagatttaatttttaaaagatattcttactcatttgctaggttgtaaatttgatttcaccattaagaaaaggtaaattggatataaatgaacgatctccaactttttgatgaagaggttttactatctctcactgtgggaaaatttgatgaaatatttgaactgtcacatatattaagaatactttatgatttagaccaatattctagaaatatcaaatgtcagtatcttgaaatcatctgcctctaactttgtggtataagaattatatatgaataagctattatttttataaaggaaaactttgccattatagtaaattacattagttgatctcgataatttgaggataacagatgacaattgaatttttaattgatttagtatttcctcctcctctttgggggctgggtgggagggcttacatgctcttatagtgaggcacatctcactgttttgcagcagaatttgaattgtgcaactcctgtgtaaagtaaggatttctttaaatagcatttttgcaccagtaaaaatagataacttagaactcagtcttgataactgaaatgacttatttcacttagaatacatttctcccttctctgccatctccacaaatgccattgggaggttttgaaaaaccagttaatttaatagctcaaaattgtccctgattttattttcttttagggaaaattgtttcataaatgtgacactgataaagcctttgtcagaaagtattctcacaattatgagatggattataataaaatacttaaatttgtgttattttttgaaccacagatgagtaaatttaataatgaaccaattacactcttgagtctaactaaactgtacactgtagcacggtgttagactggagttaatgtgtaagttattaacatttctatgaaaatgcccttttggggcctcctgaattttagatgttccactgttttgatcatttctataaaagaaatggtcattttacttagatgccagtctactttataaagacaaatggattatagacttaaaaatagtcatttttcttattcataaatctgacaggcataaacccaaatcaaagataatttggtgcccattatgaatttgaagttaagtgatagctcacttgtaaagtgactaccttaatgtgtatagagaccccagtctactattatttgggaaaattgtttaggttatatgggaaaagtagctctttaaaaatcatattgcccaacagaaaccttaggctgaatttacaggtatgataatttttgtaattaattttcttagaattgtgcaagctggatgagataatgacatactcttttacactgtaacagcagcatattgcctagaactttaaccattttagagttagatactagggaaacaaactaatgggtcatcatc

SEQ ID NO: 187904 - DNA, 1086 bp, Homo Sapiens
  misc_feature (326)..(374): n is a, c, g, or t
tgcctcttctctcttttgacttaaggatgttgtcccttaaggaaacctggaggctactactgtgatacactacttgagagatggattgttgcgctttcttctacagtctttacaaggagtagattataaagacagaagatgttaaccactgcattaatgtttggaagctgacagtcttctagatttctgctagcaaactgatatgaggtagagtcctgaaagatctttcagcaatttcattctcttgggataagtgagtcactttcagaacagtgtgtgttgtagaattttttggttgtggctgctctactcagattgcatagagnnnnnnnnnnnnnnnnnnnnnnnnnnnnnnnnnnnnnnnnnnnnnnnnnaaacatcttcatagtgtatcatcctgaaaactgaatagtcactttgaggttattgctttttctttccaggtcagttagccaactaaaaaggccccgaaaaaactggcttcatggtccatgtctatcaagtgctcatttgttacagaaacaaaaattctgtcattttccttaagctcaaatattcccccttgatagatggaatagagtccatattctgcatctttagaccaacaactatttctagcacttttcatcaacaatatagggtcaggataacttgtgtatttgtaaatatattggaccatttgtttgtcgttctttgtgttttcttttatttcctcctgaaatcgaaagtatgtttgggaatagatgtagtaaaaccctttttcatggatgaccagttcaccattcctcaagtgcaagttgctcaggaatgaatgcccactccttgatgattcccaggagtttattttgcggcccagagccttttcattcttggagtctgcttcagctcgttggtaaagtacacgtaagttacagccacacagagagactgcaggagcactgtgaagatcacgatcagcacgcaggtctgtcccaggctgggtcccccctggacctccatcatagccatgatcctgtcagagtctgactgctgtaagtcagccaggcagccggtcactgaagcccttccttctctattcttttccaa

SEQ ID NO: 187905 - DNA, 1386 bp, Homo Sapiens
ttgggggctagcaggtcgtggacgccggctcctggaggagagccggtaggagggaggtgaaggtgtccgcggcgtcgtcgacggcggcgccggccatggaggagacgcagccgccgccgcagcctaagctgcccctgtgcgacagcctcatgatctggctgcagacattcaatactgcctcaccttgtcaagatgtcaaacagctgactagtggagttgccatggcacaagttcttcatcaaattgatgcagcttggtttaacgaatcttggttaagccgaattaaagaggatgttggggacaactggagaataaaggccagtaatgtaaagaaggtccttcaaggaattatgagttattatcatgagtttttggggcagcagatttcagaagcacttatccctgatttaaaccaaataaccgaatgttcagatccagtggagcttgggaggttgctccagcttattttaggttgtgcgatcaactgtgaaaagaagcaagaacatattcaaaatataatgacactggaagagtctgttcaacatgtggtcatgactgctattcaagagttgatgagtaaagaaatattgagctctcctccaaatgatgctgttggagaattggagcaacagcttaaaagagccttggaagaacttcaggaagcactagcagaaaaagaagagctgaggcaaagatgtgaagaattggatatgcaggtgactacacttcaagatgaaaagaattcactggtttctgaaaatgagatgatgaatgaaaaacttgaccagttggatggctcttttgatgatccaaacacagtggttgcaaaaaagtattttcatgcacaattacaactagaacaattacaggaagaaaacttcaggcttgaagctgcaaaagatgattaccgtgttcactgtgaagaacttgaaaagcagctaatcgaattccagcataggaatgatgaattgactagtcttgcagaagaaacaagagccctgaaagatgaaatagatgttcttagggctacctctgataaagcaaataaactggagtcaacagttgagatatatcgtcagaagctacaagatctgaatgaccttcgcaagcaggtgaaaactttacaggaaaccaacatgatgtatatgcataatacagtcagcttagaagaagaattaaaaaaagcaaatgcagcacgtacacaattagaaacatacaaaaggcaggttcaagatcttcatgttaaactttcctccgaatccaagagggcagacacactagcgtttgaaatgaagcggcttgaagaaaaacatgaagctttacttaaggaaaaagagagactaattgagcagcgtgatactttgaaagaaacaaatgaagagcttc

SEQ ID NO: 187906 - DNA, 2511 bp, Homo Sapiens
ttggagagagcgtgggcgagagtgccgatgggttccagcgagagtcttagagcccacgaggccgagaggcgtggtcgcccatgaacttggggagtggagggaaaagtcggaaactgatcgtggacactagaaacagaaaaaatggaatttagatggagaaacgagacactgaatcacgggggagaccgagagatacggaaggatggagacagttgaaataggaagaaccccacaaaagctggagataatggagaacgatgctgagaaatggaaaagcgagggagtggagcccgaacccctggatttgagtggctcataatccagggcctgaaaacccagaatgaacttgtgtccatcccagagatcactgcagatgtcatgaggtaccctttgtgtcaccagctcaagcaggcctctggccactttatcatctgtggtggtcctgtgccgtgaccaggaggaaaaattagctctttgaagagaaagtagttctctattgcaggcactggcctcttaaattgttgcaggtggggaatggatgagaatatttgttttgggtgatcagaactgagactcctattgtggattagtaacatgcctcctcctagaacaagggagggcagggatcgccgagaccaccaccgggctcccagcgaggaagaggccttggagaaatgggactggaattgtccagagacgcgtcgcctcttggaagatgccttcttccgtgaagaggattacatccgtcagggttctgaggaatgtcagaagttttggaccttctttgaacgcctgcagagattccagaatctcaagacctccaggaaggaggagaaagaccctggacagcccaagcacagcatcccagcgctggccgacctacctcgcacttacgacccacgttaccgcatcaacctctctgttcttggccctgccacgcggggctctcagggactgggcaggcacttgcccgcggagagagtggctgagttccgccgagccctgttgcactacctggactttggccagaagcaggcatttgggcgtctggccaagctgcagcgtgagcgggcagccctccccatcgcccagtatgggaaccgcatcctgcagacgctgaaggagcaccaggtggtggtagtggccggtgacaccggctgtggcaagtccactcaggtgccccagtacctgctggctgctggcttcagtcatgtggcgtgcacccagccccggcggatcgcctgcatctcactggccaagcgtgtgggctttgagagcctcagtcagtatggctcacaggtcggctaccagatccgctttgagagcacacgttcggcggccaccaagattgtattcctgacagtggggctgctcctgcgacaaatccagcgggaacccagcctgccccaggggccagtgatggcgtggacatccaggatgtgaagttcaagcttcggcatgacctggcgcagctgcaggccgctgccagctcagcccaggacctgagccgcgagcagctggctctgctgaagctggtgctgggccggggcctgtacccacagctggccgtccccgacgccttcaacagcagccgaaaggactcagaccagattttccacacgcaggccaagcagggcgccgtgctgcaccccacctgcgtcttcgctggcagccccgaggtgctgcacgcacaggagctggaggccagcaactgcgacggaagccgagacgacaaggacaagatgagcagcaaacaccagctcctcagcttcgtgtccctgctggagaccaacaagccgtacctggtgaactgcgtccgcatccctgccctccagtccctcctgctttttagccggtctttggacaccaatggtgactgctcccgcctggtggccgatggctggctggagctgcagctagcagacagtgaaagtgccatccgactcctggcggcttccctgcggctccgtgcccgctgggaaagtgccctggaccggcagctggcgcaccaggcccagcagcagctggaggaggaggaggaggatacgccagtcagccccaaggaggtggccaccctgagcaaggaactcctgcaattcacggcatccaagattccttacagcctccggcggctcacagggctagaagtccagaacatgtatgtgggaccccagaccatcccagccaccccccatcttcctggcctctttggcagctccaccctgtccccccaccccacaaaggggggctacgcagtcactgacttcctcacctacaactgcctcacggtaagcatgaaccctccttcactgaaggtgggatttcaggaagaccccaccaccccgtttcaccttagtccagggacatagttcccaagtggggcccgtggccctgagggcttctgggaaagggtcccgggggggcacttgggtggtgggtggcacttggcgggggcccagccctgacagctgggcctgccacagaatgacacagacctgtacagcgactgtc

SEQ ID NO: 187907 - DNA, 1416 bp, Homo Sapiens
ccaactttgtacaaaaaagttggctgataacgtcagggaagaattggaggaagtgcaggatcttctgtgcaggacgctgcccctccccgtccagctgagctttcctgaggaagctctggatgtcgcccgtgtctgttgctcatgtgtttgtttctcccttttgcttctctgccggctcagaggagaggagacgccgtgagcgggacgaccagatgtaccgagagcggctgcgcaccttgctggtcatcgcggttgtcatgagcctcctgaatgctctcagcaccagcggaggcagcatttcctggaacgactttgtccacgagatgctggccaagggcgaggtgcagcgcgtccaggtggtgcctgagagcgacgtggtggaagtctacctgcaccctggagccgtggtgtttgggcggcctcggctagccttgatgtaccgaatgcaggttgcaaatattgacaagtttgaagagaagcttcgagcagctgaagatgagctgaatatcgaggccaaggacaggatcccagtttcctacaagcgaacaggattctttggaaatgccctgtactctgtggggatgacggcagtgggcctggccatcctgtggtatgttttccgtctggccgggatgactggaagggaaggtggattcagtgcttttaatcagcttaaaatggctcgtttcaccattgtggatgggaagatggggaaaggagtcagcttcaaagacgtggcaggaatgcacgaagccaaactggaagtccgcgagtttgtggattatctgaagagcccagaacgcttcctccagcttggcgccaaggtcccaaagggcgcactgctgctcggcccccccggctgtgggaagacgctgctggccaaggcggtggccacggaggctcaggtgcccttcctggcgatggccggcccagagttcgtggaggtcattggaggcctcggcgctgcccgtgtgcggagcctctttaaggaagcccgagcccgggccccctgcatcgtctacatcgatgagatcgacgcggtgggcaagaagcgctccaccaccatgtccggcttctccaacacggaggaggagcagacgctcaaccagcttctggtagaaatggatggaatgggtaccacagaccatgtcatcgtcctggcgtccacgaaccgagctgacattttggacggtgctctgatgaggccaggccgactggaccggcacgtcttcattgatctccccacgctgcaggagaggcgggagatttttgagcagcacctgaagagcctgaagctgacccagtccagcacccttttactcccagcgtcttggcagagctgacaccaggattcagtggggcctgactccccaaactctggcaatgaggctgcgctgcacgcggcgcggggaggga

SEQ ID NO: 187908 - DNA, 1408 bp, Homo Sapiens
actttgtacaaaaaagttggcacgaaccgacctctagacattttggacggtgctctgatgaggccaggccgactggaccggcacgtcttcattgatctccccacgctgcaggagaggcgggagatttttgagcagcacctgaagagcctgaagctgacccagtccagcaccttttactcccagcgtctggcagagctgacaccaggattcagtggggctgacatcgccaacatctgcaatgaggctgcgctgcacgcggcgcgggagggacacacttccgtgcacactctcaacttcgagtacgccgtggagcgcgtcctcgcagggactgccaaaaagagcaagatcctgtccaaggaagaacagaaagtggttgcgtttcatgagtcgggccacgccttggtgggctggatgctggagcacacggaggccgtgatgaaggtctccataacccctcggacaaacgccgccctgggctttgctcagatgctccccagagaccagcacctcttcaccaaggagcagctgtttgagcggatgtgcatggccctgggaggacgggcctcggaagcactgtccttcaacgaggtcacttctggggcacaggacgacctgaggaaggtcacccgcatcgcctactccatggtgaagcagtttgggatggcacctggcatcgggcccatctccttccctgaggcgcaggagggcctcatgggcatcgggcagcgccccttcagccaaggcctgcagcagatgatggaccatgaagcaagactgctggtggccaaggcctacagacacaccgagaaggtgctgcaggacaacctggacaagttgcaggcgctggcaaacgcccttctggaaaaggaagtgataaactatgaggacattgaggctctcattggcccgccgccccatgggccgaagaaaatgatcgcaccgcagaggtggatcgacgcccagagggagaaacaggacttgggcgaggaggagaccgaagagacccagcagcctccacttggaggcgaagagccgacttggcccaagtagttgggaggtgttggctgcacgtgcgggtggtccgggaagtgagggctcactcagccaccctgagttgcttttcagctgaggtttgcacttcctctcgcggccctcagtagtccctgcacagtgacttctgagatctgttgattgatgacccttttcatgattttaagtttctctgcagaaactactgacggagtcctgtgtttgtgagtcgttttcccctatggggaaggttatcagtgctttcccgagtgagcatgggaacacttccagttcccagggttatagacagttcgttccccagtgtggctgaggccaccccacaggcagcagagcatttcagactcccaaacaggacccc

SEQ ID NO: 187909 - DNA, 1309 bp, Homo Sapiens
gataaagaattaatttttaaatattctaaaggtgcttactcttacaaattaataaaaattagatagaaagcacaatagaagaacgtacaaagataaatgtttcttcacaaaacggccaaatcagtaacacaggctttgtgttcaaagtattgattagtgcatacttcactaataaagaatctatagtatgtattttattagtattctagaaaatttcagacaatcagcaaatggaatgaattttattatcaatatgccatagaaattcagtcatctaatttttctagcttatgttatgttgagcctgcttgtggtctctctacctggaggagggacaggataagaccagcagtatcccatatgattccaaatggaagtccaataatgtattggaatttgctacatctcatatccaaacagtgctttatctacattaatggatgagtttgtgattttaatatggaaataaatgagtgattcgagttgttcaaaatataatttttgaatatacttttgtgattgatagttatgcctcaatcactatgaaactcagagtattattaaaaagaaccttcccctctttcttagcactaaattcaggctcttgtagatctttcccaagctctgctctgagatcaggtggtgctgtggcattaaagttgcaggtttcagtcaaaaaatcccaaagcaggtctccattttcattaccatcaataaagcagtcagatatatccatggtggacaaaaggtcatagcactcatacttaagccctaggttgtccagcatctgagtgaggtcatctgatgtgatatactggcagaggtcatcctggggaaagcgtgatccgtactttttccacagcttgtcccagccactgcttcctgacacaacaataatgagcatcttagcattggtacctaagagactatggaagaatttcagggtagctgggatgtcttttacataatacagcatttgaatcatatgaataaagtcccacttttgaagctcctttttctccaacattctactttggtattcagatgatgtctccttatgccaagcaaactttacgttctcgaggttcgatgtcttggctacaagctctttgtatttggcaatttgttcagcacttggagagaatttgaagatcaatttcacctgcacctccgcctatgcttagaatcttaatttctgattttgtgtctccaatccttcctattatgcctggcagcttcttgtccatgaattcctgcatgcactggtgttccgtggaatggttgagaaacctccggaaagattcaccaa

SEQ ID NO: 187910 - DNA, 756 bp, Homo Sapiens
  misc_feature (57)..(93): n is a, c, g, or t
ttggcgactaggctgaggtgctggtacttgccccaacccctacttttgtatttatannnnnnnnnnnnnnnnnnnnnnnnnnnnnnnnnnnnnatgtttggtctggaccagcttctgccagcccctggcctttactttcttccttgcctatgcagggcaaacaaaatgtgaaattctgccctcagctgagctgagtaagggctcctgggggttggctggagatgggtgtggcatctgtccaggcctggaaccgtctcaagacagtgctggcaaagctgcagtattgagatgctaaggagctgatgccacctctttgtcttcccctaaaggagaacatggggataacatgggtgtgtgcccacaacactctaggtgcagagcccctgtggcaaagtattacagggtgtgggtggggattaccctgaatcggggattttaatgatggaagcaggcagagcctggtgggtgattctgtcaacagaaaattgcaatcatgcaggggctgggagggttaggatgaaaaaactggggccattggaggcccactgtaggtgggagggagctgattttggggtggggggtgggactagagggcaatactgaaggggttaaacaggtttttgctcctcaagaatttgtttgcctgggcccaggattggagggcttcacaccaataccctgtgtatacaagaatcagatttataatacttccccttttttgttacgtatgaacactataaaaccaaattatttttg

SEQ ID NO: 187911 - DNA, 1012 bp, Homo Sapiens
  misc_feature (823)..(835): n is a, c, g, or t
ttgggtcagaatttccctatattgaagcagaggtgaaatatgggattaaggagtatgcctgcactgctgtggatatgatttcacgtcgtactcgcctggcctttctaaatgtccaggcagcagaggaagccctacccaggattgttgaactgatgggcagggaactgaattgggatgattataagaagcaggaacaacttgaaacagccaggaagtttctatattatgaaatgggctataaatctcgatcagaacagttaacagatcgctctgaaattagcctactgccttcagacattgacaggtataagaagagatttcataagtttgatgcagaccagaaaggctttattaccattgttgatgttcagcgtgtattagagagtatcaatgtccaaatggatgaaaatacactccatgaaattctaaatgaagttgatttgaataaaaatggacaggttgaactcaatgaatttttgcagctgatgagtgctattcaaaaaggaagggtatctggaagccggcttgctatactaatgaaaactgcagaagagaacctcgacagaagagttccaattccagtggaccgtagttgtggaggattgtgagtctgggcagtaaatccacagccaacaaacatagaaacgacaaatcaccatgtaacaaccagagatgactgaaaccactctgaaataatgaatgtggatagctgccttttttaacactagaaaacattccaaaactttaaggtgttggtgtatttgccagctttatttgctgtactttatttgtatttgccattcagtctagcttttaagtatannnnnnnnnnnnnctcattttcaatgcacattagttttgcatctgttttgtgacctgttagatgtgacacattctctttttgtttattcccttattctaaatgagttctaaaacataatattttggcaaaaattgaaaaaagctggagacattttgtgacatgcatacagatagcatggtgttattaaaa

SEQ ID NO: 187912 - DNA, 934 bp, Homo Sapiens
  misc_feature (490)..(502): n is a, c, g, or t
ttggccagaaaggctttattaccattgttgatgttcagcgtgtattagagagtatcaatgtccaaatggatgaaaatacactccatgaaattctaaatgaagttgatttgaataaaaatggacaggttgaactcaatgaatttttgcagctgatgagtgctattcaaaaaggaagggtatctggaagccggcttgctatactaatgaaaactgcagaagagaacctcgacagaagagttccaattccagtggaccgtagttgtggaggattgtgagtctgggcagtaaatccacagccaacaaacatagaaacgacaaatcaccatgtaacaaccagagatgactgaaaccactctgaaataatgaatgtggatagctgccttttttaacactagaaaacattccaaaactttaaggtgttggtgtatttgccagctttatttgctgtactttatttgtatttgccattcagtctagcttttaagtatannnnnnnnnnnnnctcattttcaatgcacattagttttgcatctgttttgtgacctgttagatgtgacacattctctttttgtttattcccttattctaaatgagttctaaaaacataatattttggcaaaaattgaaaaaagctggagacattttgtgacatgcatacagatagcatgtgttattaaaaagagttgcctattgaaatgatcgtgtttctggagaaattaagcttatagacagcatgtgttattaaaaagagttacctattgaaatgatagtgtttctggagatttctcagccccatcttcctccagcttgtctaccttcctcatgcaaacaatattccacatttttatatctagagcatgactggctaactggagagggaaaggaaaagtttaaatctggttactggagcaagtctcaaagagaaactctgaaa

SEQ ID NO: 187913 - DNA, 946 bp, Homo Sapiens
  misc_feature (62)..(70): n is a, c, g, or t
ttggctcaatctgtttttacctttaaacagtgaattttacatgaatgaatgggttcttcacnnnnnnnnnagtatgagaaaattatacagtgcttaattttcagagattctttccatatgttactaaaaaatgttttgttcagcctaacatactgagttttttttaactttctaaattattgaatttccatcatgcattcatccaaaattaaggcagactgtttggattcttccagtggccagatgagctaaattaaatcacaaaagcagatgcttttgtatgatctccaaattgccaactttaaggaaatattctcttgaaattgtctttaaagatcttttgcagctttgcagatacccagactgagctggaactggaatttgtcttcctattgactctacttctttaaaagcggctgcccattacattcctcagctgtccttgcagttaggtgtacatgtgactgagtgttggccagtgagatgaagtctcctcaaaggaatggcagcatgtgtcctttttcatcccttcatcttgctgctgggattgtggatataacaggagccctggcagctgtctccagaggatcaaagccacacccaaagagtaaggcagattagagaccagaaagaccttgactacttccctacttccactgctttttcctgcatttaagccattgtaaatctgggtgtgttacatgaagtgaaaattaattctttctgcccttcagttctttatcctgataccatttaacactgtctgaattaactagactgcaataattctttcttttgaaagcttttaaaggataatgtgcaattcacattaaaattgattttccattgtcaattagttatactcattttcctgccttgatctttcattagatattttgtatctgcttggaatatattatcttctttttaactgtgtaattggtaa

SEQ ID NO: 187914 - DNA, 991 bp, Homo Sapiens
gttttcctaaaattcccttttccactggtgtgtggtgcaagatgaggcacattttccatggatggtgaacagagggaggagccttttgatcacaaccaggtcaccccacttctaagccactgtgcctccagccccacaagactaaggagagagagcgcagcgtggtggagagtgagctgtgctgggaccattgtttccgtaacctcgttttctgtgtccagctgacacaccttcaaagtggcatcaggtcctaaactgtagcttgcaatgtgcctgtttccagaaaccaagtgaaagtgcttttagacagtgttcccatgcaagagtcccttcccagcttttttctggaaatgcatgtttctctgaactctgagtcccaagaaaaatcacttgagacaccaagaaaatgggggaagtgctaaaattgtgtgggaattcaagcttaacaataaacatcaagacatttttgataaaaatgaatccactgacatcggggaggagcaagagaacagcacgctgacactgggtcagaggctaagaccgacatttctgggaaccactcccggaagggcacagaggagacgctttcagcctctcatcagccagcctggcctgtagctgctgcacgttatgagtgtgttcctggcatgactgcttctaacaaataaatgctgaggcagtgtcacgctggtgtctgtcctccttacagaatgcctgaacagttccattgactcaaagtgaagatcaaaagaaccaaatgacagcaatagccaagtgtaatcatcagtaaccctgtgttctatccacagttaaaagaatattggcagagaaacagccttggtgttccagcaggagtgaagaggaacaggaaaacaagtggcagtagccctgaaacagccacttctggtggttgccactcacctgaggatgtgagtcttggcaggccaggcttctggggacagggggcccaaggcacagtagacgagatgga

SEQ ID NO: 187915 - DNA, 1373 bp, Homo Sapiens
ttgtacaaaaaagttgggtacactgatccataatatagatatagttatttgagtttgtgctaatccttatttatgcttctttgatagtcctttagtgaagaagattcatttaaaaaatgttcatctgaagttgaagctaaaaataagattgaagaactacttgctagtcttttaaacagagtatgccaagatggaaggaagcctcatacagtgagattaataatccgtcggtattcctctgagaagcactatggtcgtgagagtcgtcagtgccctattccttcacatgtaattcagaaattagggacaggaaattatgatgtgatgaccccaatggttgatatacttatgaaactttttcgaaatatggtgaatgtgaagatgccatttcaccttacccttctaagtgtgtgcttctgcaaccttaaagcactaaatactgctaagaaagggcttattgattattatttaatgccatcattatcaactacttcacgctctggcaagcacagttttaaaatgaaagacactcatatggaagattttcccaaagacaaagaaacaaaccgggatttcctaccaagtggaagaattgaaagtacaagaactagggagtctccactagataccacaaatttttctaaagaaaaagacattaatgaattcccactctgttcacttcctgaaggtgttgaccaagaagtcttcaagcagcttccagtagatattcaagaagaaatcctttctggaaaatctagggaaaaatttcaagggaaaggaagtgtgagttgtccattacatgcctctagaggagtattatctttcttttctaaaaaacaaatgcaagatattcccataaatcctagagatcatttatccagtagcaaacaggtatcctctgtatctccttgtgaaccgggaacatcaggctttaatagcagtagttcttcttacatgtctagccaaaaggattattcatattatttagataatagattaaaagatgaacgaataagtcaaggacctaaagaacctcaaggattccactttacaaattcaaaccctgctgtgtctgcttttcattcatttccaaacttgcagagtgagcaacttttctccagaaaccacactacagatagccataagcaaacagtagcaacagactctcatgaaggacttacagaaaatagagagccagattctgttgatgagaaaattactttcccttctgacattgatcctcaagttttctatgaactaccagaagcagtacaaaaggaactgctggcagagtggaagagaacaggatcagatttccaccattggacataaataagcatattcagcaaaaaggtctgaaaagcaagggaata

SEQ ID NO: 187916 - DNA, 1271 bp, Homo Sapiens
ttggctaagagctactataaacttccaggtgatagtattagctctttcatcatccattatttatcacattttttcccttcaaacttattactatcctgagaaaaacgcagtgcacaaagaaacagtaattaagaggactgaagaccctaccctaagtggagtttcatgtctttgtaatttttcgatgctttcacacataatccaggagaaaactaacgtcactctgcattcttccttcacaggtaccatgttttaaggaactgtcagttgctcagagataataagcagcctgaatttctttttatttctttgcatattgtgcaggagttcatgatcaagtgttgcccacaccaaatgcttcatccagagtcatagtacatgtggatctggattgcttttatgcacaagtagaaatgatctcaaatccagagctaaaagacaaacctttaggggttcaacagaaatatttggtggttacctgcaactatgaagctaggaaacttggagttaagaaacttatgaatgtcagagatgcaaaagaaaagtgtccacagttggtattagttaatggagaagacctgacccgctacagagaaatgtcttataaggttacagaattactggaagaatttagtccagttgttgagagacttggatttgatgaaaattttgtggatctaacagaaatggttgagaagagactacagcagctgcaaagtgatgaactttctgcggtgactgtgtcgggtcatgtatacaataatcagtctataaacctgcttgacgtcttgcacatcagactacttgttggatctcagattgcagcagagatgcgggaagccatgtataatcagttggggctcactggctgtgctggagtggcttctaataaactgttggcaaaattagtttctggtgtctttaaaccaaatcaacaaacagtcttattacctgaaagttgtcaacatcttattcatagtttgaatcacataaaggaaatacctggtattggctataaaactgccaaatgtcttgaagcactgggtatcaatagtgtgcgtgatctccaaaccttttcacccaaaattttagaaaaagaattaggaatttcagttgctcagcgtatccaaaagctcagttttggagaggataactcccctgtgatactctcaagaccacctcagtcctttagtgaagaagattcatttaaaaatgttcatctgaagttgaagctaaaataagattgaagaactacttgctagtcttttaaa

SEQ ID NO: 187917 - DNA, 1573 bp, Homo Sapiens
ttctggagaactgtaaagggcatctaacccaatgccctcattttacagacgggaaaatgggtcatggaggagtgacttcaccaacatcactcataggtgcttgtgtccgtggtgagaagggtgatggagagaagtggctgcagttcccacccatggagaggtcactggtgaatcccagctaaagaggaaggacaggcccggcctgagtcccacaggtgggctcagcccctctccttaccgaatgtagccaacttgaggccggtgcagaagctgccagcgataggaggtcttgtcccgccagcccacatttcgtgggtctgtccacagcagtcgtacctgatcaggggtgtggccagtatgccacagggcatttcggaggtgctcacctgggccagacactgatgtcactgccttgagctgcagcccgggctgggcaaccgcccggaagggtgtagcctgccagtaggtctgctcggtctgcttccacatgactacgtagaagcggccactgtcttgataactgaagagaaagcctgcgtagtcatcatcagtcactgtgttcacatggaaggtgccttcaaagtccacaccattgaaggccgtgtatccaactgccaagccagggtcactgttcatggtctgaacgatttccatgccctggttgagcacaacccagtttgggtcaatctgagcatcaccctcaggatccaggacgacggtctgataggcccgaaaatccgtaagcgttacctctgcactttcaggacacacatccagggggtcgaccacagcatcattgtcaaagtcatcctcacacacatcaccaacgccattgccatctgagtccttctgattgggattgggtaccaggcggcagttatcgggaccaggaggcacataatctgggatgccatcattgtcatcatccccatcacactcatctccaagtccatcgttatcagagtccagctgggagctatttggcagctgtgggcagttgtccttggtgtcctgatgcccatccccatcgctgtcttcattagtatcacagacatcccccaccaggtcgctgtctgcatctgtctgggtaggattgctcatttcagggcagctgtcgcaagcatctcccaccccgtcctcatccctgtctgtctgtagtgggttggggactttagggcaattgtccaatccattggggatgccatccccatccacgtcgttgtcacaggcatctccttccccattgccatctgtgtccttctggtcattgttgggaacgttggggcaattgtcacaggcatcaccaaatgaatctgtatctgagttctgctggtctttgttggggaacagccggcagttgtcctcaacattcttgatcccatccccatcagcatcatcatcacactggtcccccacaccatcattatcagcatcttcctgcccagagttgggtgtcaaaaggcagttgtcctgtttgcagtgtttgttgttgtccatgcagggcagtgcttggtctgggtagccatcgatgtctgtgtcgagtcccacacacgccaacttttttgtacaaagt

SEQ ID NO: 187918 - DNA, 996 bp, Homo Sapiens
ttggctcaaggggaaaggaacctattgaaagggtttagggctgtgggcctattcttgagtaaatcatctgtgtgaaattagttcttttgtcattacaggcaactctggtagctctccttgtctggttgttttgaagaaagaagagtagaagaaaaagttgagtaaatcatgtcggagttactggacctttcttttctgtctgaggaggaaaaggatttgattctcagtgttctacagcgagatgaagaggtccggaaagcagatgagaaaaggattaggcgactaaagaatgagttactggagataaaaaggaaaggggccaagaggggcagccaacactacagtgatcggacctgtgcccggtgccaggagagcctgggccgtttgagtcccaaaaccaatacttgtcggggttgtaatcacctggtgtgtcgggactgccgcatacaggaaagcaatggtacctggaggtgcaaggtgtgcgccaaggaaatagagttgaagaaagcaactggggactggttttatgaccagaaagtgaatcgctttgcttaccgcacaggtagtgagataatcaggatgtccctgcgccacaaacctgcagtgagtaaaagagagacagtgggacagtccctccttcatcagacacagatgggtgacatctggccaggaagaaagatcattcaggagcggcagaaggagcccagtgtgctatttgaagtgccaaagctgaaaagtggaaagagtgcattggaagctgagagtgagagtctggatagcttcacagctgactcggatagcacctccaggagagactctctggataaatctggcctctttccagaatggaagaagatgtctgctcccaaatctcaagtagaaaaggaaactcagcctggaggtcaaaatgtggtatttgtggatgagggtgagatgatatttaagaagaacaccagaaaaatcctcaggccttcagagtacactaaatctgtgata

SEQ ID NO: 187919 - DNA, 1187 bp, Homo Sapiens
  misc_feature (924)..(933): n is a, c, g, or t
tgtacaaaaagttggctgggcaaatacctaatggatgccaaagagaaatgcccatttgtaaatgagaaaaatgcccatttgtgcacaagaaaatggtgaattcaggctatccaaaacttcacattcaacctaatttactgtataaatagtatcaataaatatttgtgttaatgagaactaatattctgactaattatctaaagtgtttcactagtacaccaggaaactacagattgagattagggggtgggaggaaagaaacctgggctagagattaaaacattcctaaatttagcagaatttcagaaatgatttttgcagattcattagaaaagaaaaattgtcatttaatcttaagttttggatgtagctcacatgtcaccaccaccagatagtgttacagcatgtatccatcatgttgcattgacacatcaaacttgtgtgtgtttgttttgattgccaaaagggcttaatatcagttgtacaatctttctgaactttatagttcctggctcaggaaagatggcctttgctattgaagccaacttcttcacatgctgttatctttacagaactaagagatcttgtttctattagcaggttttcatgataggaaagaacaagtagtgtgtgtctttattcttgatacaacaccacctcggtgcttgcaacctggaacaaaaccataccatgagagagagggggaaaaaaatctatgcacttaacctacaaaatctctggtgatgacagttgtattgttgctattacatggcataacggtctattatgtggtaggaaaatatagcctgctaaatcctacttaagttgatccactttaaactgagtaactgtataaaacatctattgaaaattcttttccttttgacttagattctgccttacatcatttttgcatttttggtnnnnnnnnnnccctactacgtatgactctaacctgatacttgctctctaatggctcttaatatatccttgaaatcggctatttcaattttatcagacttttaccagagtaaaacttgcttctgtagcaacctctcattttttattatgagtctgtttttaaatacttaatttgaacagctctaagatattgtcacttcgtcatctaaaagcttttagagatttgaacataagttcatttcctgttaatcaaagacattccgtaa

SEQ ID NO: 187920 - DNA, 1512 bp, Homo Sapiens
ttggagctgcctgaagtagtgcagggtcagcccgcaagttgcaggtcatggcgctggctgctcgactgtggcgccttctgcctttccgacgtggagccgccccggggtctcgtctccctgcggggacttcgggcagccgcgggcattgcggcccctgtcgattccgcggcttcgaggtaatgggaaacccaggaactttcaaaagaggccttttactctcagctttgtcgtatttgggttttgaaacttaccaggttatctctcaggctgctgtggttcatgccacagccaaagttgaagaaatacttgaacaagcagactacctgtatgaaagcggagaaacagaaaaactttatcagttgctaacccaatacaaggaaagtgaagatgcagagttactgtggcgtttggcacgggcatcacgtgatgtagctcagcttagcagaacctcagaagaggagaaaaagctattggtgtatgaagccctagagtatgcaaaaagagcactagaaaaaaatgaatcaagttttgcatctcataagtggtatgcaatctgtcttagtgatgttggagattatgaaggcatcaaggctaaaattgcaaatgcatatatcatcaaggagcattttgagaaagcaattgaactgaaccctaaagatgctacttcaattcaccttatgggtatttggtgctatacatttgccgaaatgccttggtatcaaagaagaattgctaaaatgctgtttgcaactcctcctagttccacctatgagaaggccttaggctactttcacagggcagaacaagtggatccaaacttctacagcaaaaacttacttcttttaggaaagacatacttgaaactacacaacaaaaagcttgctgctttctggctaatgaaagccaaggactatccagcacacacagaggaggataaacagatacagacagaagctgctcagttgcttacaagtttcagtgagaagaattgagaacttttcagagaagatttatgaaatagctaataaacattgccttttcttttaattctaaacttaatatatgaactataactgttctacggctttttaaatgttgtgaccatttaaccgtgtaaatataaaatattctaggcttcttcacaaataatagggtaaaataaataatcgccataagagtggtagaaataaatctccatggctcaggcaaagagattattttgcatcctggataccagcaatgcaaaatggtatgagatttctaaggattgatcacattgggatgggagatcaagcaaagaaatatttgtagaggaggggaaatggatctataggggatatacagggggatggattttcaaattggattgattctaagttgaaatcttgaagagaaatgtggtgacagtggttaggatgttgtgggttcctgacataaagtagttaaatgatatatcttggagctaacctgtgtaagtaaagaactaagtaagagatgactaaaaatggagta

SEQ ID NO: 187921 - DNA, 1513 bp, Homo Sapiens
aaatatcgcgcccagggacacaccgaggttgaagatagtgtcgtcaatgatggtcaggtactgttcgtagaagacataaaacacactgtaaggaaatactcggtaggcactgccgttaatgcccatggtttcggtgacattactggctataagtcgggctttcttcagagcgtcaataaagtcagcagaggtctgcagcacggtgtggtaggtcatgaagtacgtggctccgaccctggtgccatggccaaggaggatgttaactgcagaactataggcagcatgtccccctttgccacacttggggttagggttatccgaaaggaacatgggcaggaatctcatgaagtctcccccctgaggcctctgtttgccttccggagtcagaggcctgcagcgaacgcaggcagggtcaaccactgaagcattgcagaactggtcagtgatattgtccactcgacagcaagacgactgtggcttcacccagtcgaaataatcgtcgatccaggacgagggggcgaagcctattcgggtataattgtccagctgcgccgcgttaaatatctgctgcaccagggaatcattgttgcagcccatgccgccgcacaccatgttctgccccttggaagaagtgtagtcgtgcccttcctccaggacaaagtacacaggcggacccgcatgcaggtactgactgatggatttgaaataatccaccatgtaggagtcatctggcatcgaaagagactgatccaatccaacatctactttgttcaggactgcgatgctgaatgacagaacacccacaaatattgctatcacaattggtctcatccagtcctttagcagaagtggagaataggagtttttgaagaagcgaaacaaacagctctctgaggcctggacgcttgttccatcttcagcacctctgacacagcaaaagatgtctagccgatttttctgaggggacagagggaaacaaaggttatacccgctagctgcttcctctagattctagactcaaattaaatagactataatcctggcaccaacttacctcttgacgtttaatgtctaaccccaagagactcacgaaacaggtaatctgcagaagaaagtcaatgaagactgccaatcccgcaaagagagagaaggtgtgcacggctggcatcacggacaatgctcctaagaaaaatgctacagtctcagaaaaggatgacaggaacatactgggagccacttctcctaggaccctgcccagctgctgatccagggtttccccttgaagacgttcatctctctggtaggcctgcaccagaatgaagatgttgtccactccaacagccagcaccaggaacgggatgacttcaatcacaatgagggtcaagggcaacccaatgtagctgaagacacccaaggagcaagccaccgagctcagcacgatcaagatgcccgcgatgcctagtgagaccttcgaatccaccagaagcctgcgacagcttttcatgtgccccaa

SEQ ID NO: 187922 - DNA, 1374 bp, Homo Sapiens
  misc_feature (985)..(999): n is a, c, g, or t
aaacatcaattggctttttgtaaactaaaaggagactaaccaagtgtgtttcccagttctgtacaagcagaaggccacaggaggattttacataagaagcacagggaaaagaattgttaattctgcgtgtgtgtttttgtttctcagaattgtttggaagaactttgtccagtcagaaatgagtaaaaacaagatgtaagaaacattaaaacagggggcatatggtcttaagagataatcttggagaatatagcaaaagacaaattgctccattagatattataatttggtatgtaacatgaacatttaaaattctgattaaagtgactaaaagggtttgttttttaaaaaaaatcaaaacagaacttacgggataaaactcaaaataaatttactctcagtagtaacttgatgtaggaatataagtcctctcactttgataaacatgaatataaaatattgctgtctgtattctagggtttcctacattttctgtaaagagtgattcatgctatgtcatatgtaaatgactcaacattttgagctaaaaggctgttcacaatatacacattctttacttacaaagcaaaataagcttaacacctttatattaaaaacccgggatacagcaggattagtagcaccgtgaaaaataattcttcccacaaactgcagtcttttattttactcaatgtgactcttctcttaattgaatttttaatgtaccattttagtaactgggcaaaatatataattttcatcttataattcttggagaaagtcattctggacccaaaaagtaaattcacttccttatttctttagtagaaaaataatagagactttgctctggcgcattgctgaggtacatctgaatcttcatggttactagtcagcatgttatcttgatcatatatagtagcaccattgacggcagcagtagtaaagttggggtaacaatgagacactgcatcctaggaatttnnnnnnnnnnnnnnncacattttaaaacacaaaaggaattcttcaaaatgttatgtcctcttcatgcacacttgacatcggctaattcgtgtcctcaagtctcctgctttcagcgtttctgactgaggtttacatcatgaaggaataaccaatccacagagaatcccatccctgaggacaatggggaatctggatcgtctgactgtgaactgcgatcaccacagctggagcttcacatactgcacatcgactaatgaatggctggatgctctggccctttaggggttgcatgctcattggcatgggctctggggtagagagccagtaagaatagtcatttcttgaagcaaagttgcaaacattattgatgttgcggaacatgaaagccaa

SEQ ID NO: 187923 - DNA, 1730 bp, Homo Sapiens
ttggctatccttctggcggagcgtgcttcccgctgcggggacgttcgagcaatgggccctgctgagatccgcgcgttggttgctgcgtgccggggcggccccgcgcctcccgctctccctgcgcctcctccctggcggcccgggccggctgcatgccgcctcctatctgcccgccgctcgcgccgggcccgtggccggaggactactgagcccagccaggctgtatgccattgctgccaaagaaaaagatattcaagaggagtccactttttcttctaggaagatttccaatcaatttgattgggctctaatgagactagatctttctgttcgaagaactggccgcattccaaagaagcttctacaaaaagtttttaatgatacctgccgctcaggtggcctaggtggtagtcatgccttgcttctactacgtagttgtggttctctcttgcctgaactaaagcttgaagagagaacagaatttgctcataggatatgggacacacttcagaaattaggtgctgtgtatgatgtgagtcactataatgctttacttaaagtctatcttcaaaatgaatataaattctcaccaactgatttcctggcaaaaatggaggaagcaaacattcaaccaaatcgagtgacataccagagattgattgcttcttattgtaatgtaggagatattgaaggtgccagcaagattcttggatttatgaaaactaaggatctcccagttacagaggcagtattcagtgcccttgtgacagggcatgccagagctggtgatatggagaatgcagaaaacattctcacagtgatgagagatgccggaattgagcctggtccagacacatacctcgcattattgaatgcatatgctgagaagggcgacattgaccatgttaagcagactctggagaaggtggagaagtccgagcttcaccttatggaccgtgatttactgcaaattatttttagcttcagtaaagctgggtatcctcagtatgtctcagaaattttggaaaaagttacatgtgaaagaagatatattccagatgcaatgaacctcattttacttttagtcactgaaaaattggaagatgtagcgttgcaaattttactagcatgccccgtatcaaaggaagatggcccaagtgtctttggcagtttctttttacaacactgtgtgactatgaatacgcctgtggagaagctaacagactactgtaagaagttaaaggaagtccagatgcactcctttcctctgcagttcaccctccattgtgctttactcgccaataaaactgatttggcaaaagccttaatgaaggctgtgaaggaggaaggttttcctatcagacctcactatttctggccattgctagttggacgtcggaaggaaaaaaatgttcaaggtataattgaaatcctcaaaggaatgcaagaattgggagtacatcctgatcaggaaacatatacagattatgtgattccatgctttgatagtgtaaactcagcacgagccattttgcaggaaaatggatgtctgtctgatagtgatatgttttctcaagctggattgagaagtgaagcagcaaatgggaacttagactttgtattatcatttttgaaatcaaatacattgcccatctcggctgcagtctataaggaagtagcctactgctaggcttcacgaggtctatgaatataaatctttgggagcgaga

SEQ ID NO: 187924 - DNA, 2165 bp, Homo Sapiens
agcaatgcttttttataatgccaactttgtacaaaaaagttggggaaggttttcctatcagacctcactatttctggccattgctagttggacgtcggaaggaaaaaaatgttcaaggtataattgaaatcctcaaaggaatgcaagaattgggagtacatcctgatcaggaaacatatacagattatgtgattccatgctttgatagtgtaaactcagcacgagccattttgcaggaaaatggatgtctgtctgatagtgatatgttttctcaagctggattgagaagtgaagcagcaaatgggaacttagactttgtattatcatttttgaaatcaaatacattgcccatctcgctgcagtctataagaagtagcctactgctaggcttcaggaggtctatgaatataaatctttggagcgagataacagaattgttgtacaaggatggacgttattgccaggagcctcgaggaccgacggaagctgttggctattttctttataacttgattgacagcatgagtgactcagaggtacaggccaaggaggagcatttgagacaatacttccatcagctggagaagatgaatgtaaaaattcctgaaaatatctacagaggcattcgtaatctcctggaaagctaccatgttcctgaattgattaaggatgctcacttgttggttgagagtaagaatttagactttcaaaaaactgtgcaacttacatcatctgaattggagtccacacttgaaacactaaaagctgaaaatcaacctataagagatgtcctaaagcaactcatattagtgctttgttcagaagagaatatgcaaaaagcccttgaattgaaagcaaaatatgaatccgacatggttactggtggctatgcagctttaataaatttatgctgtcgacatgataaagtagaagatgccttgaacttgaaagaagaatttgaccgcttagattcatctgctgtccttgacaccggcaagtatgtaggccttgtaagagtattggcaaagcatggcaagctccaagatgctattaacattctgaaggagatgaaagagaaggatgttcttatcaaagatacaacagccttgtcctttttccacatgctaaatggcgcagctttaagaggtgaaattgaaacagtaaaacagttgcatgaagccatcgtgactctagggttagcagaaccatccaccaacataagtttcccattggtcactgtacacttggaaaagggcgacctatctactgctcttgaggtcgccattgactgctatgaaaagtataaagtattaccaaggattcatgatgtcttgtgtaaactggtagagaaaggcgagactgatctaattcagaaagcaatggactttgtgagccaagaacaaggtgaaatggtgatgctctatgatctcttctttgccttcctacaaacaggaaattacaaagaggccaagaagatcattgagactccagggattagagctcgatctgcaaggcttcagtggttttgtgacagatgtgttgcaaataatcaggttgaaactctggaaaaattagtggagctgacacagaagctatttgaatgtgatagagaccagatgtactacaatctgctaaaactgtataaaataaacggtgactggcaaagagctgatgcagtctggaataaaatccaagaagaaaatgttattcctcgtgaaaagacattaagattattagcagaaatccttagagagggtaaccaggaagttccgtttgacgtacctgagaataactttgttttaaagttgtggtatgaagatgaaaaacattccctgaattcttcgtcagcctcaaccacagaacctgatttccagaaagatatattgattgcctgccgattgaaccaaaaaaaaggggcatatgatattttcctgaatgcaaaagagcaaaacattgtgtttaatgctgaaacctacagcaatctcattaaattactgatgtcagaagattattttacacaagcaatgggaagtgaaagcattcgcggagacccacatcaagggcttcacactgaacgatgctgccaacagccgcctcatcataacgcaagttagcgggattatttgaaagagctgtgacacactgaaaacagtattgggatcagc

SEQ ID NO: 187925 - DNA, 1459 bp, Homo Sapiens
ttggcgggtgtcctcgcgctgctagtccgcgcgcagcctggcagtttgccgcttcctcgtcctccatcctgcgtccatggccaccgctgcgactgaggagcccttcccttttcacggtctcctgccgaagaaggagaccggagccgcctccttcctctgccgctacccggagtatgatgggcggggggtgctcatcgcagtcctggacacgggggtcgacccgggggctccgggcatgcaggttacaactgatggaaaaccaaaaatcgttgatatcattgatacaacaggaagtggcgatgtgaatactgctacagaagtagagccaaaggatggtgagattgttggcctttcaggaagagtgcttaagattcctgcaagctggacaaatccctcaggcaaatatcatattggcataaaaaatggctatgacttctatcctaaggcactcaaggaaaggatacagaaagaacggaaggaaaaaatctgggaccctgttcacagagtggcccttgcagaagcctgtagaaaacaggaagaatttgatgttgccaacaacggctcttctcaagcaaataaactaatcaaggaggaacttcaaagtcaagtggaattgctaaattcttttgagaagaaatacagcgatcctggccctgtatatgactgcttggtatggcatgatggcgaagtctggagagcctgcattgattctaatgaagatggggacttgagtaaatctaccgtgttgagaaactacaaagaagcccaagaatatggctcttttggcacagctgagatgttgaattactccgttaatatatacgatgatggaaacctgctctccattgtgaccagcggaggagctcatgggacacatgtagctagtatagctgctggacactttccagaagaacctgaacggaatggggtagctcctggtgctcaaattctttccatcaagattggtgatacaagactaagcacaatggaaacaggcacaggcctcataagagctatgatagaagttataaatcataagtgtgatcttgtcaactacagttacggagaagcaactcactggccaaattctgggagaatttgtgaagtaattaatgaagcagtatggaagcataatataatttatgtttcaagtgctggaaataatggtccatgcctgtctacagttggttgtccaggtggaactacatcaagtgtgataggtgttggtgcttatgtttctcctgatatgatggttgctgagtattcactgagagagaaattacctgcaaatcaatatacttggtcttctagaggacctagtgctgacggggcccttggtgtgagtatcagtgcgccaggaggagccattgcttctgttcctaactggacactgagagggacgcagctgatgaatggaacatctatgtcttcccccaatgcatgtggaggcattgccctg

SEQ ID NO: 187926 - DNA, 1012 bp, Homo Sapiens
agacaatgggcccctcctcttgccaacactttggagcaggacagtgcagggcctgcccctgtgcagcaggagggggtgcagtgggaaaattcaagtcggatccctgtgctgtgcctgcccctggtgaggggggatgggccacccagcagtgcccatgggcacagagtgcagcccacagagcccagggtggcacagcttggtgtggcatcatccctcggggaaggggcgggagggctgtgctcttcccccacaggaagacactgggagcgggcagcccctgaagtcaggacagagggcgccgggcagcggctgggttggtgcagcaggagccgaggcaagcgggcccctcccgggggagctgggccaggctggggccacgggaaatcacaataattacaaaataaaaccttttccgcttggcgggaaaacaaataataaaaattcgacaaaataaattagaggtttataaaaggcgggtgggcgggtcagaggccgttggcactgccgcgctggaccagcggcaccttgctcagctccaccacgggcgagcgcggcttgttcttcatcttgggcacccgctgcaccagctgctgggcctcgcggtaggcgtcgcgcagctccttcttccactgcaccagctcagggtcgctatcgcactgcaaaatgaactgtttcccaccgcggatcttgaggagcaggcacttgcgctccttgatctgcgtctcctccaccgactggatctcctccatggtcagcaggctctgcggggcctcgccctcgccccgccactcgaggcggttggggaacaggtagaagtaccgccgctgccactgggtcaggaaggggttgcccatcttggacatgtagccatgcatgatgcagtccttgcccagggcgtagtcttcctcatggcccagctgcttgttcttggctttcttgcgagcctccagccggtctgtctcagcgttgatggtgtcgaagacagtctccaacttttttgtacaaagttggc

SEQ ID NO: 187927 - DNA, 1015 bp, Homo Sapiens
ctttgtacaaaaaagttgggagcccctttttcctgcatcacctggactggcagatggtcttcttgcagaagtaccctcccccgctgatccccccacgaggggaggtgaacgcggccgacgccttcgacattggctccttcgatgaggagggcacaaaaggaatcaagttactggacagtgatcaggagctctaccgcaacttccccctcaccatctcggagcggtggcagcaggaggtggcagagactgtcttcgacaccatcaacgctgagacagaccggctggaggctcgcaagaaagccaagaacaagcagctgggccatgaggaagactacgccctgggcaaggactgcatcatgcatggctacatgtccaagatgggcaaccccttcctgacccagtggcagcggcggtacttctacctgttccccaaccgcctcgagtggcggggcgagggcgaggccccgcagagcctgctgaccatggaggagatccagtcggtggaggagacgcagatcaaggagcgcaagtgcctgctcctcaagatccgcggtgggaaacagttcattttgcagtgcgatagcgaccctgagctggtgcagtggaagaaggagctgcgcgacgcctaccgcgaggcccagcagctggtgcagcgggtgcccaagatgaagaacaagccgcgctcgcccgtggtggagctgagcaaggtgccgctggtccagcgcggcagtgccaacggcctctgacccgcccacccgccttttataaacctctaatttattttgtcgaatttttattatttgttttcccgccaagcggaaaaggttttattttgtaattattgtgatttcccgtggccccagcctggcccagctcccccggggaggggcccgcttgcctcggctcctgctgcaccaacccagccgctgccccggcgccctctgtcctgacttcagggctgcccgctcccagtgtcttcctgtgggggaagagcacagccctcccgccccttccc

SEQ ID NO: 187928 - DNA, 1708 bp, Homo Sapiens
  misc_feature (280)..(288): n is a, c, g, or t
  misc_feature (810)..(821): n is a, c, g, or t
ttggctaagtttgggtttgtattttttccttctaaactcttcatgtggcagagtcttctatgttttcacagctttttcattacagaaaagaacacttgctcttctgtgattattgtcatgtattaggctaatgctgtgttgtctcccacctggaactgaattgcttggtggaacatatgctttcactgtttgtgcaatatgcatttatttcttatatgaatgctttaaagtcatttgaggttagatcttttaattcctattttctgcttcattggtcacnnnnnnnnnattgtagtataagatgttagattctgtaatcttcacattcattttagcaggtactgagtgatgctgtatatacaaataagtgtattgttttgatttttagaccaccacatggcatgcttgactatttcttatttcaaatgtctgctaatgcagagtaggctactccatgatagtgttaaaaaacaaaatttgctaacaatgtgatataaagactttaaaagttacacattatgtggagccctatctttacaaaagtttcctactgtaaagtgcttttattttcagttttcacttgatagtactcaaccataattaaagttgcataagataattgctttacatttcacatacctatatttatctgagtgctgtctaaaactgttgtgctagccaaagtaatgctatgaaatcatttgcagaattaacccgtgagttaatgttaaatgcactgttattgccatgtgaagaggcatcgactttgataccatcatgttcagaccattttatacatttcagtggccnnnnnnnnnnnnaaggaaaaaaaagcgcaaaaccaagtacatagtgacgatggcttttatttggacaaatagcttttatattttcattaaaccatgcaaaaaatactacatctttctggcacataactgtctccttaaccactgaacagttcagccatttgaataaattgtacattgtaaagcttatagtagctgattgtattattgattgtattgtatactatattaaatgtgaatttgtaccccttcattttaaaaggtcattgtgttctactgcctattttagattactttggggttggggaagggtgttttggtaagcaggattttaagtcctctctctctcgattggttttatgaagatataaggttatgctcttactaccaagctcaggattcttgattttaaaggtacaaggatagttgtgggagttttatttttggttatatttgaactgtatgaatggtaggtctgaatattgagaatttccatggtcttatgtggaggtaaaatatacagataactgatcagtttgagtgactgcaacatgttctggttgcacaacagttaggcatgctatggtttatatttgtgaagtttggatgcctgtgaagaatgattaaatacatgtttctaatattttagtgttttgtatttaggttatttattctttgtatctaaaactgaacagctactgtgctatattgattttattggtagtattgagcagaccttgtttctgcatgaaactagttgcaaaacccactattttggaaataaaaatgtattttgacatatacaaataaaatgaataaaactattttaaatgtgtgaacttttattgaagaacattttaaattttgttcctgagatatttaaatctgcatgggtatttttc

SEQ ID NO: 187929 - DNA, 917 bp, Homo Sapiens
tccaccaggatcttctcatcatccacgaacttctcaatggcggcccacagcctcctggtccgagataacttcagagaaaatggggtgttcctgaaacagcttcagggccctgagcccccacagtcttcacgcccagggccttggcaacactggtgatcttgggcagggagacaagtttgcctgcggtggtggcagcgtggaagctgtgggcaccaaaagtctccatggcgatgacaggcacgtccccccagcccacctcctgcagcccctggaccactccacacagcaggcccccgccgcccactgacagcgcgatggcccccggcttttcccacagtgtctccttcagctctttcacgatggaagcgtggccttcccagatgagggggtcatcaaaggggggaatgtagacccaacccgggttgttcttcgctagggccttggccagctcgaaggcttcatccaataactcacccaccaccttgactgtggcaccttcattcttgaggcgctcaatggtgagagcaggtgtggtgctgggcaccacgatggtggcggggacgccgagttgcctggccgcatatgcagccgccatgcctgcgttgcccgccgaggagcagacaaaatgtgcacagccttgcttggcccacctcttgcagaagtgcccaatgccccggatcttgaaggagccggagggctgggcactgtccatcttgaggtagacgctggtgccggccattttggacagggccatgctgtcacggatgggggtcttcacgtgcaggggttctccagacatcattcccggcaaaggtgatgggtctgagcaggagtcagagccaagccagcgagggagggatcaactgagtagatagcccacgaagagagggggctgaggacgggtggacagtctccaa

SEQ ID NO: 187930 - DNA, 908 bp, Homo Sapiens
ttggggcatcaccattcaagatgcatccaggggtcctggctgccttcctcttcttgagctggactcattgtcgggccctgccccttcccagtggtggtgatgaagatgatttgtctgaggaagacctccagtttgcagagcgctacctgagatcatactaccatcctacaaatctcgcgggaatcctgaaggagaatgcagcaagctccatgactgagaggctccgagaaatgcagtctttcttcggcttagaggtgactggcaaacttgacgataacaccttagatgtcatgaaaaagccaagatgcggggttcctgatgtgggtgaatacaatgttttccctcgaactcttaaatggtccaaaatgaatttaacctacagaattgtgaattacacccctgatatgactcattctgaagtcgaaaaggcattcaaaaaagccttcaaagtttggtccgatgtaactcctctgaattttaccagacttcacgatggcattgctgacatcatgatctcttttggaattaaggagcatggcgacttctacccatttgatgggccctctggcctgctggctcatgcttttcctcctgggccaaattatggaggagatgcccattttgatgatgatgaaacctggacaagtagttccaaaggctacaacttgtttcttgttgctgcgcatgagttcggccactccttagtcttgaccactccaaggaccctggagcactcatgtttcctatctacacctacaccggcaaaagccactttatgcttcctgatgacgatgtacaagggatccagtctctctatggtccaggagatgaagaccccaaccctaaacatccaaaaacgccagacaaatgtgacccttccttatcccttgatgccattaccagtctcc

SEQ ID NO: 187931 - DNA, 1693 bp, Homo Sapiens
ttgggaaggtgatttaccacctggatgaggaagagactccctacctggtgaagatccctgtccccgccgagcgcatcaccctcggcgatttcaagagcgtcctgcagcggcccgcgggcgccaagtactttttcaagtctatggatcaggatttcggggtggtgaaggaagaaatttcagatgacaacgcccgcctcccctgcttcaacggaagggtggtatcctggctggtgtcctcagataatccccaacccgagatggcccctccagtccatgagcctcgggcagaactggcgcctccagccccacctttacctcctttgccacccgagaggaccagcggcattggggactcaaggcctccatccttccaccctaatgtgtccagcagccatgagaatctggagcctgagacagaaaccgagtcagtagtgtcactgaggcgggagcggcctcgcaggagagacagcagtgagcatggcgctgggggccacaggactggtggcccctcaaggctggagcgccacctggccggatacgagagctcctctaccctcatgaccagcgagctggagagtaccagcctgggggactcggacgaggaggacaccatgagcaggttcagcagctccacggagcagagcagtgcctcccgcctccttaagcgccaccggcggcgaaggaagcagaggccaccccgcctggagaggacgtcatccttcagcagcgtcacagattccacaatgtctctcaatatcatcacagtcacgctaaacatggagaagtacaacttcctgggtatctccattgttggccagagcaatgagcggggagacggaggcatctacattggctccatcatgaagggtggggctgtggcggccgacgggcgcattgagccaggggacatgcttttgcaggtgaatgacatgaactttgagaacatgagcaacgatgacgctgtgcgggtgctgagggacattgtgcacaagcctggccccattgtgctgactgtggccaagtgctgggatccctctcctcaggcctatttcactctcccccgaaatgagcccatccagccaattgaccctgctgcctgggtgtcccattccgcggctctgactggcaccttcccagcctatccaggttcctcctccatgagcaccattacatctggatcgtctttgcctgatggctgtgaaggccggggtctctccgtccatacggacatggcatcggtgaccaaggccatggcagctccagagtctggactggaagtccgggaccgcatgtggctcaagatcaccatccctaatgcctttctgggctcggatgtggttgactggctctaccatcacgtggagggctttcctgagcggcgggaggcccgcaagtatgccagcgggctgctcaaagcaggcctgatccgacacaccgtcaacaagatcaccttctctgagcagtgctattacgtcttcggagacctcagtggtggctgtgagagctacctagtcaacctgtctctcaatgacaacgatggctccagtggggcttcagaccaggataccctggctcctctgcctggggccaccccctggcccctgctgcccactttctcctaccagtaccctgccccacacccctacagcccgcagcctccaccctaccatgagctttcatcttacacctatgg

SEQ ID NO: 187932 - DNA, 2156 bp, Homo Sapiens
ttggcccgccgcgaccgcaaaggcggccgcggttctaggaacttgacgtgatggggcttcctgaggagcgggtccggagcggcagcgggagccggggccaggaggaagctggagccggaggccgggcgcggagttggtctccgccgcccgaggtcagccgctccgcgcacgtcccctcgctgcagcgctaccgcgagctgcaccggcgctccgtggaggagccgcgggaattctggggagacattgccaaggaattttactggaagactccatgccctggcccattccttcggtacaactttgatgtgactaaagggaaaatctttattgagtggatgaaaggagcaactaccaacatctgctacaatgtactggatcgaaatgtccatgagaaaaagcttggagataaagttgctttttactgggagggcaatgagccaggggagaccactcagatcacataccatcagcttctggtccaagtgtgtcagttcagcaatgttctccgaaaacagggcattcagaagggggaccgagtggccatctacatgcctatgatcccagagcttgtggtggccatgctggcatgtgcccgcattggggctttgcactccattgtgtttgcaggcttctcttcagagtctctatgtgaacggatcttggattccagctgcagtcttctcatcactacagatgccttctacaggggggaaaagcttgtgaacctgaaggagctggctgacgaggccctgcagaagtgtcaggagaagggtttcccagtaagatgctgcattgtggtcaagcacctggggcgggcagagctcggcatgggtgactccaccagccagtcccccccaattaagaggtcatgcccagatgtgcagatctcatggaaccaagggattgacttgtggtggcatgagctcatgcaagaggcaggggatgagtgtgagcccgagtggtgtgatgccgaggacccactcttcatcctgtacaccagtggctccacaggcaaacccaagggtgtggttcacacagttgggggctacatgctctatgtagccacaaccttcaagtatgtgtttgacttccatgcagaggatgtgttctggtgcacggcagacattggttggatcactggtcattcctacgtcacctatgggccactggccaatggtgccaccagtgttttgtttgaggggattcccacatatccggacgtgaaccgcctgtggagcattgtggacaaatacaaggtgaccaagttctacacagcacccacagccatccgtctgctcatgaagtttggagatgagcctgtcaccaagcatagccgggcatccttgcaggtgttaggcacagtgggtgaacccatcaaccctgaggcctggctatggtaccaccgggtggtaggtgcccagcgctgccccatcgtggacaccttctggcaaacagagacaggtggccacatgttgactccccttcctggtgccacacccatgaaacccggttctgctactttcccattctttggtgtagctcctgcaatcctgaatgagtccggggaagagttggaaggtgaagctgaaggttatctggtgttcaagcagccctggccagggatcatgcgcacagtctatgggaaccacgaacgctttgagacaacctactttaagaagtttcctggatactatgttacaggagatggctgccagcgggaccaggatggctattactggatcactggcaggattgatgacatgctcaatgtatctggacacctgctgagtacagcagaggtggagtcagcacttgtggaacatgaggctgttgcagaggcagctgtggtgggccaccctcatcctgtgaagggtgaatgcctctactgctttgtcaccttgtgtgatggccacacccttctgccccaagctcaccgaggagctcaagaagcagatttagagaaaagattggccccattgccacaccagactacatccagaatgcacctggcttgcctaaaaaccgctcagggaaaatcatgatgcgagtgctccggaagattgctcaaaatgaccatgacctcggggacatgtctactgtggctgacccatctgtcatcattcactcttcagccaccgctggctgaccatccagtg

SEQ ID NO: 187933 - DNA, 1369 bp, Homo Sapiens
ttggcttcttttttacagatggagtcatcagaacccactgtgaggaagtgacttctccttgaggtcacccagacactccaaacagagcagagcaaaagcgcctagaacttgaaattttggacctgtctccaacaccctggggatttccaccaggaagccttcagtcaccatccaggggatttttatcgccacaaagggtaattcctgctccatccctgctgtgactcagctgtgacgttgaaccacacaagccagagagaagaagataaagtcatcagagctcctactcaccagagagtgaggcccaggccaggactccacaaggctggtcccctgccctggagcaacttaaacaggccctctggccagcctggaaccctgagatggcctccagctcaggcagcagtcctcgcccggcccctgatgagaatgagtttccctttgggtgccctcccaccgtctgccaggacccaaaggagcccagggctctctgctgtgcaggctgtctctctgagaacccgaggaatggcgaggatcagatctgccccaaatgcagaggggaagacctccagtctataagcccaggaagccgtcttcgaactcaggagaaggctcaccccgaggtggctgaggctggaattgggtgcccctttgcaggtgtcggctgctccttcaagggaagcccacagtctgtgcaagagcatgaggtcacctcccagacctcccacctaaacctgctgttggggttcatgaaacagtggaaggcccggctgggctgtggcctggagtctgggcccatggccctggagcagaacctgtcagacctgcagctgcaggcagccgtggaagtggcgggggacctggaggtcgattgctaccgggcaccctgctccgagagccaggaggagctggccctgcagcacttcatgaaggagaagcttctggctgagctggaggggaagctgcgtgtgtttgagaacattgttgctgtcctcaacaaggaggtggaggcctcccacctggccctggccacctctatccaccagagccagctggaccgtgagcgcatcctgagcttggagcagagggtggtggagcttcagcagaccctggcccagaaagaccaggccctgggcaagctggagcagagcttgcgcctcatggaggaggcctccttcgatggcactttcctgtggaagatcaccaatgtcaccaggcggtgccatgagtcggcctgtggcaggaccgtcagcctcttctccccagccttctacactgccaagtatggctacaagttgtgcctgcggctgtacctgaatggagatggcactggaaagagaacccatctgtcgctcttcatcgtgatcat

SEQ ID NO: 187934 - DNA, 1504 bp, Homo Sapiens
tttgtacaaaaaagttggcagatctcccctttaaaaacgattgttagcgcagcagcaaagggcgcagagtcagagaagcgtgccttctgggaaccggccgcagcaagaccagcagggtcgacctcttagtgtgcagcagcaaatgatgcaacaatctcgtcaacttgatccaaacctgttggtgaagcagcagactccaccatctcagcagcagccactccatcagccagccatgaagtctttccttgacaatgtcatgccccacactacacctgagctgcaaaaagggccatcaccaataaatgctttcagcaacttccctataggcttgaactcaaacttgaatgtaaatatggatatgaacagtattaaagagccacagtcaagactaaggaagtggacgacagtggacagcatttctgtgaacacatctttggatcaaaactccagcaaacatggtgctatttcaagtggtttcaggctggaagagtctccatttgttccctatgactttatgaacagcagtacttcaccagccagtcctccaggttcaataggagatggctggccacgtgccaaatcgcctaacggctctagcagtgttaattggccaccagaatttcgtcctggtgagccatggaaaggttatccaaacattgaccctgaaactgacccttacgtcactcctggcagtgtcataaacaatctttcaattaatactgtgcgggaagttgaccacctcagggacaggaacagtgggtcatcctcatccttgaacaccacgctgccttcaactagtgcctggtcatccattcgtgcctccaactacaacgttcccctcagcagtacagcacaaagcacttcagccagaaatagtgattccaaattgacatggtctcctggttcagttacaaacacctctctggctcatgagctgtggaaggtccctttgccacctaaaaacatcactgctccgtcccgcccacctccgggactgactggtcagaagccacccttgtctacgtgggataattctccccttcgtataggtggaggatggggaaattctgacgccagatataccccaggttccagctggggtgagagcagctcagggagaataacaaattggcttgttctaaaaaaccttacacctcagatcgatggctcaactctgcgcactctgtgcatgcagcacggcccgctgatcacattccacctgaacctccctcacggaaatgctctggtccgctacagttcaaaagaagaggtagtgaaggcacaaaagtctctgcacatgtgtgtactggggaacactactattcttgctgagtttgccagtgaagaggagatcagtcgtttctttgcacaaagccagtctctgaccccttctcccggctggcagtctctcgggtccagccagagccggctgggctccctcgactgttcccactcattctccagccggaccgatctcaatcactggaatggttgctgggctgtc

SEQ ID NO: 187935 - DNA, 1143 bp, Homo Sapiens
ttggcagagaaggcctgaacttacaagaaggagaattcttattacaggctctgaatggctttgtattagttgtcactacagatgctttggtcttttatgcttcttctactatacaagattatctagggtttcagcagtctgatgtcatacatcagagtgtatatgaacttatccataccgaagaccgagctgaatttcagcgtcagctacactgggcattaaatccttctcagtgtacagagtctggacaaggaattgaagaagccactggtctcccccagacagtagtctgttataacccagaccagattcctccagaaaactctcctttaatggagaggtgcttcatatgtcgtctaaggtgtctgctggataattcatctggttttctggcaatgaatttccaagggaagttaaagtatcttcatggacagaaaaagaaagggaaagatggatcaatacttccacctcagttggctttgtttgcgatagctactccacttcagccaccatccatacttgaaatccggaccaaaaattttatctttagaaccaaacacaaactagacttcacacctattggttgtgatgccaaaggaagaattgttttaggatatactgaagcagagctgtgcacgagaggctcaggttatcagtttattcatgcagctgatatgctttattgtgccgagtcccatatccgaatgattaagactggagaaagtggcatgatagttttccggcttcttacaaaaaacaaccgatggacttgggtccagtctaatgcacgcctgctttataaaaatggaagaccagattatatcattgtaactcagagaccactaacagatgaggaaggaacagagcatttacgaaaacgaaatacgaagttgccttttatgtttaccactggagaagctgtgttgtatgaggcaaccaacccttttcctgccataatggatcccttaccactaagactaaaaatggcactagtggaaaagactctgctaccacatccactctaagcaaggactctctcaatcctagttccctcctggctgccatgatgcaacaagatgagtctatttatctctatcctgcttcaagtacttcaagtactgcaccttttgaaaacaacttttt

SEQ ID NO: 187936 - DNA, 1493 bp, Homo Sapiens
  misc_feature (63)..(79): n is a, c, g, or t
ttggatccttcctgatgaaccttgccttttaaggatcctccaaatgccccaagaagctgggannnnnnnnnnnnnnnnncactggggaggggaatggtgctttccagggtcctggatgtttgagtcttctcaccttccagcccggtgatatgtctggagctttaactctctatataagccctaatctttgtgttctctgcctgatcttctgtctggggtggtccaggtcacaagaagaagctgacccctgctggctttgggaaaatgctgagttcattgcctggcacaaatgcaagggcccttccccaccctgtgaattctggtctctgatgatcacttacatgtgccttgtgctttctgtttgaggggccccttgcagcccccacaggcaggtgggcattgtggagctcactacaagaactctgggaccgaccgaccaacccacttgcccagtcccgtcctgggaggtgggggtgcagtgacgacagatgggtgtgacggctgccagattcctgagacccgccctgcggtggggctacacccagccagggagtctccagaggtgaggctgttgtttaaaaacctggagccgggaggggagacccccacattcaagaggagctttcaggcgatctggagaaagaacggcagaacacacagcaaggaaaggtcctttctggggatcaccccattggctgaagatgagaccattcttcctcttgtgttttgccctgcctggcctcctgcatgcccaacaagcctgctcccgtggggcctgctatccacctgttggggacctgcttgttgggaggacccggtttctccgagcttcatctacttgtggactgaccaagcctgagacctactgcacccagtatggcgagtggcagatgaaatgctgcaagtgtgactccaggcagcctcacaactactacagtcaccgagtagagaatgtggcttcatcctccggccccatgcgctggtggcagtcacagaatgatgtgaaccctgtctctctgcagctggacctggacaggagattccagcttcaagaagtcatgatggagttccaggggcccatgcccgccggcatgctgattgagcgctcctcagacttcggtaagacctggcgagtgtaccagtacctggctgccgactgcacctccaccttccctcgggtccgccagggtcggcctcagagctggcaggatgttcggtgccagtccctgcctcagaggcctaatgcacgcctaaatggggggaaggtccaacttaaccttatggatttagtgtctgggattccagcaactcaaagtcaaaaaattcaagagtgggggagatcacaaacttgagagtcaatttcaccaggctggcccctgtgccccaaagggctaccaccctcccagcgcctactatgctgtgtcccagctccgtctgcaggggagctgcttctgtcacggccatgctgatcgctgcgcacccaagcctggggc

SEQ ID NO: 187937 - DNA, 347 bp, Homo Sapiens
ttggcttaaaactgcccaaaatacctctgtaagccttatcctttattctttcatatgttgtataataaatgtatagatttcattgaccaactaaaatgttgggtgtctgtaaatgagaccaaaacgtgggttgcttttttcataaaataatttctattgggggttactgttcaatgacagcaggtaacctataactgtgaatgcttcgtgtcgtcagtatttgcattacattcataaaagtgtgcaagtcctgtgactcccagcttaactgaaatactgttatgccacctaacttgagtacaacaaactggttttatctttcaatgacattgatgtaaaatgatatc

SEQ ID NO: 187938 - DNA, 1288 bp, Homo Sapiens
ttggcaatttgtaatgattttggaactgtgtttcaaatggactgttacagactgaaaggtgtgaacagctttgtatgtttatgaagggtaagggaatttaatacttttccacagatttttttgtaaggggaagagggaaatgtacactttttacagcagcaatattttgtatattatgtttatttcatgtggtgaatatgcaaggcggtacactacgcactggacagcatcagaaatcctctgttaatgtggactggagcatggtagatgcttgattgttttggtctcaaaatggtgtgctataaagataaaggtgaggggaagacaaagcacaccatatgtccactgttctgttctcatagaggaaattcaaatcccttttatctattagataatcaagggcactgtgatacagttttgagtaaaaagacattttttaaaagccttccagttttgtggattaaacctttttataaagatcatttataatactgttttaaaatgtgaggcaataagaattactttgtgttggatctgaggaggctttggtaaaacagtttcatctaaatgaaagtggtaatcctcttctaaaatagcaataactgaaaatgaaagtgttaattttaccttgtttgagttatcagggaacttagtaagtaatatcaaagcattttataaatgatatcaaagaagagtcaacattgatccagtcattttattttgtaatattgagggataattggttattaaactgaatagttcaggagactttacaaacctttgtttcaactttcttatctggaaataatatcatttataaagggacacttttatgtttttcccttttttatgttggttgatataacacaaagagatatttaggaaaatgcttattgatgaggtttattctatctgtttttaaagcaccgaggttgcattctagataaccttgtttattagcatggcatattttaatcattatttgagactgtcctgtgcctgattattttagctaaattcagggagattgcgtggggcaggaaagcatgcattgaaaaatttctaaccacggttatttaagcataatctgaaaacatctagcccaaaggtaagttgctattttcatcacagttgcctatgcccagggaataagatgtattctttataattgaattggtttttcccacgtctaactggaaacaaaacagaaggggcgtcataaatttgaataagcagaacatactgttctcaacatactgtaatcaaaaggaggaatttcagtgggtct

SEQ ID NO: 187939 - DNA, 1152 bp, Homo Sapiens
  misc_feature (565)..(847): n is a, c, g, or t
  misc_feature (850)..(863): n is a, c, g, or t
ttggctcttctctcacccaaagcctccaaagggactagagagaagcctcctgctcccctcgcctgcacaccccctttcagagggccactgggttaggacctgaggacctcacttggccctgcaaggcccgcttttcagggaccagtccaccaccatctcctccacgttgagtgaagctcatcccaagcaaggagccccagtctcccgagcgggtaggagagtttcttgcagaacgtgttttttctttacacacattatggctgtaaatacctggctcctgccagcagctgagctgggtagcctctctgagctggtttcctgccccaaaggctggcttccaccatccaggtgcaccactgaagtgaggacacaccggagccaggcgcctgctcatgttgaagtgcgctgttcacacccgctccggagagcaccccagcagcatccagaagcagctgcagtgttgctgccaccaccctcctgtctgcctcttcaaagtctcctgtgacattttttctttggtcagaagccaggaactggtgtcattccttaaaagatacgtgccggnnnnnnnnnnnnnnnnnnnnnnnnnnnnnnnnnnnnnnnnnnnnnnnnnnnnnnnnnnnnnnnnnnnnnnnnnnnnnnnnnnnnnnnnnnnnnnnnnnnnnnnnnnnnnnnnnnnnnnnnnnnnnnnnnnnnnnnnnnnnnnnnnnnnnnnnnnnnnnnnnnnnnnnnnnnnnnnnnnnnnnnnnnnnnnnnnnnnnnnnnnnnnnnnnnnnnnnnnnnnnnnnnnnnnnnnnnnnnnnnnnnnnnnnnnnnnnnnnnnnnnnnnnnnnnnnnnnnnnnnnnnggnnnnnnnnnnnnnngacgcgtgcctgcggtgaggaagctgggcgctgttttcgagttcaggtgaattagcctcaatcccccgtgttcacttggctcccatagccctcttgatggatcacgtaaaactgaaaggcagcggggagcagacaaagatgaggtctacactgtccttcatggggattaaagctatggttatattagcaccaaacttctacaaaccaagctcagggccccaaccctagaagggcccaaatgagagaatggtacttagggatggaaaacgggcctggctagagcttcggg

SEQ ID NO: 187940 - DNA, 1530 bp, Homo Sapiens
  misc_feature (1360)..(1398): n is a, c, g, or t
ttggagcggagaggggaggggagagagttgggcgagggagagcccccggccggctgccagaagatcccggcgggaggaagcccaagtgtcacttgaattccacccaaggagcgggcgcctgggatcagagcgtcctgtttagcaataacggctggagcacgtcctacaagttacgggagagtcggctgtgaaggagacgttcgcttatcccctgtgtccccgctcctggcccctccagacccccgccttgcctcgcgctgggaggggagatccagaatgaaaggcaagaaaggtattgttgcagcatctggcagtgagactgaggatgaggacagcatggacattcccttggacctttcttcatccgctggctcaggcaagagaaggagaaggggcaacctacccaaggagtctgtgcagattcttcgggattggctgtatgagcaccgttacaatgcctatccttcagagcaagaaaaagcgttgctgtcccagcaaacacacctgtctacgctacaggtctgtaactggttcatcaacgcccgccgcaggctcctccctgacatgctgagaaaggatggcaaagatccaaatcagttcacaatttcccgccgtggggccaagatttctgaaacgagctctgtggagtccgtgatgggcatcaaaaacttcatgccagctctagaggagaccccatttcattcctgtacagctgggccaaacccaaccctagggaggccactgtctcctaagccgtcatccccgggatcagttttggctcgtccatcagtgatctgccataccactgtgactgcattgaaagatgtccctttctctctctgccagtcggtcggtgtgggacaaaacacagatatacagcagatagcggccaaaaacttcacagacacctctctcatgtacccagaggacacttgtaaatctggaccaagtacgaatacacagagtggtcttttcaacactcctccccctactccaccggacctcaaccaggacttcagtggatttcagcttctagtggatgttgcactcaaacgggctgcagagatggagcttcaggcaaaacttacagcttaacccattttcaagcaaaacagttctcagaaatgtcatgattgccggggtgaaggcaagagatgaattgcattattttatatattttttattaatatttgcacatgggattgctaaaacagcttcctgttactgagatgtcttccatggaatacagtcattccaagaactataaacttaaagctactgtagaaacaaagggttttcttttttaaatgtttcttggtagattattcataatgtgagatggttcccaatatcatgtgannnnnnnnnnnnnnnnnnnnnnnnnnnnnnnnnnnnnnncagactgtgcaatacttagagaacctatagcatcttctcattcccatgtggaacaggatgcccacatactgtctaattaataaattttccattttttttcaaacaagtatgaaatctagttgggttgatgcc

SEQ ID NO: 187941 - DNA, 1688 bp, Homo Sapiens
ttggggagctcagcgtgctggactcactcaatgccaggatggcccggccgcagggctcctccgtccacgatggcgtccccgtgcctttccagctgcccccaggcgtctccaacgaagcccagtatgtgttcaccatccagagcatcgtcatggcgcagaagctcaaggggaccctgtccttcattgccaagaatgacgagggtgcgacccacgagaagctggacttcaggctgcacttcagctgcagctcctacttgatcaccactccctgctacagtgacgcctttgctaagttgctggagtctggggacttgagcatgagctcaatcaaagtcgatggcattcggatgtccttccagaatcttctggcgaagatctgttttcaccaccatttttccgttgtggagcgagtggactcctgcgcctccatgtacagccgctccatccagggccaccatgtctgcctcctggtgaaaaagggtgagaactctgtctcagtcgacgggaagtgcagtgactccacgctactgagcaacttgttagaagagatgaaggcgacgctggccaagtgttgagagctgcctgcgagccccgcaccaccccgcggagcacgtacccagggaccgcagccctgacgtgtctcgcctctcctcagtcgtgtgtactgtacccaagcctgagtgttaatttaactctatgttgtccgccgtgtagacatccgaggtcatttgttgcgttgaattatctgaccatccttttttactgtgactcttcccattctctttggcaagaagtccccttctcgcccccaaaccagcaagggactcccccacctgggtctgtgccctgccccgcgctgggggccgagtccttgaatgtggcttcaggggctcctgtcctgggccagggcctgatgggcaccacgtgaggggcacttggtggacagggcggggctgacgtggcctcctctggggtcgcctgcttttgacccaaaggtcctgacggttgcgtccgggggaggggaaggaagggccgctgtcgccaaggttttctctcccagaacccacagtgggaaagcggtcttgccaggcgttgtccattgtcagtgtgctcgtgggctggtgactgggtcttgggatcccaggccacgcgccagccaggctgtgggcagggcggggccagggacgccaaagagaggttgcagtcagaaccgtggacggggtgggttgaggcctctctgccacccgtcttcctggtcagcagaagtgcatctcggcttgggtttggggtggtccgcatcccctgcttgccactatgcgcaccaaggtttccccacatccttcccagcacccttaggaaggcccaggcagggcctggaagcagcggacctgggctgttctgtgttgaaggagtgtgcccagtgcccttgggcaggacctgtgagagccacctcacaggcagagcccccaccaggcagggcaaggagactccgctcactccccacggccagcgtgggcacaggactgacccttcttcagagataatgacattttatcttctcccttttgatgaaaactgtcactttagcatgtaatccattacagaatcccatgcagtgattccaggatttgaaattgtatgatgtggttacataagaatttatttgctatcgacattccccgtataaa

SEQ ID NO: 187942 - DNA, 1622 bp, Homo Sapiens
  misc_feature (189)..(203): n is a, c, g, or t
  misc_feature (1275)..(1285): n is a, c, g, or t
ttggcttgaaatagctacttttaaccatttggtatgtatgttaaatttatatcatacgttttctgtatatttatgaatgtacttttttaaaaaacaaaaatgagattctactgttctataagttgttttattattttggtaatataacttggacatctttctatgtcaattgtatatgtgtgtttgtgnnnnnnnnnnnnnnnaagtttcctccttatgcaactaatgaaattggcaaagtcactggtttaaatagaagagaacttgggcatggtgctcttgctgagaaagctttgtatcctgttattcccagagattttcctttcaccataagagttacatctgaagtcctagagtcaaatgggtcatcttctatggcatctgcatgtggcggaagtttagcattaatggattcaggggttccaatttcatctgctgttgcaggcgtagcaataggattggtcaccaaaaccgatcctgagaagggtgaaatagaagattatcgtttgctgacagatattttgggaattgaagattacaatggtgacatggacttcaaaatagctggcactaataaaggaataactgcattacaggctgatattaaattacctggaataccaataaaaattgtgatggaggctattcaacaagcttcagtggcaaaaaaggagatattacagatcatgaacaaaactatttcaaaacctcgagcatctagaaaagaaaatggacctgttgtagaaactgttcaggttccattatcaaaacgagcaaaatttgttggacctggtggctataacttaaaaaaacttcaggctgaaacaggtgtaactattagtcaggtggatgaagaaacgttttctgtatttgcaccaacacccagtgctatgcatgaggcaagagacttcattactgaaatctgcaaggatgatcaggagcagcaattagaatttggagcagtatataccgccacaataactgaaatcagagatactggtgtaatggtaaaattatatccaaatatgactgcggtactgcttcataacacacaacttgatcaacgaaagattaaacatcctactgccctaggattagaagttggccaagaaattcaggtgaaatactttggacgtgacccagccgatggaagaatgaggctttctcgaaaagtgcttcagtcgccagctacaaccgtggtcagaactttgaatgacagaagtagtattgtaatgggagaacctatttcacagtcatcatctaattctcagtgannnnnnnnnnnaaagagaattctagaattctattttgtctagggtgatgtgctgtagagcaacattttagtagtatcttccattgtgtagatttctatataatataaatacattttaattatttgtactaaaatgctcatttacatgtgccatttttttaattcgagtaacccatatttgtttaattgtatttacattataaatcaagaaatatttattattaaaagtaagtcatttatacatcttagaaaaaattacagttttgtttttacaattctgaaatatatgaaaaacttagaatatgtcatatgttattataacagatctcttcctacatcttatttttct

SEQ ID NO: 187943 - DNA, 1085 bp, Homo Sapiens
gtattactacaacaggtccattttcttttctagatgctcgaggttttgaaatagttttgttcatgatctgtaatatctccttttttgccactgaagcttgttgaatagcctccatcacaatttttattggtattccaggtaatttaatatcagcctgtaatgcagttattcctttattagtgcccagctattttgaagtccatgtcaccattgtaatcttcaattcccaaaatatctgtcagcaaacgataatcttctatttcacccttctcaggatcggttttggtgaccaatcctattgctacgcctgcaacagcagatgaaattggaacccctgaatccattaatgctaaacttccgccacatgcagatgccatagaagatgacccatttgactctaggacttcagatgtaactcttatggtgaaaggaaaatctctgggaataacaggatacaaagctttctcagcaagagcaccatgcccaagttctcttctatttaaaccagtgactttgccaatttcattagttgcataaggaggaaactcgtagtgcagcatgaaatttttatcttttatcccatttatagctgttataacttgatctgacttaataccagattctaatgaatcaaatgtaacggtacaaagcacctgtgtttgtcctctttgaaataatgctgatccatgaagggttttaaacatatctacctcacaacttacattcctaagtgaagtcaaatcccgaccatcgcaccttttgtattcattcaaaacaatacttctaaaaacttcctttgcaacaacattgaaggattctattatttcatatggatcggcttctggaaatttttcttttagttgttcctccgtatctaatcttattttgttaacagcttcatctctggaaactttgtcatgctcgtaatctgtaaaaactgcatagagtctctccatagcaagtttatgagtatatttcacaatctctggcgaaggggtaaataacttctgaggtgtcctcttggtaacaccagtttcttttaccaatttgtagggatgccctgaattatttgccaacttttttgt

SEQ ID NO: 187944 - DNA, 3030 bp, Homo Sapiens
  misc_feature (1747)..(1756): n is a, c, g, or t
ttggctctgatccagtatatacggcctgtgttcgtgtcccggtcagaccaggattctcgcaggaaaacagtagaagaaatcaagagacgggcgcagtccaacggaaagtggccacagataatgatttttccagaaggaacttgtacaaacaggacctgcctaattaccttcaaacctggtgcattcatccctggagcgcccgtccagcctgtggttttacgatatccaaataaactggacaccatcacatggacgtggcaaggacctggagcgctggaaatcctgtggctcacgctgtgtcagtttcacaaccaagtggaaatcgagttccttcctgtgtacagcccttctgaggaggagaagaggaaccccgcgctgtatgccagcaacgtgcggcgagtcatggccgaggccttgggtgtctccgtgactgactacacgttcgaggactgccagctggccctggcggaaggacagctccgtctccccgctgacacttgccttttagaatttgccaggctcgtgcggggcctcgggctaaaaccagaaaagcttgaaaaagatctggacagatactcagaaagagccaggatgaagggaggagagaagataggtattgcggagtttgccgcctccctggaagtccccgtttctgacttgctggaagacatgttttcactgttcgacgagagcggcagcggcgaggtggacctgcgagagtgtgtggttgccctgtctgtcgtctgccggccggcccggaccctggacaccatccagctggctttcaagatgtacggagcgcaagaggacggcagcgtcggcgaaggtgacctgtcctgcatcctcaagacggccctgggggtggcagagctcaccgtgaccgacctattccgagccattgaccaagaggagaaggggaagatcacattcgctgacttccacaggttggcagaaatgtaccctgccttcgcagaggaatacctgtacccggatcagacacatttcgaaagctgtgcagagacctcacctgcgccaatcccaaacggcttctgtgccgatttcagcccggaaaactcagacgctgggcggaagcctgttcgcaagaagctggattaggacccagggttgcggagagacgcggcccctcccgcgtggacatcaccgccatgagcctctttgcgagtgacctctgggctccgctcctcactcctgctgtacaggcactgtcttcagcccgagttccaggggcctcgggggctgtttgtatcttgttcctttgtgaagtgtgttgcagaaccgacgcttactgtgcgagaatcggagggcgcgcacgcggatcccccgcctggcctggaccccgtggggtcaggttccctgccgggcggggggcaccggtgccgccccgtgttctcccacggggccctggtttcgagtctctgtcacagcctcttccggcggcagcgtgcaccgggcgggcctccgtgcacactcagcacacgcctgccacacagcgtgcgcttgcgtgtcactctggcacgaaacctgtctgcctctgtggatccacagcctggcagagccgagccgtcacctgatttttcagtgtttctacctgtgtgctggagctcatgagtattttataaactccatttacgtacttcaggaaacatgcagcattttttaaaaaatgaaaattgtttttctacttcatttttccttttagagtcaaaggatatttatttataggccnnnnnnnnnnaatatagaatctgaggctgtttgggctttgacttaaatttccatcaggcctctctccagcaggtaatccctctccttccgctgggtcccctggggaggtgtgaactcaagggcctagccccaaaacactttttctgcttttcttaatccttttccagtcccctctttttttataaacgttggcagtttgatgtttctgtttcggcataacgtaatccatttcactgtagcctaaactccagtccgaggttggatattgttcaaatgagcagggcccgagctggaagcgcaaggcagccgccgccgtgccgctcctcccttgccctcaggccaggtccctgctggaagcggctgcatcttcctgtcagccctggtttccatggtgactggcgtgacgcagccacccgagtatggctgaccttcctgcagagagaggagccgcagtcttttgcttgtggaaggagacgctgggctgtgcggtgcggagggtgatgaggatgtctggtgacagccgtgcggacaccactcctctctgcagcactgcctcccagcgccagggtcgcgggcacatcccactgagagcgggggtcctgccccatcttagagtcaaaggcagaggggcttccaggccctggatggggtattttggtgtcacctgaagtccctctgacatcaccttgtttcatcattttttatgacagaattagaaacccatccttcaagcacaataatcatcacagacttgagtttgcttcctaaagcaaaggctccgggtttgtttggaaaatttttttgatttctgaaatgaattgatttttatatttggggcatctctatagaaagtgaccaccaaggccagtaagtacgggaaaaaatgtttactaacttcctcagagattcgtgatacgcgtttctcccctgacagacatttaaaaacaaccttcagctccgtttcaatcaatcacctcgacttgttttttagcatggacactgccagcaggacagacagggatggagtaaaccgaagtcaatttcagggctcttggcgtgttggacacagaagaaatcctagtgcagcctttggtagctaacagtcactgattttataattggagaatgcgtaaagattcatttttcaaggataatagcctgcaaatggccaatgaaggaggtaaataaactaagatattccgagggaagggacccaggccacctcccttccgcaggtctgcagatgaagggttttttgaatgaaatgccactgtgcattttcag

SEQ ID NO: 187945 - DNA, 1247 bp, Homo Sapiens
tttgtacaaaaaagttggagagaactagccccagttcaccaaaacaaaatactttcttcagttagaaaaagtcaagagatcacaacaaattctgagcagagatgtccactgaagaaagaatctgcatgtgtgagactattcaagcaagaaggcacttgctaccagcaagcaaagctggtcctgaacacagctgtcccagatcggctgcctgccagggaaagggagatggatgtcatcaggaatttcttgagggaacacatctgtgggaaaaaagctggaagcctttacctttctggtgctcctggaactggaaaaactgcctgcttaagccggattctgcaagacctcaagaaggaactgaaaggctttaaaactatcatgctgaattgcatgtccttgaggactgcccaggctgtattcccagctattgctcaggagatttgtcaggaagaggtatccaggccagctgggaaggacatgatgaggaaattggaaaaacatatgactgcagagaagggccccatgattgtgttggtattggacgagatggatcaactggacagcaaaggccaggatgtattgtacacgctatttgaatggccatggctaagcaattctcacttggtgctgattggtattgctaataccctggatctcacagatagaattctacctaggcttcaagctagagaaaaatgtaagccacagctgttgaacttcccaccttataccagaaatcagatagtcactattttgcaagatcgacttaatcaggtatctagagatcaggttctggacaatgctgcagttcaattctgtgcccgcaaagtctctgctgtttcaggagatgttcgcaaagcactggatgtttgcaggagagctattgaaattgtagagtcagatgtccaaagccagactattctcaaaccactgtctgaatgtaaatcaccttctgagcctctgattcccaagagggttggtcttattcacatatcccaagtcatctcagaagttgatggtaacaggatgaccttgagccaagaaggagcacaagattccttctctcttcagcagaagatcttggtttgctctttgatgctcttgatcaggcagttgaaaatcaaagaggtcactctggggaagttatatgaagcctacagtaaagtctgtcgcaaacagcaggtggcggctgtggaccagtcagagtgtttgtcactttcagggctcttggaagccaggggcatttt

SEQ ID NO: 187946 - DNA, 2979 bp, Homo Sapiens
  misc_feature (1276)..(1468): n is a, c, g, or t
ctaattacttctttaatccccatttatttttatgccattctagcctcatttattaataaaattatgtttttactttctctttcaggaaattttttaaattaatattttatatctagatctaatgctatggaaaagtgcctttttatcatttataatttcatttttcactatttccaaaaacacataaacaaatagtttcagtaggtcccagcttttactttttccatttaaaccttcttttctccatttcttccctttggcttaagaataaaagaaaaggtacattgctagaattgtttctttgggagagggtaaaagattacagaattagactgttcagcctttatataaactaaatttgtcttcatctcaaccagctaatggtaggtcttatctgaatactcatgagaattttagcatctgtgaaactccatgcaccagatgtgtgtaaatttcaggaagaaagtgttgaaagcattttctctgatgttaattagatggaaataaatcactaaaacatagtttaggtaaagcctgattatgccacttttttttaactagacagggcaaagttgtttatgttagtgtacttcttgtctatcctcagttaatttacctagacaaaaagtgtcaaaggaaatgagaaaaaggttatatctgactccctccagacctaagataattccttttgatcagatacagtcagatggagtgccttggtttttgttaattttgcctctattccagctccttaccacagcggtggtgcttaaagaaaggatcatcagcaacaggtcaggatagttctacctttgggatagggctgctttccccgtgctagtatttctgtgactgttagtggcactgaggactgcaaacttttatgcaatattcttaataccctattgatattatgcactttaatcattccaaagaagccaagaatgctgtatagtgatgattccttcctaatgaattcatcttaactatttagaatgttatgtcccttttcttttggatagccaacttggtataaatgttatatggatttttctaaaatgactatataggacttaagactttgaaatgtaatttacttataaggggaaataattatgctttagcacatcattttagaaacgtcacattttagaaacattcagcttgctaacctacatgtttgggaattcattaaaaccagttgtctatatattttgtgccatgtatataagaacattacaatatatctttttctacatatgtagtatgtgcaacnnnnnnnnnnnnnnnnnnnnnnnnnnnnnnnnnnnnnnnnnnnnnnnnnnnnnnnnnnnnnnnnnnnnnnnnnnnnnnnnnnnnnnnnnnnnnnnnnnnnnnnnnnnnnnnnnnnnnnnnnnnnnnnnnnnnnnnnnnnnnnnnnnnnnnnnnnnnnnnnnnnnnnnnnnnnnnnnnnnnnnnnnnnnnnnnnggctaagactctgttgagatatagagtttttcttccactcagactgatatagttatacattgttcttcatgtaaattcagcttaacctggttatctataatcttttattggcaaaagttaattctcagtactgcctatagagatacagtgtattttatgtacatacacaattagtctaattcttgataattcagttaatttagtttggcattttcctaccacttactaaaaagtttacattaaatgactgatttaaatatataggtgcaatgttctatgtttattttaattgttatgacatttaagtagctaatataattgaccggtgctaaagtctcctgtttatccataaaatgggtacattatgggcagtgtaatacaagctttcttttcattgcctagtactttaccagcagaccacagttttgccctggctagaccaaccctcagaacaaaatcatcattccttgtatttatatttgtatctgagatagtaaacaagatggctggccaggtcaacatggcaccttaacttatttttttaataggtaaaacttcttcaaaagtagcttgctttgtataagaactaagctatcagtatagatatagctatccttggagcttatgtttcagacaagaattatttactaaaataaataataaacaagataatgcattatacaatttgggcatttctcgtttctcaagtgtatgcatcatggtaaatataaactaaccacaagataggtagattgattcatttcattttaatctccttgtgtaattcagtacctccataattgttctaatcttcttcccactgtttacaaattaccagttaattaactcgtgaaagaaaaattcacatatcagaataaaaataaatgtatactcactttataaaaatcaccactgctgtctttccttaatactagcagtggaaatgtaagtggcttactctacaaattttggtgctggcaaatacataggcaaactgttgggagctgctctagttacattcctcccttcttattccctttttctcttcctcactttattgcataacatattcctgtacccaaagcattctaccacagttctatttgactcccacttgtaataactcctttaaaaaattccatgtttaaccatatgaccctgcttgcttactcatattctccctccctctccccttcctttctctctcttccagaagtcatttgcctggtttgaaatattttgtagggattgcttattatattattttagctgatgaacctcaagacaacgtctacacacacacccatacatacacgcacacaaaatctcagctgttgaagagtgggcttggaatcagacttctgtgtccagtaaaaaactcctgcactgaagtcattgtgacttgagtagttacagactgattccagtgaacttgatcaaatttctttgatctaatgaatgtgtctgcttaccttgtttccttttaattgataagctccaagtagttgcta

SEQ ID NO: 187947 - DNA, 1113 bp, Homo Sapiens
  misc_feature (470)..(498): n is a, c, g, or t
  misc_feature (800)..(826): n is a, c, g, or t
ttggaaattaccagttaattaactcgtgaaagaaaaattcacatatcagaataaaaataaatgtatactcactttataaaaatcaccactgctgtctttccttaatactagcagtggaaatgtaagtggcttactctacaaattttggtgctggcaaatacataggcaaactgttgggagctgctctagttacattcctcccttcttattccctttttctcttcctcactttattgcataacatattcctgtacccaaagcattctaccacagttctatttgactcccacttgtaataactcctttaaaaaattccatgtttaaccatatgaccctgcttgcttactcatattctccctccctctccccttcctttctctctcttccagaagtcatttgcctggtttgaaatattttgtagggattgcttattatattattttagctgatgaacctcaggacaacgtctnnnnnnnnnnnnnnnnnnnnnnnnnnnnnaaatctcagctgttgaagagtgggcttggaatcagacttctgtgtccagtaaaaaactcctgcactgaagtcattgtgacttgagtagttacagactgattccagtgaacttgatctaatttcttttgatctaatgaatgtgtctgcttaccttgtttccttttaattgataagctccaagtagttgctaattttttgacaactttaaatgagtttcattcacttcttttacttaatgttttaagtatagtaccaataatttcattaacctgttctcaagtggtttagctaccattctgccnnnnnnnnnnnnnnnnnnnnnnnnnnngcttgagcacactgatcaaccactgaactgccttcttccattgtcctgcaatgatataagggttacatttttgtgtatatggctttcatagttgggatttcagagcactgataccagatattttcagtttgttctctgggggaatttcatttgcatctatgtttttagctatctgtgataacttgttaaatattaaaaagatattttgcttctattggaacatttgtatactcgcaactatatttctgtaaacagctgcagtcaaaaataaaacactgaaagttttc

SEQ ID NO: 187948 - DNA, 1581 bp, Homo Sapiens
  misc_feature (65)..(73): n is a, c, g, or t
  misc_feature (1062)..(1123): n is a, c, g, or t
ttggcttttggctttactagcaataagtattttatgtatatttcgtatgcactcactgttttggnnnnnnnnncccccttggtgcatatcctagttcatggggagatttccttttggataccatctcggggcttgtatttgatactgcaaaggaagacgtggagttacggaccggcataccccggcagctgctcctgcaggtggaatccacaactgttgctacaagacgattaagtggcttcctgaggacacttgcagaccggctggagggcaccaaagaactgctttcctcagacatgaagaaggattttattatgcacagactccccccttactctgcgggagatggggcagagctgtcaacaccaggtggaaagttaccgaggctggacagtgtagtgagactgcagtttaaagaccacattgtcctcacagtactgccggatcaagatcaatctgatgaaactcaagaaaagatggtgtacatctatcattccttaaagaatagtagagagacacacatgatgggaaatgaggaggaaacagagtttcatggacttcgcttccctttgtcacatttggatgcactgaagcaaatttggaatagtccagctatttctgtcaaggacctgaaacttactacagatgaggaaaaggaaagcctggtattatccctctggacagaatgtttaattcaagtagtctagtgcctttgcagaatcaaatgcctactattttatatgcatatattaaaagaaaagcaaagacctgagccgaggagaggatgaattcaagtttccttacctgcgtatctactaacaaacatgagacctccctgttacaggtggtcagttggccaaatgtactaacgggcacatgaaagaaagaacagcaaattaccaagtgtctcagaaaatgacaaaaccatattttgacaagtttatttaatccagtgtggtagaaaaggcacaattccaatgtatcatttagaattgaatgtcattaacctggctttgttctttggaagaaacaacttctttaaagagcttctttggctctagnnnnnnnnnnnnnnnnnnnnnnnnnnnnnnnnnnnnnnnnnnnnnnnnnnnnnnnnnnnnnncatacctttgtgtatagacaagcccatgcccattaaaataaagttatcctgtaacataaattttattaaataatacttccccacagatgagaggcacgcaacacctatggacaaaagggagttacagaggatgcttaaaagatggagaaaagcctgagattgaaggaggaaaaaaacccagtatttaaagtctataaaaaatactcaaaatagtgggtcttcgagtttaaaatagtcattgttattttacattctaaagtgcatgtaggttgatattttttaaaatatcattggagaatttaatctttctttataaaaatagagcatttttctgctttctggcaaaagttggggataaaaggaaaaaaagttgtcaaaatgtaattttcagtccaattcaccaggaaaacatgcttgtgaattgtgcagtaaaaggtggccaacttttttgtacaaag

SEQ ID NO: 187949 - DNA, 1929 bp, Homo Sapiens
ttgggtctctatcgaaggctataaaaccccttacaccgatgtaaatattgtgaccattcgagagaacacagaaggagaatacagtggaattgagcatgtgattgttgatggagtcgtgcagagtatcaagctcatcaccgagggggcgagcaagcgcattgctgagtttgcctttgagtatgcccggaacaaccaccggagcaacgtcacggcggtgcacaaagccaacatcatgcggatgtcagatgggctttttctacaaaaatgcagggaagttgcagaaagctgtaaagatattaaatttaatgagatgtaccttgatacagtatgtttgaatatggtacaagatccttcccaatttgatgttcttgttatgccaaatttgtatggagacatccttagtgacttgtgtgcaggattgatcggaggtctcggtgtgacaccaagtggcaacattggagccaatggggttgcaatttttgagtcggttcatgggacggctccagacattgcaggcaaggacatggcgaatcccacagccctcctgctcagtgccgtgatgatgctgcgccacatgggactttttgaccatgctgcaagaattgaggctgcgtgttttgctacaattaaggacggaaagagcttgacaaaagatttgggaggcaatgcaaaatgctcagacttcacagaggaaatctgtcgccgagtaaaagatttagattaacacttctacaactggcatttacatcagtcactctaaatggacaccacatgaacctctgtttagaatacctacgtatgtatgcattggtttgcttgtttcttgacagtacatttttagatctggccttttcttaacaaaatctgtgcaaaagatgcaggtggatgtccctaggtctgttttcaaagaactttttccaagtgcttgttttatttattaagtgtctacctggtaaatgttttttttgtaaactctgagtggactgtatcatttgctattctaaaccattttacacttaagttaaaatagtttctcttcagctgtaaataacaggatacagaattaacaagagaaaatgtctaactttttaagaaaaaccttattttcttcggtttttgaaaaacataatggaaataaaacaggatattgacataatagcacaaaatgacactcttctaaaactaaatgggcacaagagaattttcctgggaaagttcacatcaaaaagagtgaatgtggtatatttctaaatgatatggaaaatagagacagatttgtcctttacagaaattactgagtgtgaataaaaacttcagatccaagaaatatataatgagagatataatttttgttaataagacaaaggtaatatattggatacaaagacacaaatgtattgtgtgttcaattattttgttgtcttgagatttaatattctttccaagagcttttaatgaagcagagagctagtacttcattttcactggatacattttcagcatcatgagttgtcacagcctctgagcccctgatctgaagccagaagggctgagtgtattgtaaacttattcttgcatgttgctgtctgggaatggaccacactacagcaggtagttctgggggcgatactgccgaaaggcccgaacacatgtattttggctgcaattgaggaacttgggatgctattaattttgtatttcagcaactgccccttctcctatcccaaagcaccaattactgccctctgcctcagcagtaccagtataagatgacattccaaagactggaggcaactcagcctgagttaattcacaaaattatgccatgctggggcttgagcttgagcttgggcttaggcttgggctcagcttttgaccctcaagcatctcctttcccttcctgtcttcctctcccttctcctctgctgc

SEQ ID NO: 187950 - DNA, 1603 bp, Homo Sapiens
  misc_feature (230)..(304): n is a, c, g, or t
ttgggattatttagatttggataagattactgtggaagatgatgttggtggtgttcaagggaaaagaaaagcagcatctaaagctgcagcacagcagaggaagattcttctggaaggcagtgatggtgatagtgctaatgacactgaaccagactttgcacctggtgaagattctgaggatgattctgatttttgtgagagtgaggataatgacgaagacttctctatgnnnnnnnnnnnnnnnnnnnnnnnnnnnnnnnnnnnnnnnnnnnnnnnnnnnnnnnnnnnnnnnnnnnnnnnnnnntctaaatccaaatgtaatgctttggtgacttcggtggactctgctccagctgccgtcaaatcagaatctcagtccttgccaaaaaaggtttctctgtcttcagataccactaggaaaccattagaaatacgcagtccttcagctgaaagcaagaaacctaaatgggtcccaccagcggcatctggaggtagcagaagtagcagcagcccactggtggtagtgtctgtgaagtctcccaatcagagtctccgccttggcttgtccagattagcacgagttaaacctttgcatccaaatgccactagcacctgagtgtggtacaggaggaatgtttggttgggagaatcacagctttacaagggtgtttatatttgatttgtgtttatatttgaggcaggtattgtaatataaaggaatccattaccatgtcctataaatgacctctagccattttatgattatgttctctgtaaaactcttcaagacttcaatgagaagtttgtttataagaattatcttctcatacctttccttgtgaagagcgtattctgtttttctatcagttcgacatgaagtccacatcacatgctgttcttttctagttacatgatgtgcctttctagctttgtctagtttatagcaccttaactttaactgttcagttttatctggcagaggaaaacattcttatttctttcagaagacatttctgaaatcttataagctacttaagctacgttgtcagttttatcgcaaagatgttttgtattttagccaaatctttttatagtacaaacttagaattattttacacactaaaatggttgcagttttatggcatatgtctccgatttagatggttattctctagaaaatagtatttaaagacattttatgaaatcttcattgtcaaaacctttaataaaagtggaaatattttgaaatgccctttttcttgataccactcatccacgtgttcctgattgtccacatttcatgataaaatgagagctctgcagagaatgttagcctttctgttgtaaatgtaatcttcaagtagtcactttttgttaagttctttagaaagtagttgtcaagtacttagtcatccctattatgatatgagatagtacagcttttcagggaagcttagatctgaatttactttgaaaaacaattgtaatgaatattttatatttacatttgagaatttcaactagctttctgatcaatttttaataaaaaattttcaaatcatgttagctgttaaaaatgtataataaactcagtttttcttgg

SEQ ID NO: 187951 - DNA, 2302 bp, Homo Sapiens
ttgggttgctgttaacatttcaaacttggtgcttgagaatcagccacctcggatatcaaaagcacaaaagagacgggaaaagaaagctgcattggaaaaggagcgagaagaacggatagctgaagctgaaattgaaaacttaacaggagccagacatatggaaagtgagaaacttgctcaaatattggcagctagacagttagaaattaaacagattccatctgatggccactgtatgtataaagccattgaagatcaactgaaagaaaaggattgtgctctgactgtggttgccttgagaagtcagaccgctgagtatatgcaaagccatgtggaagactttctgccatttttaacaaaccctaatacaggagatatgtatactccagaagaatttcagaagtactgtgaagatattgtaaacacagctgcatggggaggtcagcttgagctaagagctctgtctcacattttacaaacaccaatagagataatacaggcagattctcctcccattatagttggtgaagaatattcaaaaaaaccactaatacttgtatatatgagacatgcatatggcttaggagaacattataattcggttacacggttggtaaacatagttactgaaaattgcagctaatttatacaatgttgtacaattatgttttaatacagtgtgctgaactgagtatttctaccaagtgttgggttgttctaaatgctactgaaaaacacaactaccttatatcagttttatggcaaagctactaacaggtgtttttagaaatatgtcagagataaactttaaccagtgtcttcttagtggaattttaaaaatttgttaagttcattgtagagaacaccattcatagaccaagatggtcccctattagctgatattttcatttatgtaagatcctggacattctgttttgtgttggaacaaattttcaatgtttttaattctcccttttctgcctgttcctaaaaactttcaaaataaccatttcaatgtaatttgtcttgaagaagtttacccaatatctttgtcattgcaataatgtagtatggtgatggtcaatttaattattgcttataaaatgaacttgattgcagtaaccatggtatcgatgagactaatgcagtgaagctttattactaatatatatagccttatcaaagcaagctaagaagcttgctttaataattaataatttaaaaatatttatttagatgggattcagttgtttaaagaagtgagataaattcaaaggtaaataggtattctctgtcaaatttaaatctctaaagaattagagattagttttttatttgtgtataatttaaaaaagacctaataggttactgtctttttaatgcatttgttattctttcgtattttttaagcatcggactggagttagtaccatcatctcttgagtctttcataactacacatttttatatttccttttgtgttttctactttgctttccttgaaggaacaagcattttgtggcctttaccttgtgcaattttagggagtagcagtgtaaaaggtccaagaccacatttacttgaaattcttcctcttttctgatttgtcttaccagatatttcccttcttgcctcattctctaggatttgaataaaacctttgccacttattttattagccttattaatgtcacctttccttcaactcaaatatttgagaaattttatgttacatatatgaatgaagttgaaagctactgtttggaagctaagacttgtatagagtagttttgtatatgaatggttgttctagctcagatttcaggttactcacaacagtattctttctaagaggatatatacaaatgtctctcataatttatgtaaggaaatattatgaaaatgagacttttttagtttgatgtgtgtttcccaaactagagataaaactagtaagatttagtatcgtttataacatttgaatttttgctccatgagtacaactaatttttataagtaaatattgggtttatatgaaaaatggggtgtcagtcttttcacacgcccagcaggtaacaatgtgggaagctggcagggtcattgatagcaagtaagtacttcctgaaggctttccagttcaaaagattacaagccattctgcctgccaaacaaattatattctgaagatgcctgttttgtaacccttgatgtgaattttttggtgtctgaatttacaaagaatgaaattgaaattgtaaaacactaaatgctttgggtttattttgaagtaatctgttacttt

SEQ ID NO: 187952 - DNA, 1300 bp, Homo Sapiens
  misc_feature (248)..(258): n is a, c, g, or t
agaaaagcctaatttaaaatatttagaaatagctagcctatgtacagcaagttttcatgtctttttttaataaatagatttctaggagtcagtatatatttaatactcttcttccttaagaaaatagaagtttaggtcaagtgttaagctttatcactttgacactgtccttatctcacaatggaggaatttagaaaggaccttaacagtttcacaaacataaataaagccttagtcacactaaattnnnnnnnnnnnttccttagggatatcttagagtagtaaagtgacttcctcatataaatagtttgaaagggtacttaagtttttcacccaaattgtgatatacaaaaaggttattaccaagcaacctacatgtcaagaaagccccagttaggaaggagccacagcatttatcttgtttataatttctttggtactcccactgtttagagcacaggttgaacaccatgttcatctaagccttattagttaaaaaatgtgttatggcaaggcaaataaactagtttaaaaaacattaaatttcaccatttgtagaaattcaagttttataatagcttgctatagcagctatagataaattagtcaccttattacaaaactaaacctttgtaaacaagtttaaatttaattttcaagaaccaaattgcactagtcaagagtgtaggaattttgagaatctaacaactagattcaaagtactgtatcacttagtataccctttaaggtagcacttatccagtccaaaactccagtgacaaaattcctagtttatcaagataaacacagtaacactggattaaaggaaaaacattgctatggtatagactgtggttggcttctatccagtaaccttgggaatgaagacatctttgtaaacaagtcctgctgtttctttaacagctaacataggaaataattaaatgtattctttagtgccaattgtaagttttaaaatcagaatggcagtgtaacttgtgaattggctagggcaatcaatcacagcactactttctgtaaaactttagtagttcagtgataccagttctacccaatcttggtgaattccaacttgtttgcttagttatcttctttagtgttttcctggtggtttttcagtgctcttcggtggtgtcataatgcctccattgcacactggtgacaactgtcccccttttctgaaggtgtttatgtaatttacttcctccagcatagccaaatagtttgtatgtgtctggatattatgtctgtcttccataggaatcttcttaaaagccaa

SEQ ID NO: 187953 - DNA, 1111 bp, Homo Sapiens
  misc_feature (856)..(866): n is a, c, g, or t
actttgtacaaaaaagttgggttggaattcaccaagattgggtagaactggtatcactgaactactaaagttttacagaaagtagtgctgtgattgattgccctagccaattcacaagttacactgccattctgattttaaaacttacaattggcactaaagaatacatttaattatttcctatgttagctgttaaagaaacagcaggacttgtttacaaagatgtcttcattcccaaggttactggatagaagccaaccacagtctataccatagcaatgtttttcctttaatccagtgttactgtgtttatcttgataaactaggaattttgtcactggagttttggactggataagtgctaccttaaagggtatactaagtgatacagtactttgaatctagttgttagattctcaaaattcctacactcttgactagtgcaatttggttcttgaaaattaaatttaaacttgtttacaaaggtttagttttgtaataaggtgactaatttatctatagctgctatagcaagctattataaaacttgaatttctacaaatggtgaaatttaatgttttttaaactagtttatttgccttgccataacacattttttaactaataaggcttagatgaacatggtgttcaacctgtgctctaaacagtgggagtaccaaagaaattataaacaagataaatgctgtggctccttcctaactggggctttcttgacatgtaggttgcttggtaataacctttttgtatatcacaatttgggtgaaaaacttaagtaccctttcaaactatttatatgaggaagtcactttactactctaagatatccctaaggaannnnnnnnnnnaatttagtgtgactaaggctttatttatgtttgtgaaactgttaaggtcctttctaaattcctccattgtgagataaggacagtgtcaaagtgataaagcttaacacttgacctaaacttctattttcttaagaagaagagtattaaatatatactgactcctagaaatctatttattaaaaaaagacatgaaaacttgctgtacataggctagctatttctaaatattttaaattagcttttct

SEQ ID NO: 187954 - DNA, 946 bp, Homo Sapiens
cccactttgtacaaaaaagttggcttcctgcgccccttcaggtcatcgcttgctctcgttcccaggctttggcctctagtggacgagaatcaccgagtctgcggggctggacgctgactgcccgggccagcacctaggcgggcgggagctgtgcggcccagggttcacgcgggccgggtagaggctcgagccgggacccccgagcgtgaaccccggagccggcggcgctggggccagaggggccgggcgggaggtggtggcggaggcgaaggggcgacgggacctgggcctggcccgtgtgtgtcctcggcggcctggcgccggccgtcgctgtacggtgagccccagggaggcggatctgggccccgagaaggacccccgcctggatttgccccgtaggcccggcccgggcccctcgggagcagaacagctttggtgaggtggacaggaggtgacctcgcgagcagacgcgcgcgccagcgacagcagcccgccccggcctctcgggagccgtggggcagaggctgcggagccccaggagggccggagccctcatgacttcagtgacctgcttctgcccctctaggtctatcagccacagtctctgcaagtttccaagagcagcagaaaatgaacacattgcaggggccagtgtcattcaaagatgtggctgtggatttcacccaggaggagtggcagcaactggaccctgatgagaagatagcatacggggatgtgatgttggagaactacagccatctagtttctgtggggtatgattatcaccaagccaaacatcatcatggagtggaggtgaaggaagtggagcaagggagaggagcccgtggataatggaaggtgaatttccatgtcaacatagtccaggacaagcagttccaattccaaaaaaatgagtgaatgggcacctcacctccccccaaaattg

SEQ ID NO: 187955 - DNA, 1323 bp, Homo Sapiens
  misc_feature (45)..(54): n is a, c, g, or t
  misc_feature (61)..(69): n is a, c, g, or t
  misc_feature (110)..(118): n is a, c, g, or t
  misc_feature (161)..(170): n is a, c, g, or t
  misc_feature (409)..(419): n is a, c, g, or t
  misc_feature (451)..(472): n is a, c, g, or t
  misc_feature (793)..(870): n is a, c, g, or t
  misc_feature (1251)..(1264): n is a, c, g, or t
ttggaccctcactccttctcaacccatctcttccgagatgaaagnnnnnnnnnngcaaagnnnnnnnnncttctcctgagttcttcatgtgagattgagcttgcaaaggnnnnnnnnntgtgaaatgttatagacttgcagcgtgccgagttccatcgggnnnnnnnnnnagcattgttatgctaaaatagagaaaaaaatcctcatgaaccttccacaatcaagcctgcatcaaccttctgggtgtgacttgtgagttttggccttgtgatgccaaatctgagagtttagtctgccattaaaaaaactcattctcatctcatgcattattatgcttgctactttgtcttagcaacaatgaactataactgtttcaaagactttatggaaaagagacattatattaatnnnnnnnnnnngcctgcatgctggacatgtatggtataattannnnnnnnnnnnnnnnnnnnnnggcttggaaatggacgttcgaagacttatagcatggcattcatacttttgttttattgcctcatgacttttttgagtttagaacaaaacagtgcaaccgtagagccttcttcccatgaaattttgcatctgctccaaaactgctttgagttactcagaacttcaacctcccaatgcactgaaggcattccttgtcaaagataccagaatgggttacacatttaacctggcaaacattgaagaactcttaatgttttctttttaataagaatgacgccccactttggggactaaaattgtgctattgccgagaagcagtctnnnnnnnnnnnnnnnnnnnnnnnnnnnnnnnnnnnnnnnnnnnnnnnnnnnnnnnnnnnnnnnnnnnnnnnnnnnnnnggtcattgtcaaatgtggaatgctctgggtttctagtatataatttaattctagtttttataatctgttagcccagttaaaatgtatgctacagataaaggaatgttatagataaatttgaaagagttaggtctgtttagctgtagattttttaaacgattgatgcactaaattgtttactattgtgatgttaaggggggtagagtttgcaaggggactgtttaaaaaaagtagcttatacagcatgtgcttgcaacttaaatataagttgggtatgtgtagtctttgctataccactgactgtattgaaaaccaaagtattaagaggggaaacgcccctgtttatatctgtaggggtattttacattcaaaaatgtatgnnnnnnnnnnnnnncaaaattaaagtatttgggactgaattgcactaagatataacctgcaagcatataatac

SEQ ID NO: 187956 - DNA, 942 bp, Homo Sapiens
catgccacaaggagagtgatctcttcccctgttttcacaatggaggactccggaaagactttcagctccgaggaggaagaagctaactattggaaagatctggcgatgacctacaaacagagggcagaaaatacgcaagaggaactccgagaattccaggagggaagccgagaatatgaagctgaattggagacgcagctgcaacaaattgaaaccaggaacagagacctcctgtccgaaaataaccgccttcgcatggagctggaaaccatcaaggagaagtttgaagtgcagcactctgaaggctaccggcagatctcagccttggaggatgacctcgcgcagaccaaagccattaaagaccaattgcagaaatacatcagagagctggagcaagcaaatgacgacctggaaagagccaagcgcgccacgatcatgtctctcgaagactttgagcagcgcttgaatcaggccatcgaaagaaatgccttcctggaaagtgaacttgatgaaaaagagaatctcctggaatctgttcagagactgaaggatgaagccagagatttgcggcaggaactggccgtgcagcagaagcaggagaaacccaggacccccatgcccagctcagtggaagctgagaggacagacacagctgtgcaggccacgggctccgtgccgtccacgcccattgctcaccgaggacccagctcaagtttaaacacacctgggagcttcagacgtggcctggacgactccaccggggggacccccctcacacctgcggcccggatatcagccctcaacattgtgggagacctactgcggaaagtcggggcactggagtccaaactcgcttcctgccggaacctcgtgtacgatcagtccccaaaccgaacagtggcccagcctctgggcggagcagcaagaacagagatggcgggg

SEQ ID NO: 187957 - DNA, 1241 bp, Homo Sapiens
gagtctgtggggccagggacaggggccactcatggtccccctctcaccctaccctggacgctgtcttgtagctctccgactcgaagaagaagctgcaggactttgccagcaccgtggaagctctggaagaggggaagaagaggttccagaaggagatcgagaacctcacccagcagtacgaggagaaggcggccgcttatgataaactggaaaagaccaagaacaggcttcagcaggagctggacgacctggttgttgatttggacaaccagcggcaactcgtgtccaaccccttatcacccaaaggcacgctggtgctgcttggccgtctctccccgccatctctgttcttgctgctccgcccagaggctgggccacctgttcggtttggggactgatcgtacacgaggttccggcaggaagcgagtttggactccagtgccccgactttccgcagtaggtctcccacaatgttgagggctgatatccgggccgcaggtgtgaggggggtccccccggtggagtcgtccaggccacgtctgaagctcccaggtgtgtttaaacttgagctgggtcctcggtgagcaatgggcgtggacggcacggagcccgtggcctgcacagctgtgtctgtcctctcagcttccactgagctgggcatgggggtcctgggtttctcctgcttctgctgcacggccagttcctgccgcaaatctctggcttcatccttcagtctctgaacagattccaggagattctctttttcatcaagttcactttccaggaaggcatttctttcgatggcctgattcaagcgctgctcaaagtcttcgagagacatgatcgtggcgcgcttggctctttccaggtcgtcatttgcttgccacagctctctgatgtatttctgcaattggtctttaatggctttggtctgcgcgaggtcatcctccaaggctgagatctgccggtagccttcagagtgctgcacttcaaacttctccttgatggtttccagctccatgcgaaggcggttattttcggacaggaggtctctgttcctggtttcaatttgttgcagctgcgtctccaattcagcttcatattctcggcttccctcctggaattctcggagttcctcttgcgtattttctgccctctgtttgtaggtcatcgccagatctttccaatagttagcttcttcctcctcggagcccaacttttttgtacaaagttggctatta

SEQ ID NO: 187958 - DNA, 1518 bp, Homo Sapiens
ttggctagcgtgctcgctcgctcattgctttccttccctccctcggtcttccttcgcacgctgtttggtgattgtggcgctcgcgacagacagggaggcggtggcagaggacacttgtcatggccgcctctaaacctgtggaggcagcggtggtcgcagccgctgtaccgagctccgggagtggggtgggcggcggcgggactgcgggcccgggcacgggggggctgccgcgatggcagctggctctggcggtcggggcacccctgctgctgggcgcgggtgccatatacctgtggagtcggcagcaacggcgccgggaggccagaggccggggcgacgccagcggcctgaagcgcaacagcgaacggaagaccccggagggcagggccagtccggccccgggcagcggacaccctgaaggtcccggtgctcacttggacatgaactctcttgatagagcccaagcagccaagaataaaggcaataaatattttaaagcaggaaaatatgaacaagctattcagtgctatactgaggctattagcttgtgccctacagagaagaatgttgacctttctacattttatcaaaacagagctgctgcctttgaacagttgcaaaaatggaaagaagtggcacaagactgtacaaaagctgttgaacttaatcccaaatatgtgaaagctctctttagacgtgcaaaagcccatgagaagctagacaataagaaggaatgtttagaagatgtcactgctgtgtgtatattagaagggttccaaaatcaacaaagcatgctgttagccgataaagttcttaaactccttggaaaagagaaagccaaagaaaaatataagaatcgtgaacctctgatgccatctccacagtttatcaaatcttacttcagttctttcacggatgatatcatttcccagcccatgcttaaaggagagaaatctgatgaagataaagacaaggaaggggaggctttagaagtgaaagaaaattctggatacttaaaggccaaacagtatatggaagaagaaaactacgataaaatcataagtgaatgctcaaaagaaatagatgctgaaggcaaatacatggcagaagcattgctactacgagctaccttctacctgcttattggcaatgccaatgcagccaaaccagatttagataaagtcatcagtttgaaagaagctaatgtgaagcttcgagcaaatgctctcatcaaaagaggcagcatgtacatgcaacagcagcagcctttgctgtccactcaagattttaacatggctgctgacatcgatcctcagaatgcagatgtttatcacccaccgaggacagctgaaaatactccttgatcaagttgaagaagcagtggcagattttgatgaatgtattcggttaagacctgagtctgctctggcacaagcacagaaatgttttgcattgtaccgcccaggcatatacgggaaacacctcttcaccaaatcctagcagctatgaaaggttttg

SEQ ID NO: 187959 - DNA, 1514 bp, Homo Sapiens
ctttgtacaaaaaagttgggctgctgcctcctcgaacagttgcaaaaatggaaagaagtggcacaagactgtacaaaagctgttgaacttaatcccaaatatgtgaaagctctctttagacgtgcaaaagcccatgagaagctagacaataagaaggaatgtttagaagatgtcactgctgtgtgtatattagaagggttccaaaatcaacaaagcatgctgttagccgataaagttcttaaactccttggaaaagagaaagccaaagaaaaatataagaatcgtgaacctctgatgccatctccacagtttatcaaatcttacttcagttctttcacggatgatatcatttcccagcccatgcttaaaggagagaaatctgatgaagataaagacaaggaaggggaggctttagaagtgaaagaaaattctggatacttaaaggccaaacagtatatggaagaagaaaactacgataaaatcataagtgaatgctcaaaagaaatagatgctgaaggcaaatacatggcagaagcattgctactacgagctaccttctacctgcttattggcaatgccaatgcagccaaaccagatttagataaagtcatcagtttgaaagaagctaatgtgaagcttcgagcaaatgctctcatcaaaagaggcagcatgtacatgcaacagcagcagcctttgctgtccactcaagattttaacatggctgctgacatcgatcctcagaatgcagatgtttatcaccaccgaggacagctgaaaatactccttgatcaagttgaagaagcagtggcagattttgatgaatgtattaggttaagacctgagtctgctctggcacaagcacagaaatgttttgcattgtaccgccaggcatatacgggaaacaactcttcacaaatccaagcagctatgaaaggttttgaagaggtcataaagaaatttccaaggtgtgccgaaggctatgcactatacgcccaggcattaacagatcaacaacattttggtaaagctgatgaaatgtatgataaatgtattgatttggaaccagataatgctacaacatatgttcataaaggtttacttcaacttcagtggaagcaagatctggatagaggtttggaacttatcagcaaggctattgaaattgacaataaatgtgattttgcctatgaaaccatgggaactattgaagtacaaagaggaaacatggagaaagccattgacatgttcaacaaagctattaacctggccaaatcggaaatggagatggcccatctgtattcactttgcgatgccgcccatgcccagacagaagttgcaaagaaatacggataaaaccaccaacattataaaacagggggaaagcagactgaccctctttttaaaagtttacctcctcttcaactgaccctaaagacactgtcatgaactgtgttgaatggtggaatcagtatttctgtttgtggtgttgttatttgttacatctgtttcaggtc

SEQ ID NO: 187960 - DNA, 1673 bp, Homo Sapiens
acaaaaaagttgggttccggatccaccagaaaaccttcacttgtctgaaagacagaacaggagtgttcggctgacctgggaagctggagctgaccacaacagcaatattagcgagtatattgttgaatttgaaggaaacaaagaagagcctggaaggtgggaggaactgaccagagtccaaggaaagaaaaccacagttatcttacctttggctccatttgtgagataccagttcagggtcatagccgtgaacgaagtagggagaagtcagcctagccagccgtcagaccatcatgaaacaccaccagcagctccagataggaatccacaaaacataagggttcaagcctctcaacccaaggaaatgattataaagtgggagcctttgaaatccatggagcagaatggaccaggcctagagtacagagtgacctggaagccacagggagccccagtggagtgggaagaagaaacagtcacaaaccacacattgcgggtgatgacgcctgctgtctatgccccttatgatgtcaaggtccaggctatcaatcaactaggatctgggcctgaccctcagtcagtgactctctattctggagaagactatcctgatacagctccagtgatccatggggtggacgttataaacagtacattagttaaagttacctggtcaacagttccaaaggacagagtacatggacgtctgaaaggctatcagataaattggtggaaaacaaaaagtctgttggatggaagacacatcccaaagaagtgaacattctaagattttcaggacaaagaaactctggaatggttccttccttagatgcctttagtgaatttcatttaacagtcttagcctataactctaaaggagctggtcctgaaagtgagccttatatatttcaaacaccagaaggagtacctgaacagccaacttttctaaaggtcatcaaagttgataaagacactgccactttatcttggggactacctaagaaattaaatggaaacttaactggctatcttttgcaatatcagataataaatgacacctacgagattggagaattaaatgatattaacattacaactccatcaaagcccagctggcacctctcaaacctgaatgcaactaccaagtacaaattctacttgagggcttgcacttcacagggctgtggaaaaccgatcacggaggaaagctccaccttaggagaagggaaatatgctggtttatatgatgacatctccactcaaggctggtttattggactgatgtgtgcgattgctcttctcacactactattattaactgtttgctttgtgaagaggaatagaggtggaaagtactcagttaaagaaaaggaagatttgcatccagacccagaaattcagtcagtaaaagatgaaacctttggtgaatacagtgacagtgatgaaaagcctctcaaaggaagccttcggtcccttaatagggatatgcagcctactgaaagtgctgacagcttagtcgaatacggagagggagaccatggtctcttcagtgaagatggatcatttattggtgcctacgctggatctaagagaaggatctgttgaaagcaatggaagttctacagcaacttttccccttcgggcataaacacaacatatgtaagcaacgctac

SEQ ID NO: 187961 - DNA, 1160 bp, Homo Sapiens
ttggctggtgctgaaaaagggggtttgcagaggctgccctggggctggtgctgaaagaagagcccacagctgacttcatggtgctacaataacctcagaatctacttttcactctcaggagaacccacatgtctaatatttagacatgatggcaaactgggcggaagcaagacctctcctcattcttattgttttattagggcaatttgtctcaataaaagcccaggaagaagacgaggatgaaggatatggtgaagaaatagcctgcactcagaatggccagatgtacttaaacagggacatttggaaacctgccccttgtcagatctgtgtctgtgacaatggagccattctctgtgacaagatagaatgccaggatgtgctggactgtgccgaccctgtaacgccccctggggaatgctgtcctgtctgttcacaaacacctggaggtggcaatacaaattttggtagaggaagaaagggacaaaagggagaaccaggattagtgcctgttgtaacaggcatacgtggtcgtccaggaccggcaggacctccaggatcacagggaccaagaggagagcgagggccaaaaggaagacctggccctcgtggacctcagggaattgatggagaaccaggtgttcctggtcaacctggtgctccaggacctcctggacatccgtcccacccaggacccgatggcttgagcaggccgttttcagctcaaatggctgggttggatgaaaaatctggacttgggagtcaagtaggactaatgcctggctctgtgggtcctgttggcccaaggggaccacagggtttacaaggacagcaaggtggtgcaggacctacaggacctcctggtgaacctggtgatcctggaccaatgggtccgattggttcacgtggaccagagggccctcctggtaaacctggggaagatggtgaacctggcagaaatggaaatcctggtgaagtgggatttgcaggatctccgggagctcgtggatttcctggggctcctggtcttccaggtctgaagggtcaccgaggacacaaaggtcttgaagccctaaaggtgaagttggagcacctggttccaagggtgaagctggctctcactggtccaatgggtgccatgggtcctctgggtccgaggg

SEQ ID NO: 187962 - DNA, 1030 bp, Homo Sapiens
ttggcccctccctcacccccaataggaggatcccaggataaacactgctgggcaggcgggcaggcaggcctggggctgccctgctcactctcattgtctggcctcaggacttagccatactagaccagtcagcttgcctggaagagggaggtcccactatgcctttgggagacacctatacttaggaaaaagcctttgttgtcctcccatccatccattaagctgctatctcagcctgtcccttctgccccaggggcttgcctggcttggctgcagtgcactttgaaatgaagtatctgtcctttggcccaccccctggtttgcttgtagaaaacatggtaggcttccccaaggcatctgcagggaactttggcagcttggggcaccctgaattagcaaaaatggggggtgatgaggtgctgaagaaggatacttaacagcttagtgaggaggcaagagctcctctgggaccaccacttcttcaggagagggcctgtgggcttgcttttggaaggcctcaggcagacacgtgccctctgggtgatgtctgtctgctgccaggatggagcagaggagcgccacacatggaggaaagcccctgtaacgttacctaccttaaactccactcatcaaatctgagaaaagtatccactggtccccagggtttcagtcatgcttttgggggtcattgggtattagagaagtaagtatcttttctgagagagggggagtcaccccccctactggggattcctctgggctttattcactcccagccctggccctgacctttgtgggcctccctaatgcccagggcatggatggcttcagaggagtttttgaatcgaagcccagggtccttgttgatgtttcttctcctagccacacttggaggaaagttgcaggtgggttgggcagggagcaggcatggttctgctttgctgtttgtcttcctagttaaggctctttataaagagcttgttcttcatgttttaagcactttatgaagaataaaacattcatgtactgc

SEQ ID NO: 187963 - DNA, 1127 bp, Homo Sapiens
  misc_feature (167)..(264): n is a, c, g, or t
ttgggaagatggcggctccgggcggctcggggtcccgccagctgtgaggagccccgagcacggctgtcgcggcctgaggcagagcgcctctgctctggccctgtccctggctccctcattaccgtcgccagcggagcgaacccgagagcgtggagcgggctgggccnnnnnnnnnnnnnnnnnnnnnnnnnnnnnnnnnnnnnnnnnnnnnnnnnnnnnnnnnnnnnnnnnnnnnnnnnnnnnnnnnnnnnnnnnnnnnnnnnngtgtgagccactgcacccaaccaagaactactatattttctgttgagtggaatgtcatggccagctcctcggacagtgaagatgacagtttcatggctgtggaccaggaagaaactgtgctggaagggacaatggatcaagatgaggagccccacccagtattggaggctgaggagactagacataataggtccatgtcggagctgccagaagaggttttggagtatatcctgtcctttctctcaccgtatcaggaacacaaaactgcggcccttgtctgcaaacagtggtatcgacttatcaaaggtgtagcccatcagtgttatcatggtttcatgaaggctgtccaggaaggaaacattcagtgggagagccgtacctatccttatcctggaaccccaatcactcagcgcttctcgcacagtgcatgctattatgatgctaatcagtctatgtatgtgtttggaggctgtacccagagcagctgcaatgctgctttcaatgacctctggagacttgacctaaacagcaaagagtggatccgacctttggcttcagggtcctatccttcccccaaagctggagcaactctggtcgtgtacaaggacttgctagtgctgtttggtggctggacgcggccaagcccttatcccctacaccagccagagagattctttgatgaaatacacacttactcaccctctaaaaattggtggaactgcattgtgacaacccatgggccacctcccatggctgggccactcctcctgtgtgatagatgataaaatgattgtctttggtggctctttagatcccggcaaatgagcaatgatgtctgggtccttgaccttgagcagtgggcg

SEQ ID NO: 187964 - DNA, 856 bp, Homo Sapiens
ttgggcgcggcggcctcggggagaggacgggaagcctggaaggggcccgggaagcaggaggaggtgtgtgtcatcgatgccctgctggctgacatcaggaagggcttccagctgcggaagacagcccggggccgcggggacaccgacgggggcagcaaggcagcctccatggatcccccaagagccacagagcctgtggccaccagtaaccctgcaggagaccccgtgggcagcacgcgctgtcccgcctctgagcccggccttgatgctacaacagccagcgagtcccggggctgggaccttgtagacgccgtgacccccggccctcagcccaccctggagcagttggaggagggtggtccgcggcccctggagaggcgttcttcctggtatgtggatgccagcgatgtcctaaccactgaggatccccagtgcccccagcccttggagggggcctggccggtgactctgggagatgctcaggccctgaagcccctcaagttctccagcaaccagccccctgcagccggaagttcaaggcaagatgccaaggatcccacgtccttgctgggcgtcctccaggccgaggccgacagcacaagtgaggggctggaggacgctgtccacagccgtggtgccagaccccctgcagcaggcccaggtggggatgaggacgaggacgaggaggacacggccccagagtccgcactggacacatccctggacaagtccttctccgaggatgcggtgaccgactcctcggggtcgggcacactccccaaggccccggggccgggcctcaaggggaccgggaagcgaaggaagaagcgtctctccaggagccaggaagaggttc

SEQ ID NO: 187965 - DNA, 1398 bp, Homo Sapiens
  misc_feature (98)..(107): n is a, c, g, or t
  misc_feature (247)..(270): n is a, c, g, or t
  misc_feature (290)..(543): n is a, c, g, or t
  misc_feature (1280)..(1298): n is a, c, g, or t
ttggtgtttatgtatctctactgtcaaatagcctttttgaaactcaggaaagacaaaggttcaattacaccacttttgtcaataagcaaaccaggtannnnnnnnnnctcctgttgtctggatatggcaatagattttttaaattgctgtgagaacccatatatgaaaagagaggagttgaattgtgtgtgccttttatgtcttgagatttatatgtggaaaagacgacatctacttcaaactgtannnnnnnnnnnnnnnnnnnnnnnnggggaaggggggagaacggnnnnnnnnnnnnnnnnnnnnnnnnnnnnnnnnnnnnnnnnnnnnnnnnnnnnnnnnnnnnnnnnnnnnnnnnnnnnnnnnnnnnnnnnnnnnnnnnnnnnnnnnnnnnnnnnnnnnnnnnnnnnnnnnnnnnnnnnnnnnnnnnnnnnnnnnnnnnnnnnnnnnnnnnnnnnnnnnnnnnnnnnnnnnnnnnnnnnnnnnnnnnnnnnnnnnnnnnnnnnnnnnnnnnnnnnnnnnnnnnnnnnnnnnnnnnnnccggcctgtattttcagagaggagagcttggtgtttttgtggtgccaagtggtaagataatgtctctttgaggcttcctatggactgcctttattttagtaaactcaagacaccagttaacctcaacagagttttggccttattagaatttgttgtgcatcttattgaaagccaggtttacatcacctcaccccattattctttttagttaaataaatttaccatgccaagtaaccagaatggagcaaattggttgatctttaaggcagtaggtttgactagctagctatcattattgtcacatctaatgctaggcaccagaaaccatttgagccaggagtgtgaatgaataattccagagacactttagacattttttaatgttttatatgaacattttacatttgtgtgattgccttagatattaaattttcctagtgctgataaaaacagcaacattcataacttattttatatattgttccaaagaaaagaatttgttttaatggtttcaaaataactgcacctgaatttgtttatgtgccttaagttctctagtgctatttcaacttttttttcaatctaaatgaagcttaccttagataaggttcatatttgtttcctatagagtaaataaacttccccttcttaaattgtgtaataagcaccaacgtgtggttgcttggcagaatgagaatgttaagggagattgttggatgtttggagtctcattatannnnnnnnnnnnnnnnnnngatacctaagtgctttttaaatattcagacaaatatctatcctacattgataacccgtgtaaattcatttgcagtatctacatcgaatgtcaaaaaagta

SEQ ID NO: 187966 - DNA, 939 bp, Homo Sapiens
  misc_feature (829)..(838): n is a, c, g, or t
ttggctcttatagataatagaattatttagttaagaaattctttacagtaaatgagataatgtgtgaaaaagtattttgtaaatgctgaggattctacaaatgatagttgttattttcatgtgtatttgtaagatcatgtccatttcatgaatataggacttcacataaaaaaagactttctcaagacaactttatattctagtatttttctgttgtaaaaagtattaactatttacttttattttgttatacatttattttaatatccatgtgtttattatagtaaatttgaaatgaaatcctgaaaaacagaatttttttaaacacagacctcacaccaatattaattttttctctacataatttaaaactacataaattaagtacttaaaatttatattgaaggccaccaagaacttaggttgaatcttagaaaatttaaataactatttttaaagttacccaacttaatattttaattttttaatatttatcttcctttactaattcttgataaataatagcattagacttgataaaataaaaaagaattttagagtagaattaatatatcaaaaggggtatatcaaccaaattggtgtcagattgtattcattctctcatcacataaagatttttcttttgataggtgatgctcatatgaacctttggtttagaatctatatatgtacatgtgtatgtatgtagatagtatggttgtatacacacatatataccaaacaccatgaattttagcagtctgtgatgatcagcaaaaaagcacataaagtaaaaattagttgaccatgctaaattcaattctggaannnnnnnnnnatttgggcatttctagaactttttacatttgaaagtacatgatgagtattagtaacgatgacttatgtataatcagaatctttatgacatttagttttaca

SEQ ID NO: 187967 - DNA, 1197 bp, Homo Sapiens
ttggcacacctggcaattccctgcttttttgacaacataatttaaatgaatttgatttaaatgtttcctgaatatatatacagatagatagatgagtatcaacacttacaagctctacacagtctgtgagtgtagatactacttacttgtaggattgtcttgtgctttggggatttttgttcggagttctatactatcagcccagaaagctatcaatgtccaagtgaagtgagatgatgcatggccacattattgctttgaccctcacatcaagaaatctgaatgatctggaccaggggtcagcaaagtgcagcctacaagctattgcagtcagctgccagtttttacttttttaaatagttgggaaaaaaattccaaagactgatattttgtgtcacatgaaaattatatgaaattcaaattgcagtgtccataagtaaagttttattggggcacacccatgctcacccttttaaatattgtgtatggccgctttgtgctacagtagcagagttgagtcattgcaagggagaccatatggcccaggtagcctaaaatatttatctgatcctttacagaaaaagtttgctaacccttgataacagatactctaaaatgcaggtttttcttcttcaatttagctcagtggtaggtcaaattgtttgcttttgctattaagcttatgatttggaaacgtaaaatttcatggtggatcttataatcagaactattcaaaagggaaaacatgccagccattttatatgatgaagtctcttattccatagaaaactgtagaaaggtatctgtatctttggagaaggagaaagaaaggaaagaactccagaatcccatcactgttctttaaagcatgcatcacagacctttaagagtatgctttattgagtaaaggttatagtttgactttaagataagaaattttctagaatcatgtttgaattctaaacgttgatattcttaagtaccatttctgattaggaattagtgttaaaagaatcatggtaaggaaaccttaatccgttgaaactcttgtaatttggacaacaaaaaactagaaataacactcttttctttgaagatctgattcaaatacaccttagaagagtttaaaatctcccaggcctttagatgcaataggatattatgccttggtttgactccttttcattcaaattaatg

SEQ ID NO: 187968 - DNA, 1261 bp, Homo Sapiens
  misc_feature (186)..(249): n is a, c, g, or t
ttgggtcctgctggtactcactaggtagtagcggcaacggacgccatggggaccgcctcgtcgctcgtgagccccgcgggcggggaagtgatcgaggacacgtacggggcgggcggcggcgaggcctgcgagatcccggtggaggtgaagcccaaggcccgcctgctgcgcaactcgttccgccgnnnnnnnnnnnnnnnnnnnnnnnnnnnnnnnnnnnnnnnnnnnnnnnnnnnnnnnnnnnnnnnnctgctgggggccagcttcaagtccactggctcgtcggtgccagagctggagtacgcggcggccgagtacgagcggctcaggaaggagtacgagatctttcgcgtcagcaagaaccaggagttgttgtccatgggccgccgcgaggccaagctggacacggagaacaagcggctgcgggccgaactgcaggcacttcaaaaaaacgtatcagaagatacttcgagaaaaagaaagtgctttagaagcgaaataccaagcaatggagagagcagcaacatttgaacatgacagagataaagttaaaaggcaattcaagatttttagggagaccaaagaaaatgaaattcaggacttactgagggccaagagggagttggagagcaaacttcagaggctacaggctcagggtatccaagtatttgatcctggggagtctgattcagatgacaactgtacagatgtcactggtaagtgtatatcctatttatattttgagctttcaacatggctgtaatgacatgtagagccaactttgaattctgctagatttcttttacttatctatattaggttattgctttaactactgttgcaaatagtgtcgtgtgttctctctgtcagctgctaagacacctcttctccacgaagtgtatgaatttggggactgaagttccttctaccttgtcactctgccaaccctaacccataacttttactctctagtctaagatatctaccccagctcccaccagcacatctgcattttagccaagggaaagaaggaaggggagaacacgttcctttcccagaaggtacaacctaagatcacttctcaaatcccattagtcagaactataaactgggaagactggatagtgtaatcagcagccaggcagacatgtgtccaactaaaatgtattgttctgttactgaagaaagaagagggagaatggatattggagttactagtctctgcaatgttatttcttaacataatgatgtaattctttgc

SEQ ID NO: 187969 - DNA, 1706 bp, Homo Sapiens
  misc_feature (1418)..(1456): n is a, c, g, or t
ttggcaccaagatatttatcaacaatgaatggcacgaatccaagagtgggaaaaagtttgctacatgtaacccttcaactcgggagcaaatatgtgaagtggaagaaggagataagcccgacgtggacaaggctgtggaggctgcacaggttgccttccagaggggctcgccatggcgccggctggatgccctgagtcgtgggcggctgctgcaccagctggctgacctggtggagagggaccgcgccaccttggccgccctggagacgatggatacagggaagccatttcttcatgcttttttcatcgacctggagggctgtattagaaccctcagatactttgcagggtgggcagacaaaatccagggcaagaccatccccacagatgacaacgtcgtgtgcttcaccaggcatgagcccattggtgtctgtggggccatcactccatggaacttccccctgctgatgctggtgtggaagctggcacccgccctctgctgtgggaacaccatggtcctgaagcctgcggagcagacacctctcaccgccctttatctcggctctctgatcaaagaggccgggttccctccaggagtggtgaacattgtgccaggattcgggcccacagtgggagcagcaatttcttctcaccctcagatcaacaagatcgccttcaccggctccacagaggttggaaaactggttaaagaagctgcgtcccggagcaatctgaagcgggtgacgctggagctgggggggaagaacccctgcatcgtgtgtgcggacgctgacttggacttggcagtggagtgtgcccatcagggagtgttcttcaaccaaggccagtgttgcacggcagcctccagggtgttcgtggaggagcaggtctactctgagtttgtcaggcggagcgtggagtatgccaagaaacggcccgtgggagaccccttcgatgtcaaaacagaacaggggcctcagattgatcaaaagcagttcgacaaaatcttagagctgatcgagagtgggaagaaggaaggggccaagctggaatgcgggggctcagccatggaagacaaggggctcttcatcaaacccactgtcttctcagaagtcacagacaacatgcggattgccaaagaggagattttcgggccagtgcaaccaatactgaagttcaaaagtatcgaagaagtgataaaaagagcgaatagcaccgactatggactcacagcagccgtgttcacaaaaaatctcgacaaagccctgaagttggcttctgccttagagtctggaacggtctggatcaactgctacaacgccctctatgcacaggctccatttggtggctttaaaatgtcaggaaatggcagagaactaggtgaatacgctttggccgaatacacagaagtgaaaacnnnnnnnnnnnnnnnnnnnnnnnnnnnnnnnnnnnnnnnaggcggggctccttcctcaaacatcggacggcggaatgtggcagatgaaatgtgctggaggaaaaaaatgacatttctgaccttcccgggacacattcttctggaggctttacatctactggagttgaatgattgctgttttcctctcactctcctgtttattcaccagactggggatgcctataggttgtctgtgaaatcgcagtcctgcctggggagggagctgttggccatttctgtgtttcccttt

SEQ ID NO: 187970 - DNA, 993 bp, Homo Sapiens
ctgtgccgccgctgcagcgctgggctcggcgccctggcccagcgccctggcagcgtgtccaagtgggtccgactcaacgtcggcggcacctacttcctcaccactcggcagaccctgtgccgggacccgaaatccttcctgtaccgcttatgccaggccgatcccgacctggactcagacaaggatgaaacaggcgcctatttaatcgacagagaccccacctactttgggcctgtgctgaactacctgagacacggcaagctggtgattaacaaagacctcgcggaggaaggagtgttggaggaagcagaattttacaatatcacctcattaataaaacttgtaaaggacaaaattagagaacgagacagcaaaacatcgcaggtgcctgtgaagcatgtgtaccgtgtgctgcagtgccaggaggaggagctcacgcagatggtgtccaccatgtccgacggctggaagttcgagcagttggtcagcatcggctcctcttacaactatgggaacgaagaccaagccgagttcctctgtgtggtgtccaaggagctgcacaacaccccgtacggtacggccagcgagcccagcgagaaggccaagattttgcaagaacgaggctcaaggatgtgagggacacagtattgacagctgaagaaatgatttacgttttcccgagatgtaatgaactgccatgtccaggaagcttggctgtgagaagaaacctgcttttgatcatttttctagagatctgggtgtgaatccttttttgcctctgaggtgggtggtgagagacgggcccagctgtccaaggccagacgtccccaagttgggggagcacggcggccgggtgggcgctgcctcttgggggggcctcgctctgttttttccaagtgccacgtgggactgaggcagacactcccagtcagcccgctcgatcctgaagatcgtgtgaaggagcgttcttggtgctacacacagtctggaaaa

SEQ ID NO: 187971 - DNA, 1491 bp, Homo Sapiens
  misc_feature (1093)..(1164): n is a, c, g, or t
actttgtacaaaaaagttggattagaaatagcgtcaaaaaacatggtataacggaattacatccagatgtagtaagttatgtatcacatgccacgcaacaaaggctacagaatcttgtagagaaaatatcagaaacagctcagcagaagaacttttcttacaaggatgacgacagatatgagcaggcgagtgacgtccgggcacagctcaagttttttgaacagcttgatcaaatcgaaaagcagaggaaggatgagcaggagcgggagatcctgatgagggcagcaaagtctcggtcaagacaagaagatccagaacagttaaggctgaaacagaaggcaaaggagatgcagcaacaggaactggcacaaatgagacagcgggacgccaacctcacagcactagcagctatcgggcccaggaaaaagaggaaagtggactgtccggggccgggctcaggagcagaggggtcgggccccggctcagtggtcccaggcagctcgggtgtcggaacccccagacagttcacgcgacaaagaatcacgcgggtcaacctcagggacctcatattttgtttagaaaatgaacgtgagacaagccattcactgctgctctacaaagcattccttaagtgacacaggaggacgcctggggactttttatatatttgcagattacgcctttttgtaacgagcaaatgggatattgtttaaaaaacagccacctctttacaatagaacagttttatattcctgtttctaaatcagctcttcagtgtgaaagaaaacacgtttctgtaacagagagaacacaaaggcctgtggatactcttaaaggacaattaaatcttaactcatcttgattgagtggccttcctgccaaacaagccatatataaagactgatggaatcgttagcaaataattagctgccctctgtcaactcatagcagtttctgcattatttgtgcattttggtttagttctacctaacttactatgtaggtgtatgtctacagccgatgacctcatttcgtttattttatttttgtaatagtcagttggcaaagcaaactgattttttagactatttannnnnnnnnnnnnnnnnnnnnnnnnnnnnnnnnnnnnnnnnnnnnnnnnnnnnnnnnnnnnnnnnnnnnnnnactccgctgagaatcctggaggaatacacaattcatcgttgcacccccacctcagagtgtaatcgcatttctgcttggtagaggccgagcccagcaaaggtggctccttctgaatgtgtggtcagcatctgtacaaatgcattttatttgctatagtttgtaaagctgtaaagttaaaagagatgaaaaccttttcagcataaatatattttacttgcactgtgttttttagctaaagtgaaaacctagattaaataaaatcaaagttgagaagaatcatcaaaagactgtttctcggtgtgaatcaagtgtttgaaaaatggttgg

SEQ ID NO: 187972 - DNA, 711 bp, Homo Sapiens
aaaaaagccaactttgtacaaaaaagttgggtttgtaatgtaaagttaaaagagatgaaaaccttttcagcataaatatattttacttgcactgtgttttttagctaaaagtgaaaacctagattaaataaaatcaaagttgagaagaatcatcaaaagactgtttctcggtgtgaatcaagtgttgaaaaatggttggtgtattttgtcagtaattgtacataacttttggcacatgacatagaaatggctatgtaaactataattattttgctaagagactgtatgcaagccttgggccgactttacagacgtccagagcaaagccccttctttgtacctatttttttattacaaatatactaattggttctttctattttcagaggttattgtatgaaattgtctattgatagtacttttatgactgtaaatactctggctttctccgtgtgaattctcacattagactttaattcgagcgcgtgtgaactgaacgctgatcagtattttttatcaacacctgagaactgttacaccttttattttgtcttttaggaaatccctgtctttccattttttcatgtaaattttgcacagttacttgttcatatgtaaatattttactttcagaaatgaagtttttaattgctattgttttatataggattgaaagaaaattactcctttattaaaaacaaattttatctg

SEQ ID NO: 187973 - DNA, 1346 bp, Homo Sapiens
  misc_feature (284)..(337): n is a, c, g, or t
  misc_feature (404)..(449): n is a, c, g, or t
ttggcagactcttgagccaagttgtacgacctcaagaatctcgttctcttagtccctcgcacctcacagaagacagacagggtagatggaaagaggaggatcgtaaaccagaaaggaaagagagttcaaggcgctacgaagaacaggaactcaaggagaaagtttcttctgtagataaacagagagaacagacagaaatcctggaaagctcaagaatgcgtgcacaggacattataggacaccaccagtctgaagatcgagagacatctgatcgagctcatgannnnnnnnnnnnnnnnnnnnnnnnnnnnnnnnnnnnnnnnnnnnnnnnnnnnnnggatgatgttggaatagagaggggtaacatagagacaacatctgaagatggtcaagtattttcaccnnnnnnnnnnnnnnnnnnnnnnnnnnnnnnnnnnnnnnnnnnnnnntccaaaggtgattctgatatttctgatgaagaagcagcccagcaaagtaagaagaaaagaggcccacggactccccctataacaactaaagaggaattggttgaaatgtgcaatggtaagaatggtattctagaggactcccagaaaaaagaagatacagcattcagtgactggtctgatgaggatgtccctgaccgtacagaggtgacagaagcagagcatactgccaccgccacgactcctggtagtaccccttctcctctatcttctcttcttcctcctccaccgcctgtggctactgccactgctacaactgtgcctgcaactcttgctgccactactgctgctgccgccacctctttcagcacatctgccatcactatttccacctctgccacccccaccaataccaccaataatacttttgccaatgaagactcacacagaaaatgccacagaacacgagtagaaaaagtagagacgcctcacgtgactatagaagatgcacagcatcgcaagcctatggatcaaaagaggagcagcagcctcgggagcaatcggagtaaccgtagtcatacgtctggtcgtcttcgctccccatccaatgattcagcccatcgaagtggagatgaccaaagtggtcgaaagagagtactgcacagtggctcaagagatagagaaaaaacaaaaagcctggaaatcacaggagagagaaaatctaggattgatcagttaaagcgtggagaacccagtcgaagtacttcttcagatcgccaggattcaagaagccatagttcaagaagaagttctccagagtcagatcgacaggtccattcaagatctgggtcatttgatagcagagacaggcttcaagaacgagatcgatatgaacacgac

SEQ ID NO: 187974 - DNA, 1252 bp, Homo Sapiens
  misc_feature (373)..(385): n is a, c, g, or t
gccctcctttgtcctccactgaaagcttttcactgttcggtctgcaaagaaagaggttcgcctgccctgctccactcgccagggtggaagtggtggagggctgggaaagggctttcttcacagggcagtgctctcggtatcattgtctatatccagcaggatgcggccaggcacgtctttgctggctgagtctgagtgcatttcaggaaagatgctgcgatgcggttctgaaaccctggaattggagtcattaaatattccaatctcagttcttactgaatatggcaggtcatacatctgttactatcttggaagctgttggtgctgtgttggtgaggctgctgtccccagctgagtggacaccaggaggttnnnnnnnnnnnnncacgctgggccggttccttggctttggtactggtctcggtctcggtaaggttccagcatgtggctgtgcagtttcagggttaccccctgccagggtctgaggagctggcagactggggttctgttttcctaggggcggagtactggggggcgttggagtctggggaggggtgtgagatggctgctcaagtccatgctcactgggcaatgccatggggttgggagggccctggctattgggtttggtgtgcatcagtggcgtggcctgcgtagggggctgcggcggtgggtgattgggagcttggattggagacaagctgctggagtacctccggggtgctgagagctgggagggggcggagggctggcctggaggctggcccgtgtgctgggtgggaggagaggggcttcgggtgggtggctttggtgacagactgggtggatgctgagatgttcctgaagaactctggcccccggggtggccaggaggtgggttgcccggtttcgggggtgctggagcgggttttttaacagctcggcgcagtgtatgcgggctgggccctgcagcattgtgaggttggcccatggagagctggtgggagccagcagctgcctggggctgattttggccagatgctatctgactgttgtttctccctggtgctggcacagctgcagatacagggtccttcggtttgggaggactaagaggagtaaaagtcaagttagacgtcagacaatcccagctagaaaatctgaacatactgcacataaaacataagattccaagcagagttttcacttcggcaggcaggaaaaggatctgaaattctaactagctcacactgggcttataaagctaatccaa

SEQ ID NO: 187975 - DNA, 791 bp, Homo Sapiens
  misc_feature (491)..(500): n is a, c, g, or t
  misc_feature (708)..(720): n is a, c, g, or t
ttggctcaaggacgagccacagacggtgcccgacgtgccgagcttcggcgagagcccgccgttgtcgcccatcgacatggacacgcaggagcgcatcaaggcggagcgcaagcggctgcgcaaccgcatcgccgcctccaagtgccgcaagcgcaagctggagcgcatctcgcgcctggaagagaaagtgaagaccctcaagagtcagaacacggagctggcgtccacggcgagcctgctgcgcgagcaggtggcgcagctcaagcagaaagtcctcagccacgtcaacagcggctgccagctgctgccccagcaccaggtgcccgcgtactgagtccgcgcgcggggcgcatgcgcggccaccctccccaaggggcgggctcgcgggggggtgtcgtgggcgccccggacttggagagggtgcggccctggggaccccccctccccgagtgtgcccaggaactcagagagggcgcggcccccggggattnnnnnnnnnngagggtgcccaggactcgacaagctggaccccctgctcccgggggggcgagcgcatgacccccccgccctcgcgctgcctctttcccccgcgcggccgccccgtgttgcacaaacccgcgcgtctcggctgcccctttgtacaccgcgccgcggaagggggctccgagggggcgcagcctcaaaccctgcctttcctttacttttacnnnnnnnnnnnnnctttggaagagagaagaacagagtgttcgattctgccctatttatgtttctactcgggaacaaacgttggt

SEQ ID NO: 187976 - DNA, 1131 bp, Homo Sapiens
actttgtacaaatatgatgccgtctagtttctgccatgaagtgccgaaaacatttgaagagtcggagattagtcagtgcaaaacagcttggtgtggatagaattgtagattttcaatttggaagtgatgaagctgcttaccatttaatcattgagctctatgatagggggaacattgttcttacagattatgagtacgtaattttaaatattctaaggtttcgaactgatgaggcagatgatgttaaatttgctgttcgtgaacgctatccacttgatcatgctagagctgctgaacctttgcttactttggaaaggttgactgaaatagtagccagcgcacctaagggtgaactactgaagagggtgcttaacccattacttccctatggaccagctctcattgaacactgtcttttagaaaatggattctcgggtaatgtcaaagtggatgaaaaacttgaaactaaagatattgaaaaagtacttgtttctctgcagaaagcagaagactatatgaaaacaacatccaacttcagtgggaagggatatatcattcagaaaagagaaataaaaccatgcttggaagcagataaaccagttgaagacatactgacgtatgaggaatttcatcctttcttgttttctcaacattcacaatgtccatatatagaatttgaatcatttgacaaggcggtggatgaattttattccaagatagaaggccagaaaattgacttaaaagctttacaacaggaaaagcaagcattgaagaaattagataatgttcgaaaggatcacgaaaacagattggaagctcttcagcaggctcaggaaatagacaaactgaaaggagagctcatagaaatgaacctacaaatagttgacagagccattcaggtagttcgaagtgctttagctagccagatagattggacagaaattgggttaattgtgaaagaagcccaggctcaaggagaccctgttgcaagtgcaatcaaagaattaaaactacaaccaaacccatgttacaatgctgctaagaaatccatacttgttatcagaggaggaatatgatgatggttgatggggacgtcaatgtttgagaaaattgaactgaaccacccaaggg

SEQ ID NO: 187977 - DNA, 2932 bp, Homo Sapiens
ttgggtttctccagggaggcagggcccggggagaaagttggagcggtaacctaagctggcagtggcgtgatccggcaccaaatcggcccgcggtgcggtgcggagactccatgaggccctggacatgaacaagctgagtggaggcggcgggcgcaggactcgggtggaagggggccagcttgggggcgaggagtggacccgccacgggagctttgtcaataagcccacgcggggctggctgcatcccaacgacaaagtcatgggacccggggtttcctacttggttcggtacatgggttgtgtggaggtcctccagtcaatgcgtgccctggacttcaacacccggactcaggtcaccagggaggccatcagtctggtgtgtgaggctgtgccgggtgctaagggggcgacaaggaggagaaagccctgtagccgcccgctcagctctatcctggggaggagtaacctgaaatttgctggaatgccaatcactctcaccgtctccaccagcagcctcaacctcatggccgcagactgcaaacagatcatcgccaaccaccacatgcaatctatctcatttgcatccggcggggatccggacacagccgagtatgtcgcctatgttgccaaagaccctgtgaatcagagagcctgccacattctggagtgtcccgaagggcttgcccaggatgtcatcagcaccattggccaggccttcgagttgcgcttcaaacaatacctcaggaacccacccaaactggtcacccctcatgacaggatggctggctttgatggctcagcatgggatgaggaggaggaagagccacctgaccatcagtactataatgacttcccggggaaggaaccccccttggggggggtggtagacatgaggcttcgggaaggagccgctccaggggctgctcgacccactgcacccaatgcccagacccccagccacttgggagctacattgcctgtaggacagcctgttgggggagatccagaagtccgcaaacagatgccacctccaccaccctgtccagcaggcagagagctttttgatgatccctcctatgtcaacgtccagaacctagacaaggcccggcaagcagtgggtggtgctgggccccccaatcctgctatcaatggcagtgcaccccgggacctgtttgacatgaagcccttcgaagatgctcttcgcgtgcctccacctccccagtccgtgtccatggctgagcagctccgaggggagccctggttccatgggaagctgagccggcgggaggctgaggcactgctgcagctcaatggggacttcctggtacgggagagcacgaccacacctggccagtatgtgctcactggcttgcagagtgggcagcctaagcatttgctactggtggaccctgagggtgtggttcggactaaggatcaccgctttgaaagtgtcagtcaccttatcagctaccacatggacaatcacttgcccatcatctctgcgggcagcgaactgtgtctacagcaacctgtggagcggaaactgtgatctgccctagcgctctcttccagaagatgccctccaatcctttccaccctattccctaactctcgggacctcgtttgggagtgttctgtgggcttggccttgtgtcagagctgggagtagcatggactctgggtttcatatccagctgagtgagagggtttgagtcaaaagcctgggtgagaatcctgcctctccccaaacattaatcaccaaagtattaatgtacagagtggcccctcacctgggcctttcctgtgccaacctgatgccccttccccaagaaggtgagtgcttgtcatggaaaatgtcctgtggtgacaggcccagtggaacagtcacccttctgggcaagggggaacaaatcacacctctgggcttcagggtatcccagacccctctcaacacccgccccccccatgtttaaactttgtgcctttgaccatctcttagtctaatgatattttatgcaaacagttcttggacccctgaattcaatgacagggatgccaacaccttcttggcttctgggacctgtgttcttgctgagcaccctctccggtttgggttgggataacagaggcaggagtggcagctgtcccctctccctggggatatgcaacccttagagattgccccagagccccactcccggccaggcgggagatggacccctcccttgctcagtgcctcctggccggggcccctcaccccaaggggtctgtatatacatttcataaggcctgccctcccatgttgcatgcctatgtactctacgccaaagtgcagcccttcctcctgaagcctctgccctgcctccctttctgggagggcggggtgggggtgactgaatttgggcctcttgtacagttaactctcccaggtggattttgtggaggtgagaaaaggggcattgagactataaagcagtagacaatccccacataccatctgtagagttggaactgcattcttttaaagttttatatgcatatattttagggctgtagacttactttcctattttcttttccattgcttattcttgagcacaaaatgataatcaattattacatttatacatcacctttttgacttttccaagcccttttacagctcttggcattttcctcgcctaggcctgtgaggtaactgggatcgcacctttttataccagagacctgaggcagatgaaatttatttccatctaggactagaaaaacttgggtctcttaccgcgagactgagaaggcagaagtcagcccgaatgcctgtcagtttcatgggaggggaaacgcaaaccctgcagtttcctgagtaacattctacaggcctcggccagcctagccccgggttggccacaccacatcaagcccggcccccccc

SEQ ID NO: 187978 - DNA, 1126 bp, Homo Sapiens
ttggcgttgaattccttcccggtaatcttgggcactagcgggcggagttgaagggcgcttggaccccagcggcgatctgtgtttgggttcgcgctctgggagaattttggctttgctcgccttcctctttcagaagactcgaaatcggccagcaggtctgcgagatttgaaacgcgactgttactccttgttttccggttctggccgcgggagcctctcgagaagcgtggaaagaggagaagggcgtataccttgtgaccgcctctggttgtcttgggctcgcgcctggcgccgctacgtggagtcgctctctcgtcgtcacttttggctgccgacttgttgagtagaagtgcagactgatgctttaagactcagggagaggtctttcccttatctccaccccagcaagcaccccagagaccttggagatttgtcttgtttctagacacgtgtactccaatgttgtgcggaggaggccttaaatattcgagaagagagtgggaactcctggaattttaagggatttctgtgtatttccaaaactgacttttaactaccggcagcgtgggatttcgtgattgtttttcgccatcgtgtggctccaacatgtacttcccttcttggttaagtcagctgtacaggggtttatccagacccatcagaaggaccacccaaccgatctggggttctctctacagaagtctgttgcagagttcacagaggagaattccagaattcagtagctttgttgtccggaccaacacatgtggagagttgcgttcgtctcacttaggccaagaagtcaccttgtgtggatggattcagtaccgaaggcaaaacacattcttggtcctaagagatttcgatgggcttgttcaagttatcattccccaggatgagtcggcagcctctgtgaagaagattttatgtgaagcccctgtggaatctgtggtgcaagtgtctggtacagtcatttcccgtcctgcaggacaagagaatccaaaaatgccaacaggtgagattgaaatcaaagttaaaacagctgagcttctgaatgcctgcaagaagctgccctttgaaattaagaacttcgtgaagaaaacagaggctcttcggttgcagtatc

SEQ ID NO: 187979 - DNA, 1490 bp, Homo Sapiens
ttggctctctttgttggggagagcaggaattacggctttcagggtggtcagaacaagtatgtaggcactggaggaatagaccagaagcctcgaacattacccaggaacaggacgttcccaattagaggctttcagatttatgatgggcccattcatctcacaaggagcactttcaaaaaatatgtgccaactccagataggtacagcagtgcaattggcttcctcatgaagaattcctggcagataacccccaggattaatatctccctcgtgaagtttggtccacatgtctctctgaatgtcttttttggaaagcctggtccctggtttgaagattgtgagatggatggtgataagaactccatattccatgacattgatggctctgtgacaggatacaaggatgcttatgtgggaagaatggacaactacctgatccgccatccaagctgtgtaaatgtgtctaagtggaatgcagtgatctgcagtgggacctatgcacaggtctatgtacagacatggagcactcagaatctttctatgaccattacacgagatgagtatccgtccaaccctatggtgctccgaggtattaatcagaaggctgcctttccacagtaccagcctgtcgtcatgctggagaagggttataccatccactggaatgggccggcaccacggactacatttctatacctcgtcaacttcaacaagaatgactggattcgagttggcctttgctatccatcaaacacaagttttcaagttacctttggctatttgcagcggcagaatggctcattatccaaaatcgaagaatatgagcctgtgcattcactggaagaactgcaaagaaagcaatccgagaggaaattctattttgactccagcacggggttactgtttttgtatctcaaagccaaaagccacaggcatggccacagttactgttcatctcagggatgtgaaagagtcaagatccaagcagccacagactcaaaggacatcagtaactgcatggccaaagcatacccacagtactacagaaagccgtcagtggtcaagcggatgccggccatgctcactggactctgtcaaggctgtggcactcggcaggtggtgtttactagtgatcctcataaaagttacctccctgtgcaattccagtcacctgataaagcagaaacccagcgtggagacccgtctgttatttctgtcaatggcactgactttaccttccgaagtgcaggcgtcctcctccttgttgtggatccgtgcagcgttccattccgcttgacggaaaaaacggtttttcctcttgctgatgtcagtcgcattgaagagtatttaaaaacaggcatctctccaaggtccattgttctgttgagcacaagaggagaaataaagcagttaaacatttcacacttactagtacctctgggattagccaaaccagctcatcttttatgacaaagggagtaccatatttt

SEQ ID NO: 187980 - DNA, 1437 bp, Homo Sapiens
ttggagagtgagccgcaggcttcgggaggcgagggggcggggggagcagcgccgaggccgccgcctccgcctccgccgcctaggactagggggtgggggacggacaagccccgatgccgggggagacggaagagccgagacccccggagcagcaggaccaggaagggggagaggcggccaaggcggctccggaggagccccaacaacggccccctgaggcggtcgcggcggcgcctgcagggaccactagcagccgcgtgctgaggggaggtcgggaccgaggccgggccgctgcggccgccgccgccgcagctgtgtcccgccggaggaaggccgagtatccccgccggcggaggagcagccccagcgccaggcctcccgacgtccccgggcagcagccccaggccgcgaagtccccgtctccagttcagggcaagaagagtccgcgactcctatgcatagaaaaagtaacaactgataaagatcccaaggaagaaaaagaggaagaagacgattctgccctccctcaggaagtttccattgctgcatctagacctagccggggctggcgtagtagtaggacatctgtttctcgccatcgtgatacagagaacacccgaagctctcggtccaagaccggttcattgcagctcatttgcaagtcagaaccaaatacagaccaacttgattatgatgttggagaagagcatcagtctccaggtggcattagtagtgaagaggaagaggaggaggaagaagagatgttaatcagtgaagaggagataccattcaaagatgatccaagagatgagacctacaaaccccacttagaaagggaaaccccaaagccacggagaaaatcagggaaggtaaaagaagagaaggagaagaaggaaattaaagtggaagtagaggtggaggtgaaagaagaggagaatgaaattagagaggatgaggaacctccaaggaagagaggaagaagacgaaaagatgacaaaagtccacgtttacccaaaaggagaaaaaagcctccaatccagtatgtccgttgtgagatggaaggatgtggaactgtccttgcccatcctcgctatttgcagcaccacattaaataccagcatttgctgaagaagaaatatgtatgtccccatccctcctgtggacgactcttcaggcttcagaagcaacttctgcgacatgccaaacatcatacagatcaaagggattatatctgtgaatattgtgctcgggccttcaagagttcccacaatctggcagtgcaccggatgattcacactggcgagaagccattacaatgtgagatctgtggatttacttgtcgacaaaaggcatctcttaattggcacatgaagaaacatgatgcagactccttctaccagttttcttgcaatatctgtggcaaaaaatttgagaaga

SEQ ID NO: 187981 - DNA, 880 bp, Homo Sapiens
ctttgtacaaaaaagttgggtaccggacccaagatcggggacccggcggcggctccgcgggggaaacagcgaggctggcgcagcgccgaggccgcggccctgggggcccgcaatccacgccacggaatccccgagtgagcaggggtgagcgcagccactgcccaacgcaaaccgtgaagaagcttctggaagagcagaggcgccgccagcagcagcagcccgacgctggcggggtgcagggacaatttctccctcccccagagcagcccctgaccccatctgtgaatgaggctgtgactggccaccctcccttcccagcacactcggagactgtgggttctggacctagcagcctgggctttccagactgggaccccaacacgcatgctgcctacactgacagcccctactcttgccctgcttctgctgccgaaaatttcctgcctcctgacttctacccaccctcggacccagggcagccgtgcccatttccccagggcatggaggaccccccagacacccagttctatgtaggatcttctctgccacaggctggaccctggagagtttctgcacccccttcaggacccccacagttccccgctgtggtccctggaccatcgctggaggtggcccgagctcacatgctggctttggggccacagcagctgctggcccaggatgaggagggggacacgctccttcacctgtttgcggctcgggggctgcgctgggcggcatatgctgcggctgaggtgctccaggtgtaccggcgtcttgacattcgtgagcataagggcaagacccctctcctggtggcggctgctgccaaccagcccctgaattgtggaggatctgttgaacctgggagcaaagccca

SEQ ID NO: 187982 - DNA, 1255 bp, Homo Sapiens
tacaaaaaagttggctttttgtcatcctatgatttctcagttcaaaactttataaaaggacttcagctttctctattagagcatttctattcccagcccttaagtgtcctgtgctgtaatcttccagaagccaaaagaagaataaattttttatcaaataatcaatgtgaaaacatccgacgtctaccatcttttaggaggtacgtggaaaagcaagcttcagaaaagcaagttgcgctcttgaccaatgagagatatttgaaggaggaaacacaattattactagaaaacctgcatgtttatcatatgaattacttcctggttttgagatgtcttcataagttcacctcttctcttcccaagtatccactaggtcgacagatcagagagttgtactgtacatgtttagaaaagaacatatgggattcagaggagtatgcatcagtcttgcagctgctgaggatgttggcaaaggatgaactgatgaccatacttgagaaatgtttcaaggtttttaagtcttattgtgaaaaccaccttggcagcacagctaagagaatagaggagttcctggcccagtttcagagcctcgatgcagaaaccaaagaggaagaagatgcttctgggtcacagccaaaggggcttcagaagacagacctctatcatcttcagaagtccttattggaaatgaaggagttaagaagaagtaagaagcaaaccaaatttgaagtactcagagaaaatgttgtgaacttcattgactgtctagtgagagaataccttctgcctcctgagacacagcctctccatgaggtggtgtacttcagtgctgcccatgcccttcgtgagcatttaaatgctgctccgcgaattgccctccatactgcactcaacaatccttactattatctcaagaatgaagcactgaaaagcgaagaaggctgcattccgaatatcgccccagacatctgcatagcatacaaactgcacctagagtgtagcaggctcatcaacctcgtggactggtcagaggcttttgcaacagttgtgacagctgctgaaaaaatggatgcaaattctgcaacctcagaagaaatgaatgaaattatccatgctcggtttattagagctgttttctgaactagaacttttaggatttataaaacctacccaaacagaagactgaccatgtggcaagactaacatggggaggctgctagaaaggcaaataagcaaagccagaactatcacattt

SEQ ID NO: 187983 - DNA, 1158 bp, Homo Sapiens
gggctgtaggggagttctctgtccccactctgacataggctggagagagggcctttctgccctgctgctcttggtacacatggagcagcagtgggcacaggcctctgtcttccttctctcttttcctgtttcagaagccatcagggtcataaaagccaaggtgtggagggaccccaggcttccgggagagtgctggttcggctgggaacacgggctgtggggaaaaagcaggagccaggactagggggctcagggacacagctcccggaggcgtggagacaggtctctgtcccagaggacttcaagctcacccagcccagaggcaagctaacactggtttatctgtccaatgacacgccagtctggtggaaccaggcagggctagcagcaggctcaggcagaggtgtcgaaaaggcgatcgatcatgtcgcccacctgctccaccccgtacttgatgtacttctccgggttcttggtgaagggcacgctgccaaacttctgtagaaaggccccgtaggtctccttgacaatggtcttctgggcctggcgaatcctgtccctctgctctgtgtctggaatagcccaggccttctggattttgcacagttcttcgaggccatcattgaagcccttaaaacgctccttgataatctgccgctccttgtcccggagcttgactcccggctggaacacaggtagattcttctctgcgatgtaatcagtcacctttaaccagctgcgctggtaggtctggatctgctgctcaatgtgctcccggtaggagcgctcagcagtcttctgtgtcactgccaccagctggatcagttcagacttctccagggacttgaggatgtaattgtagttgttgtgcaggaagatggcgctcagagctgggtcctcgtacaccttggacttgctcagcaagttcaactgcaggttgcccagcactttacagatataggtgcttagcagccgcttgctgaactcagagctgtagctggtggccgaagagctggtctcttgggaggccagcatggcgcctgccgtctcctggaagtccaaaagctgctgcaggaagaggatggcattgctggtgagctcgtgtacggtgccgtccttcggcatgttgtactccttgtccgggtcattctgtgccaa

SEQ ID NO: 187984 - DNA, 1299 bp, Homo Sapiens
  misc_feature (636)..(916): n is a, c, g, or t
ttggctctgctcatataagctacagacaaaagccaaaagactctcgctgtccctgtgctgctggtatttcattctctgtaacttcagttctggtgttttccttgagtatctacttggcttctcgtggtttttcccaccccagctgccccagcacgcgggacccatagcacaccccttagcgcttgcctaggttgctgaaaacagggaggcacctggtatctcgagtgcctgcagttgcaagtatgtttacacctggtgtccaattttgtattttaaaatgtaatccatttttacttcagctcatccaaaagcagccagcagaccggttgactgagaccggtctgtggctgtgggccccttggtgacccgctgctcttttggaaatgggtgacctgaagtgacactttttccacaattaacccaagttgtgttaatacttcaggtctgtttcccagacccagaaagctttacagaaaatcattgtaagacaatttattaatttgagaaagtcaccttgacagttctttgcacacaagttttacacctctctggattcgaagtttgtattgtattcatagttaaagggaatcgggtactttgcttgttgaataatgcactttaaaacaaggaaccgtnnnnnnnnnnnnnnnnnnnnnnnnnnnnnnnnnnnnnnnnnnnnnnnnnnnnnnnnnnnnnnnnnnnnnnnnnnnnnnnnnnnnnnnnnnnnnnnnnnnnnnnnnnnnnnnnnnnnnnnnnnnnnnnnnnnnnnnnnnnnnnnnnnnnnnnnnnnnnnnnnnnnnnnnnnnnnnnnnnnnnnnnnnnnnnnnnnnnnnnnnnnnnnnnnnnnnnnnnnnnnnnnnnnnnnnnnnnnnnnnnnnnnnnnnnnnnnnnnnnnnnnnnnnnnnnnnnnnnnnnnaccagatccttatgacgcagctgatgcctgccttggttcctaccactctggtgtagacagaggactttgtccaagtctcacactaaacatgcccgggcttcgatgtgcctggaggatttccccacagggacccacgcacctccctgtatctgcgcagcttgctcgtgtggctggaagcgctgtcgataagcttcacgcactggcttgccagttcttcagctctaggacttgtagctttaagcaaacggtgtggcatgggttgagtgtggccacctgcaggatgtgcagggctgcctcaaagctggctggggactctagccctctgtgttcataaagacattagaagtgaatgggatgttgctccttttttgaagttgtcatta

SEQ ID NO: 187985 - DNA, 1050 bp, Homo Sapiens
gagtctctgcctttccataacatcatcttctactgggataaataattcaggtgagatcaacactatctgtaggcgagtctgggagcgatctagtaggatggaccaagcatattttccctcaggagtccatccagctctggcaatatattcaactccttcaaatagaatctcaaaaggttgaattagttccttatctatgacatctatgatccttccttcagcatcaatcattatttctgacatcttaaaagtgactttaggatttgctgtacctgttttaggataacggaatgaatctgccctccttgtttccaacataggggatgtaacatgaataatttccacctcagattcatcattttcttcatatagaattctaagaattttaccaccactgggagttgtttcagcttttggacaccaccaatagccagaatatctatcaaattcttcttggagaacaaaggtagcgactccagctgatctggcatcttcttccatgttggctagctcattgtgcacataagtgagtctcctttcttctctggttacgatgttagatatccaaatatcgttgctatgtataaaagcaatccagtctggatcagcagggcataattttggatccatccgtatgttgggacaactagtttccactagattgggccttaaaggttgttgcgtaaatccttgtggccctccatcttttacgtgataaattccactaccggcttgaaacagaaatgttccacttccttggtgataatcgtaagaagcaattccgactgttccaatgcgttttctttctcttaatagttcttcttctcgagaatacattccatagtccagtgttgcctgaaaaagatccaaaagaggcttccaagagagcattaagactgctgctctattgatagttttgggaatttcagaataaaacagtgtattttctctgttctcaccagacatggcaaggtaatagattctgtctgaatgaggtccatctggatcattcctcttcacaaacatgaaatcatgtggtgccttagccaa

SEQ ID NO: 187986 - DNA, 4054 bp, Homo Sapiens
ttggcatgggcacagaaagccaggggtctgctgctgcagaacctgaagatgactcgttccactggactccacatacaagtgtagagccagggcatagtgacaagagggaggacttacttatcataagcagcttctttaaagaacaacagtctttgcagcggttccagaagtactttaatgtccatgagctggaagccttgctacaagaaatgtcatcaaaactgaagtcagcgcagcaggagagcctgccctataatatggaaaaagtcctagataaggtcttccgtgcttctgagtcacaaattctgagcatagcagaaaaaatgcttgatactcgtgtggctgaaaatagagatctgggaatgaacgaaaataacatatttgaagaggctgcagtgcttgatgacattcaagacctcatctattttgtcaggtacaagcactccacagcagaggagacagccacactggtgatggcaccacctctagaggaaggcttgggtggagcaatggaagagatgcaaccactgcatgaagataatttctcacgagagaagacagcagaacttaatgtgcaggttcctgaagaacccacccacttggaccaacgtgtgattggggacactcatgcctcagaagtgtcacagaagccaaatactgagaaagacctggacccagggccagttacaacagaagacactcctatggatgctattgatgcaaacaagcaaccagagacagccgccgaagagccggcaagtgtcacacctttggaaaacgcaatccttctaatatattcattcatgttttatttaactaagtcgctagttgctacattgcctgatgatgttcagcctgggcctgatttttatggactgccatggaaacctgtatttatcactgccttcttgggaattgcttcgtttgccattttcttatggagaactgtccttgttgtgaaggatagagtatatcaagtcacggaacagcaaatttctgagaagttgaagactatcatgaaagaaaatacagaacttgtacaaaaattgtcaaattatgaacagaagatcaaggaatcaaagaaacatgttcaggaaaccaggaaacaaaatatgattctctctgatgaagcaattaaatataaggataaaatcaagacacttgaaaaaaatcaggaaattctggatgacacagctaaaaatcttcgtgttatgctagaatctgagagagaacagaatgtcaagaatcaggacttgatatcagaaaacaagaaatctatagagaagttaaaggatgttatttcaatgaatgcctcagaattttcagaggttcagattgcacttaatgaagctaagcttagtgaagagaaggtgaagtctgaatgccatcgggttcaagaagaaaatgctaggcttaagaagaaaaaagagcagttgcagcaggaaatcgaagactggagtaaattacatgctgagctcagtgagcaaatcaaatcatttgagaagtctcagaaagatttggaagtagctcttactcacaaggatgataatattaatgctttgactaactgcattacacagttgaatctgttagagtgtgaatctgaatctgagggtcaaaataaaggtggaaatgattcagatgaattagcaaatggagaagtgggaggtgaccggaatgagaagatgaaaaatcaaattaagcagatgatggatgtctctcggacacagactgcaatatcggtagttgaagaggatctaaagcttttacagcttaagctaagagcctccgtgtccactaaatgtaacctggaagaccaggtaaagaaattggaagatgaccgcaactcactacaagctgccaaagctggactggaagatgaatgcaaaaccttgaggcagaaagtggagattctgaatgagctctatcagcagaaggagatggctttgcaaaagaaactgagtcaagaagagtatgaacggcaagaaagagagcacaggctgtcagctgcagatgaaaaggcagtttcggctgcagaggaagtaaaaacttacaagcggagaattgaagaaatggaggatgaattacagaagacagagcggtcatttaaaaaccagatcgctacccatgagaagaaagctcatgaaaactggctcaaagctcgtgctgcagaaagagctatagctgaagagaaaagggaagctgccaatttgagacacaaattattagaattaacacaaaagatggcaatgctgcaagaagaacctgtgattgtaaaaccaatgccaggaaaaccaaatacacaaaaccctccacggagaggtcctctgagccagaatggctcttttggcccatcccctgtgagtggtggagaatgctcccctccattgacagtggagccacccgtgagacctctctctgctactctcaatcgaagagatatgcctagaagtgaatttggatcagtggacgggcctctacctcatcctcgatggtcagctgaggcatctgggaaaccctctccttctgatccaggatctggtacagctaccatgatgaacagcagctcaagaggctcttcccctaccagggtactcgatgaaggcaaggttaatatggctccaaaagggccccctcctttcccaggagtccctctcatgagcacccccatgggaggccctgtaccaccacccattcgatatggaccaccacctcagctctgcggaccttttgggcctcggccacttcctccaccctttggccctggtatgcgtccaccactaggcttaagagaatttgcaccaggcgttccaccaggaagacgggacctgcctctccaccctcggggatttttacctggacacgcaccatttagacctttaggttcacttggcccaagagagtactttattcctggtacccgattaccacccccaacccatggtccccaggaatacccaccaccacctgctgtaagagacttactgccgtcaggctctagagatgagcctccacctgcctctcagagcactagccaggactgttcacaggctttaaaacagagcccataaaactatgacctctgaggtttcattggaaagaaagtgtactgtgcattatccattacagtaaaggatttcattggcttcaaaatccaaaagtttattttaaaaggtttgttgttagaactaagctgccttggcagtgtgcatttttgagccaaacaattcaaaaatgtcatttcttccctaaataaaaatcaccttttaagctagagcgtccttacaactttgaaatgtgcaataaagaatacctgtgttttagctaatgtagcatatgtaattgcaaaatgatttagaatgtcatgaaaaatatgaacatttcctgtggaaatgctttaagaacatgtatttccattatcctatttttagtgtacaccagctgaatacggagcaatggtgtttataagcgtttttttaaactatctggtcacaaagactgttacgctaaaaatgtttactaaaagatcactaaactatctcccctcttgctgaagttctttgtagtaatagctcataaaaatttgtttattaatatttcccaagtgtctgttgactcattggactgttatgaggcttgtgccatttggggaacatgtaaactcaggctcccagaactgaagatggtggctggtggcacacttccggctgctcctccgtcacctgtgaactctacaagtgacgtctttttatttcaaagaagtttatttcccacttgtatagcattcacatgctttctttacgatcctcattgtctatttgagaatggttttctgagagtgagtttacattagtagcaagagttgtttgacctgatgttccattgtttttaccattcctgtagaaaaagggtgcacaacagaaaaatgaaaatgatgtgtcatgggccgtaaaagtatagaaatctttaaaaattttaaaatgtacagtcccttatctatctttcccattccttgccactgatttttgaggaatataataaaagattggagagt

SEQ ID NO: 187987 - DNA, 1147 bp, Homo Sapiens
ttggcgaacttgctcatgggtggactaacacctggtttggtacagagactgagaattttttcattctggtgtcaaagttttgttacattatgggtgtgaagggcatttgatatatttttcttaactatggggtttatttttctaaatgtgggttgattgactgttaattgattcagggtacccttaaaagaaaagaagttttcccattgtgaaccttaaatgatcagagaagtaagttcattgattaaattctctgttgggagaacaaaacttttctcccttgacactttattatctttgatttttcaaagggccttgattggtggttgtgtctcggttaaaatttatgggactttgctatgtagttggcatttataaaatctgaagtatcataaataaagttatttatttaattatactaccagtcttttttactggtctgattcttttgtgcattcattaaagctgattgtgtgagagtgaactgggacacaagctagtctagctcactgcagccaagcaaaccctgttgatggctgatgggcctttccattagggttttgcttatgtgaagtaatggaattatgttggttattttctttatgaaaataaaccagttcttccaaggaagttaaaaggcttggtatggatgttggtgtcagataggtctgactaacctctccgtgctgcagcctatactaaggtgacccagggccacatgtagacagctaggccagtgctttttcctcttagggtttctttgcagaaagaaacctccagcaagggaagagaggtgtgtgtccacaggaaggggctccgtggggatcccatgaagggatttgagctctttcagctccatgtcatttaacttttttgtttaaccaccttggctttctctccttttttgctgtcctccttacggaccagttaccagattcagaggctaacagttagttacttgttaatgctagtcacagccaggaggtcagaaagaattttctacttctggatccaaatgttacctcttaggggaagttatgccccctcaactattgtcttattataatgaatctttcctttttggtccttttaagtaaccactcaaaacttttcatttcactgaaaaatatgaaaaaccatgacaata

SEQ ID NO: 187988 - DNA, 2326 bp, Homo Sapiens
ttggtgaatgagttaaaagagtatcaaaagcagcatgaccactacctgagacagcaggaaatcctagaaaaacataaactgattcaggaggagcaaatcttaagaaatatcattcatgagactcagatggcaaaagaggcacaattaggaaatcatcagatatgccgactggtcaaccagcagcatagtttacattgccagtgggaccagcctgtacgctatcatcgtggagatatctttgaaaatgtggactatgttcagtttggtgaggattcatcaacctccagtatgatgtctgtgaactttgatgttcaatcaaatcagagtgatatcaatgattcggtcaagtcttctcccgtagcccattctattctctggatttggggcagggactctgatgcatatagggacaaacagcatattctatggcctaaaagagcagattgtacagaaagctaccctagagtccctgttggtggggaattgccaacgtattttctgcctccggaaaacaaaggactcaggatccacgaactcagcagtgatgattattctacagaagaagaggcccaaacccctgactgttccataactgacttcagaaaaagccacactctgtcctacttagtcaaagaattagaggttcgcatggatctgaaagccaaaatgccagatgaccatgcacgaaaaattttgctttcccgtattaataactatactatcccagaagaagaaattgggtctttcttatttcatgctattaataagccaaatgctcctatctggctcatactcaatgaagctggactatactggagagcagtaggaaatagcacttttgctattgcctgtcttcagagggctttgaatttagctccacttcaataccaagatgttcctcttgtcaacttggccaaccttttgattcattacggccttcatcttgatgccactaagctgctacttcaagctttggccatcaatagctctgagcctctgacctttttgagcctgggaaatgcttaccttgctctgaagaatatcagtggggcacttgaggcctttagacaggccttgaaattaaccaccaaatgtccagagtgtgaaaacagcctgaagttgatccgctgtatgcagttttatccttttctgtacaacatcacttcttctgtttgcagtggtaattgtcatgagaaaaccctggacaacagccatgacaaacagaaatattttgacaactcacagtcactggatgctgctgaagaagagccctctgagagaggaacagaggaggaccctgtattctctgttgagaattcagggagggactcagatgcccttagacttgaaagtacggtggttgaggagagcaatggttctgatgagatggagaattcagatgaaaccaaaatgtcagaagaaatactggctttggtggatgaatttcaacaggcatggcctttggaaggctttgggggtgcactagagatgaaagggcggcgtctagacttacaaggaatacgggtgctgaagaaaggtccccaggatggagtggccagaagctcttgctatggagactgcagaagtgaagatgatgaagcaacagaatggattacattccaggtcaaacgtgtaaagaaacccaaaggagatcataagaaaactcctgggaaaaaagtagaaacaggtcagatagaaaatggacatcgttaccaagcaaacctagagatcactggccccaaggtggcatctcctgggccacaaggaaaaaaacgtgactaccagcgtctgggatggcccagcccggacgaatgcctcaaactccgctgggtagagctgactgccatcgtgagtacctggcttgcagtttcttcaaaaaacattgacatcacagaacacatagattttgccacccctatacagcagccagcaatggagcctctttgcaatggcaatctccccacgagtatgcataccctggaccacttgcatggggtttccaaccgagccagcctgcactacacaggggagagtcagttaacagaggtattacaaaatctcggcaaagaccaatatccacaacagtcgcttgaacagattggcacccgaattgccaaagttttggaaaagaaccagacgtcctagtcctctccagcatggcagccctctactggagggtgaaaggccaaggaaagaaacaatcgactgcctccgccaggctctgcactatgcgccacaccagatgaagatgtgcccctgattagcctggccaacatcttgcacaatgccaagctctggaatgacgccgtcatagtagccaccatgg

SEQ ID NO: 187989 - DNA, 1768 bp, Homo Sapiens
ttgggtaattccagcgagaggcagagggagcgagcgggcggccggctagggtggaagagccgggcgagcagagctgcgctgcgggcgtcctgggaagggagatccggagcgaatagggggcttcgcctctggcccagccctcccgctgatcccccagccagcggtccgcaacccttgccgcatccacgaaactttgcccatagcagcgggcgggcactttgcactggaacttacaacacccgagcaaggacgcgactctcccgacgcggggaggctattctgcccatttggggacacttccccgccgctgccaggacccgcttctctgaaaggctctccttgcagctgcttagacgctggatttttttcgggtagtggaaaaccagcagcctcccgcgacgatgcccctcaacgttagcttcaccaacaggaactatgacctcgactacgactcggtgcagccgtatttctactgcgacgaggaggagaacttctaccagcagcagcagcagagcgagctgcagcccccggcgcccagcgaggatatctggaagaaattcgagctgctgcccaccccgcccctgtcccctagccgccgctccgggctctgctcgccctcctacgttgcggtcacacccttctcccttcggggagacaacgacggcggtggcgggagcttctccacggccgaccagctggagatggtgaccgagctgctgggaggagacatggtgaaccagagtttcatctgcgacccggacgacgagaccttcatcaaaaacatcatcatccaggactgtatgtggagcggcttctcggccgccgccaagctcgtctcagagaagctggcctcctaccaggctgcgcgcaaagacagcggcagcccgaaccccgcccgcggccacagcgtctgctccacctccagcttgtacctgcaggatctgagcgccgccgcctcagagtgcatcgacccctcggtggtcttcccctaccctctcaacgacagcagctcgcccaagtcctgcgcctcgcaagactccagcgccttctctccgtcctcggattctctgctctcctcgacggagtcctccccgcagggcagccccgagcccctggtgctccatgaggagacaccgcccaccaccagcagcgactctgaggaggaacaagaagatgaggaagaaatcgatgttgtttttgtggaaaagaggcaggctcctggcaaaaggtcagagtctggatcaccttctgctggaggccacagcaaacctcctcacagcccactggtcctcaagaggtgccacgtctccacacatcagcacaactacgcagcgcctccctccactcggaaggactatcctgctgccaagagggtcaagttggacagtgtcagagtcctgagacagatcagcaacaaccgaaaatgcaccagccccaggtcctcggacaccgaggagaatgtcaagaggcgaacacacaacgtcttggagcgccagaggaggaacgagctaaaacggagcttttttgccctgcgtgaccagatcccggagttggaaaacaatgaaaaggcccccaagtagttatccttaaaaaagccacagcatacatcctgtccgtccaagcagaggagcaaaagctcatttctgaagaggacttgttgcggaaacgacgagaacagttgaaacacaaacttgaacagctacggaactcttgtgcgtaaggaaaagtaaggaaaacgattccttctaacagaaatgtcctgagcatc

SEQ ID NO: 187990 - DNA, 867 bp, Homo Sapiens
  misc_feature (719)..(749): n is a, c, g, or t
actttgtacaaaaaagttggattaaacagaggataagagatcaggcttgggatgatgtagtacgtaaagaaaaacctaaagaggatgcatatgaatataaaaagcgtttaaccttagaccatgagaagagtaaattgagccttgctgaaatttatgaacaggagtacatcaaactcaaccagcaaaaaacagcagaagaagaaaatccagaacatgtagaaattcagaagatgatggattccctcttcttaaaattggatgccctctcaaacttccactttatccctaaaccgcctgtaccagagattaaagttgtgtcaaatctgccagccataaccatggaggaagtagccccagtgagtgttagtgatgcagctctcctggccccagaggagatcaaggagaaaaataaagctggagatataaaaacagctgctgaaaaaacagctacagacaagaaacgagagcgaaggaaaaagaaatatcaaaagcgtatgaaaataaaagagaaggagaagcggagaaaactgcttgaaaagagcagtgtagatcaagcagggaaatacagcaaaacagtagcttcggagaagttaaaacagctgaccaaaactggcaaagcttccttcataaaggataaaggtaaagacaaggccttaaagtcctctcaagcattcttttctaaattacaagatcaagtaaaaatgcaaatcaatgatgcnnnnnnnnnnnnnnnnnnnnnnnnnnnnnnncaggatatttctgttcataaattaaagctgtaatatattttgaatataatgtaaatattaatgtgtaagcttatattgtgtcttgttctgttttataataaaattcttgagaaccttc

SEQ ID NO: 187991 - DNA, 1876 bp, Homo Sapiens
ttgggcaggtctggcgtcgacggaccctggagcggtgtctgacggaagtcggcaaagccacgggtcggcccgagtgcttcctcacgattcaagagggattggatcaaagttcacttctttaacaaaagtgctttatgactttaataaaatattagagaatggtaggatccatggaagccccttgcaaaaacttgtgatagaaaattttgatgatgagcagatttggcaacaactggaattgcaaaatgaaccaattttacaatactttcagaatgcagttagtgaaacaattaatgatgaagatatcagtcttctcccagagagtgaagaacaggaacatgaagaggatggttcagagatagaggctgatgacaaggaggacctagaagatttagaggaggaggaagtgtccgacatgggtaatgatgatcctgaaatgggtgagagagctgaaaactcaagcaaatctgatctgaggaaaagccccgttttcagtgatgaggattctgaccttgactttgatatcagcaaattggaacagcagagcaaggtgcaaaacaaaggacagggaaaaccaagagaaaagtccatagtagatgataaattcttcaaactctctgaaatggaggcctatttagaaaacatagaaaaagaagaggaacgaaaagatgataatgatgatgaggaggaagatattgatttttttgaagatattgattctgatgaagatgaagggggactgtttggaagtaaaaaacttaagtcaggtaaaagttccagaaatctgaaatacaaagatttttttgatccagttgaaagtgatgaagacataacaaatgttcatgatgatgagctggattcaaacaaagaagatgatgaaattgctgaagaagaagcagaagaactaagtatttcggaaacggatgaagatgatgaccttcaagaaaatgaagacaataaacaacataaagaaagcttgaaaagagtgacctttgctttaccagatgatgcggaaactgaagatacaggtgttttaaatgtaaagaaaaattctgatgaagttaaatcctcctttgaaaaaagacaggaaaagatgaatgaaaaaattgcatctttagaaaaagagttgttagaaaaaaagccgtggcaacttcagggggaagtgacagcacagaagaggccagagaacagcctcctggaggagaccctacactttgaccatgctgtccggatggcacctgtgattacagaggaaaccacccttcaactggaagatatcattaaacagagcataagagatcaggcttgggatgatgtagtacgtaaagaaaaacctaaagaggatgcatatgaatataaaaagcgtttaaccttagaccatgagaagagtaaattgagccttgctgaaatttatgaacaggagtacatcaaactcaaccagcaaaaaacagcagaagaagaaaatccagaacatgtagaaattcagaagatgatggattccctcttcttaaaattggatgccctctcaaacttccactttatccctaaaccgcctgtaccagagattaaagttgtgtcaaatctgcaagccataaccatggaggaagtagccccagtgagtgttagtgatgcagctctcctggccccagaggagatcaaggagaaaaataaagctggagatataaaaacagctgctgaaaaaacagctacagacaagaaacgagagcgaaggaaaaagaaatatcaaaagcgtatgaaaataaaagagaaggagaagcggagaaaactgcttgaaaagagcagtgtagatcaagcagggaaatacagcaaacagtagctttcggagaagttaaaacagctgaccaaactggcaaag

SEQ ID NO: 187992 - DNA, 917 bp, Homo Sapiens
ttggctctgaggcgagcgacgctatggatcccacagtggtttgctaagaaggccattttcaactctccactggaggctgctatggcgttccctcacctgcagcagcccagctttctactggctagcctgaaagctgactctataaataagccctttgcacagcagtgccaagacttggttaaagtcattgaggactttccagcaaaggagctgcacaccatcttcccatggctggtagaaagcatttttggcagcctagatggtgtcctcgttggctggaacctccgctgcttacaggggcgcgtgaatcctgtggagtacagcatcgtgatggaatttctcgaccctggtggcccaatgatgaagttggtttataagcttcaagctgaagactataagttcgactttcctgtctcctacttgcctggtcctgtgaaggcgtccatccaggagtgcatcctccctgacagtcctctgtaccacaacaaggtccagttcacccctactgggggccttggtctgaacttggccctgaatccgttcgagtattacatattcttctttgccttgagcctcatcactcagaagccactccctgtgtccctccacgtccgtacttcagactgtgcctatttcatcctggtggacaggtacctgtcatggttcctgcccaccgaaggcagtgtgccctgccactctcctccagcccaggggggaccagcccctcaccacctcccaggacaccaaccatgccctttgcttcctatggcctccaccacactagcctcctgaagcgacacatctctcatcagacgtctgtgaatgcagaccccgcctcccacgagatctgggaggtcaaactctgctccaggtttttgttgaaatgtggcttcatcactattccttggagatgtatc

SEQ ID NO: 187993 - DNA, 978 bp, Homo Sapiens
ttggttcaagatgagctattagtaactgaagtatatgatcttccccaacgacctaatgatgttcagctcttttatggaagcatgtgtaaaattatactttcagtaattggagaattcagagattgcatttctagcagagaattccttcagccttcttccaaagctagcttggaatctacaagcgacttgggagcttctgggaaacatggtggcaacgtctctttggatgttttaccagtcaaaggtcctcagggttctcctcttctctcacgggcggctcgcccgcctctggatcagctggcctccgaagagccgtggactgtcctacccgagcacttgattctggtagctccttctccttgtgacatggcaaaaactggacgtttccagattgtgaataactctgtgaggttactgagatttgagctgtgctggccagcgcattgcctcacagtcacgccgcagcatggatgtgtcgcgccagagagtaaactacaaattcttgtgagtcctaattcctccttatccacaaaacagtcaatgttcccgtggagtggtttgatctatatacactgtgacgatggacagaagaaaattgtgaaagttcaaattcaagaagatttaactcaagtggaacttttaactcgtttgacctccaaaccatttggaattctttccccagtatctgagccttcagttagtcatttggtcaaaccaatgacaaaaccgccttccacaaaagttgaaataagaaacaagagtattacttttcctacaacagaacctggtgaaacttcagagagctgtctagaactcgagaatcatggcaccacagacgtgaaatggcatctgtcatctttagcgccaccttatgtcaagggagttgatgaaagtggagatgtttttagagctacctatgcagcattcagatgttctcctatttctggtctgctggaaagccatgggatccaaaaagtc

SEQ ID NO: 187994 - DNA, 1549 bp, Homo Sapiens
ttggatgcaatgttcatccttgttagcaagggtacgagttccccagggctgcactctagattccagagtcaccaatggctggattatttgcttgtttaagacaatttaaattgtgtacgctagttttcatttttgcagtgtggttcgcccagtagtcttgtggatgccagagacatcctttctgaatacttcttgatgggtacaggctgagtggggcgccctcacctccagccagcctcttcctgcagaggagtagtgtcagccaccttgtactaagctgaaacatgtccctctggagcttccacctggccagggaggacggagactttgacctactccacatggagaggcaaccatgtctggaagtgactatgcctgagtcccagggtgcggcaggtaggaaacattcacagatgaagacagcagattccccacattctcatctttggcctgttcaatgaaaccattgtttgcccatctcttcttagtggaactttaggtctcttttcaagtctcctcagtcatcaatagttcctggggaaaaacagagctggtagacttgaagaggagcattgatgttgggtggcttttgttctttcactgagaaattcggaatacatttgtctcacccctgatattggttcctgatgcccccccaacaaaaataaataaataaattatggctgctttatttaaatataaggtagctagtttttacacctgagataaataataagcttagagtgtatttttcccttgcttttgggggttcagaggagtatgtacaattcttctgggaagccagccttctgaactttttggtactaaatccttattggaaccaagacaaaggaagcaaaattggtctctttagagaccaatttgcctaaattttaaaatcttcctacacacatctagacgttcaagtttgcaaatcagtttttagcaagaaaacatttttgctatacaaacattttgctaagtctgcccaaagcccccccaatgcattccttcaacaaaatacaatctctgtactttaaagttattttagtcatgaaattttatatgcagagagaaaaagttaccgagacagaaaacaaatctaagggaaaggaatattatgggattaagctgagcaagcaattctggtggaaagtcaaacctgtcagtgctccacaccagggctgtggtcctcccagacatgcataggaatggccacaggtttacactgccttcccagcaattataagcacaccagattcagggagactgaccaccaagggatagtgtaaaaggacattttctcagttgggtccatcagcagtttttcttcctgcatttattgttgaaaactattgtttcatttcttcttttataggccttattactgcttaatccaaatgtgtaccattggtgagacacatacaatgctctgaatacactaccaaatttgtataaacacatcagaatatttccaaatacaacatattatgtccctgaatatgtactttttaacacagagagactattcaataaaaactcactgggg

SEQ ID NO: 187995 - DNA, 766 bp, Homo Sapiens
ttggcctgctgctcctatggaagcgaagttttccgctcctgcagaaagcaaagttacgactcagagacggctgaggatgacatcagcgatgtgcagggaacccagcgcctggagcttcgggatgacggggccttcagcacccccacggggggttctgacaccctggtgggcacctccctggacacacccccgacctccgtgacaggcacctcagaggagcaagtgagctggtggggcagcgggcagacggtcctggagcaggaagcgggcagtgggggtggcacccgccgcctcccgggcagcccaagcagcgtccctcagagcgggttgcgcagggaggagcccgaccttcagcctcaactggccagcgaagccccacgccgccctgcccagccgcctccttccaaatccgcgctgctccccccaccgtcccctcgggtcgggaagcggtccccgccgggacccccggcccagcccgcggccacccccacgtcgccccaccgtcgcactcaggagcctgtgctgcccgaggacaccaccaccgaagagaagcgagggaagaagtccaagtcgtccgggccctccctggcgggcaccgcggaatcccgaccccagacgccactgagcgaggcctcaggccgcctgtcggcgttgggccgatcgcctaggctggtgcgcgccggctcccgcatcctggacaagctgcagttcttcgaggagcgacggcgcagcctgtagcgcagcgactcgccgccggcgcccctgc

SEQ ID NO: 187996 - DNA, 846 bp, Homo Sapiens
actttgtacaaaaaagttggatttcagtgaccactttaagcccatacctgtgtctgattgtttattattggctttccacaattcttacatcagactacattatattagagaccattattgctagaatagcatgggatttaaaattttctaatactgggggtattatttagttaattataaatttttcttttcacattttactgtgttttaactggaaataaaattatggctgctacaatatattttttgaaatcaacttctgtagttctaaaatacaactttatcatacaatcaaaccaggtagttcatataaaacagtgtaatacaagttttctataaagtcattactgttgcttaaacatatttcatgcctattaaaatatattttctactggtgatttcaacattatttctcatactgacttttattactggaaatgttcctgtacatgttggcagcagataaagatttttgaatgtttgaatgccctctgccttgatttggttggaatttttgctaaattggtaatgttgcttgaactttatgactacattttcttttaacttttttcatggacttccttatatgtacataataattaaatgttgaaatttatgaaatacttttatgaatttagataatttttaaatattgttaaaatttattgaactaaaaagtaatgtaaataaaataattcatgttaaagatggaacaaaataattaactttacatgtttggtgatacagatgcaaatgtttttgatatatggagatgttgagtcttttgactttactaaaggtgctgaatagcattaaattcactattttccttttctgttttacttg

SEQ ID NO: 187997 - DNA, 2385 bp, Homo Sapiens
ttggcgcggactcggtgcggtctctcgcgggctgcggtcgggcccgggatcctgctcctggccgagtcgcggtgcgcgggctgctggggtccggcagggctggaggcggaccgcgaggaagcggcgcggccgggaagatggggcagggtcgcctcggccccggggcctcggtttcctccgatcacagcgcctcagggggcgcgcacgggcgctgcggagacctgtgtcctgccggggcgcggcgctaggggcccctgctcgggtttttattcccagacctaagcttacaggagtataatgtctcaggaaggcgattatgggaggtggaccatatctagtagtgatgaaagtgaggaagaaaagccaaaaccagacaagccatctacctcttctcttctctgtgccaggcaaggagcagcaaatgagcccaggtacacctgttccgaggcccagaaagctgcacacaagaggaaaatatcacctgtgaaattcagcaatacagattcagttttacctcccaaaaggcagaaaagcggttcccaggaggacctcggctggtgtctgtccagcagtgatgatgagctgcaaccagaaatgccgcagaagcaggctgagaaagtggtgatcaaaaaggagaaagacatctctgctcccaatgacggcactgcccaaagaactgaaaatcatggcgctcccgcctgccacaggctcaaagaggaggaagacgagtatgagacatcaggggagggccaggacatttgggacatgctggataaagggaaccccttccagttttacctcactagagtctctggagttaagccaaagtataactctggagccctccacatcaaggatattttatctcctttatttgggacgcttgtttcttcagctcagtttaactactgctttgacgtggactggctcgtaaaacagtatccaccagagttcaggaagaagccaatcctgcttgtgcatggtgataagcgagaggctaaggctcacctccatgcccaggccaagccttacgagaacatctctctctgccaggcaaagttggatattgcgtttggaacacaccacacgaaaatgatgctgctgctctatgaagaaggcctccgggttgtcatacacacctccaacctcatccatgctgactggcaccagaaaactcaaggaatatggttgagccccttatacccacgaattgctgatggaacccacaaatctggagagtcgccaacacattttaaagctgatctcatcagttacttgatggcttataatgccccttctctcaaggagtggatagatgtcattcacaagcacgatctctctgaaacaaatgtttatcttattggttcaaccccaggacgctttcaaggaagtcaaaaagataattggggacattttagacttaagaagcttctgaaagaccatgcctcatccatgcctaacgcagagtcctggcctgtcgtaggtcagttttcaagcgttggctccttgggagccgatgaatcaaagtggttatgttctgagtttaaagagagcatgctgacactggggaaggaaagcaagactccaggaaaaagctctgttcctctttacttgatctatccttctgtggaaaatgtgcggaccagtttagaaggatatcctgctgggggctctcttccctatagcatccagacagctgaaaaacagaattggctgcattcctattttcacaaatggtcagctgagacttctggccgcagcaatgccatgccacatattaagacatatatgaggccttctccagacttcagtaaaattgcttggttccttgtcacaagcgcaaatctgtccaaggctgcctggggagcattggagaagaatggcacccagctgatgatccgctcctacgagctcggggtccttttcctcccttcagcatttggtctagacagtttcaaagtgaaacagaagttcttcgctggcagccaggagccaatggccacctttcctgtgccatatgatttgcctccagaactgtatggaagtaaagatcggccatggatatggaacattccttatgtcaaagcaccggatacgcatgggaacatgtgggtgccctcctgagaatcttgaggcactgtgaaatttaagtgtaagacattgagccacaaacatggaatctcttctttgtactggatgtccacttcccttaaagtcttatttgcacccttacaaaatctttccaaaggtcactcttatgaatggatgttggttatacttttaatggacattaacattcctaataaagtattagtttcttaattcacttttatatgttttggaaagaaaattagtgaacttctctatgttaaaaatacgtactgc

SEQ ID NO: 187998 - DNA, 2329 bp, Homo Sapiens
ttggggtcacagtaaaagcaagttgataaaggtggccagtgggggaacagagcttatgtgcctcctgagaaagccagtcgctggaaactggactgagagccctgatttggagcacgaggaaaccttaaaaaggcctattccactagaagcaagatggctgaactcaatactcatgtgaatgtcaaggaaaagatctatgcagttagatcagttgttcccaacaaaagcaataatgaaatagtcctggtgctccaacagtttgattttaatgtggataaagccgtgcaagcctttgtggatggcagtgcaattcaagttctaaaagaatggaatatgacaggaaaaaagaagaacaataaaagaaaaagaagcaagtccaagcagcatcaaggcaacaaagatgctaaagacaaggtggagaggcctgaggcagggcccctgcagccgcagccaccacagattcaaaacggccccatgaatggctgcgagaaggacagctcgtccacagattctgctaacgaaaaaccagcccttatccctcgtgagaaaaagatctcgatacttgaggaaccttcaaaggcacttcgtggggtcacagaaggcaacagactactgcaacagaaactatccttagatgggaaccccaaacctatacatggaacaacagagaggtcagatggcctacagtggtcagctgagcagccttgtaacccaagcaagcctaaggcaaaaacatctcctgttaagtccaatacccctgcagctcatcttgaaataaagccagatgagttggcaaagaaaagaggcccaaatattgagaaatcagtgaaggatttgcaacgctgcaccgtttctctaactagatatcgcgtcatgattaaggaagaagtggatagttccgtgaagaagatcaaagctgcctttgctgaattacacaactgcatcattgacaaagaagtttcattaatggcagaaatggataaagttaaagaagaagccatggaaatcctgactgctcgtcagaagaaagcagaagaactaaagagactcactgaccttgccagtcagatggcagagatgcagctggccgaactcagggcagaaattaagcactttgtcagcgagcgtaaatatgacgaggagctcgggaaagctgcccggttttcctgtgacatcgaacagctgaaggcccaaatcatgctctgcggagaaattacacatccaaagaacaactattcctcaagaactccctgcagctccctgctgcctctgctgaatgcgcacgcagcaacctctgggaaacagagtaacttttcccgaaaatcatccactcacaataagccctctgaaggcaaagcggcaaaccccaaaatggtgagcagtctccccagcaccgccgacccctctcaccagaccatgccggccaacaagcagaatggatcttctaaccaaagacggagatttaatccacagtatcataacaacaggctaaatgggcctgccaagtcgcagggcagtgggaatgaagccgagccactgggaaagggcaacagccgccacgaacacagaagacagccgcacaacggcttccggcccaaaaacaaaggcggtgccaaaaatcaagaggcttccttggggatgaagacccccgaggccccggcccattctgaaaagccccggcgaaggcagcacgctgcagacacctcggaggccaggcccttccggggtagtgtcggtagggtttcacagtgcaatctctgccccacgagaatagaagtttccacagatgcagcagttctctcagtcccggctgtgacgttggtggcctgagctaggaggaaaaagagcagttttcactcagttttggttccctgcccgaggtgctgacccaattcgctgccaaaagagtgtcaatcagaatatacaaatcccgtatggttgtgtcatcctctcttaatcatttttactaatttctaataatcagctctagcttgcttcataattttcatggctttgcttgatctgttgatgctttctctcatcaagactttgcagcattttagccaggcagtatttactcattattaggaaaatcaagatgtggctgaagatcagaggctcagttagcaacctgtgttgtagcagtgatgtcagtccattgattgtctttagagagttaatgttacaaaaaagaattcttaataatcagacaaacatgatctgctgaggacacatgcgcttttgtagaatttaacatctggtgtttttctgaaaaaatatatatacatatattgctttatttgaaacaaattaaaatatgctgcatttg

SEQ ID NO: 187999 - DNA, 1103 bp, Homo Sapiens
atcagatctccccgaattactgatggtgtgtctgaatgcacagaagcattaaatataggacttgaggtttggaagtctatctcaataggattggagagactggttgctgcttctcgccaaaggctgcccctgacaggagaccaggctgtcaccatgcagcggtacagcccctgcgtctgagacctgagtctggtacattcgatagcggaactcatcctcctgcactttttctaaaacaacgccatccacccgtgatgcatctgtccaattctccagcttcaccacagaatcctggtccagagagatgatgtacttcgtttcattgggactggagaggtcgccgacaggcttctcagccatgatgagaacagagtagcgtggcgacttaatattcttggaagatactttgcaagtcatctcaaatgtatttccggcagcaaagaaaggctttggctgcctcgccttcaccacaagcacggaatcttctaatgcccaaaatatgttaacaggcttggagaagacatccttgcttttcacccagctgttgttccgctgtttggtccaggcagacacaacacagtaataattgcctctgtcttcctctgtagtcctttggatccggaaattgaacgtgtctgtatgttccttagaaaaaataaagtctccatcctgggcccgctgcttgctcctctctccatattttagcgtccagtccccgtccatgactgcaagcagctcgctggtcaccacattgtcgctgcgccggttcatcctgtagtaccacgaaaccgtgaatcggacattcgcctccccactcttcgtgtccaccacccggcatgccagctctgtggggtcatccgcaaacccggggaccttggaagcattcaggtacacctggtagtctggttctagccaggtcacacccacaccagctggggaagacacggcctctgccactttgtgccagctcctgttgtgtccgggtgcccacagggacacgtggcagtaatagtagccagagttttctttgctaacatcccgaaccagtaaatggtaggagcgtgcatccacatgactcaaagcaacatgaggcgagctgccaa

SEQ ID NO: 188000 - DNA, 760 bp, Homo Sapiens
tccgcgttgtggatgaagtggcagcgcggcccataggggcagaagccgatggtatgaaaggtgcggcacagctcggtcttgtacttcggatggcgagtcaggctgcgcagctcgtggaagccatgcgcgaactggcacttttcgccgtacttgcacgtgccgctctcctcgaagggccggcacagctcggtcttgtagcgcgtggagttgatctgggagccgccgccccccttctgctgctgctgcaggtgcaggaggtgctggctgcgatcgccgttctcgctaaacgagcggtcccggaatttgttctccttgttgagcagggctgtgccgccgccccccgacggctccttaagggtgccgtaggaggtcggaccgccggccgccgcgctgccgcagctgctgccgttagcggcgcccgggaacttgggcgagcagctgccggggctgggcgcggggtgggcgagtgcatgcaggttgctggccgagtgccgtcggaggaatcccggcgcgaagcccgagctgggggcggcggccacaggcgtccccaccgccttcttgtccagcatgttgttcaggttgaggttggccagggatttctctgtcttgcacaagaagtcgacatcgtagaaggcggacagaagtgtggtcgacatgtttctggatcccgcagtggccggagcggcaggccgggaggtcgggaggagcccttggggcggcgtggccgggcttgagccacgacgaataacgggcgagccaa

SEQ ID NO: 188001 - DNA, 2850 bp, Homo Sapiens
  misc_feature (2455)..(2495): n is a, c, g, or t
aaaggaaatggagaaatcagatgccaacaacttcttaatcttgttccgggattcaggatgccagttcagatctttatacacttattgcccagaaactgaagaaatcaataaactgactgggataggccctaaatctatcactaaaaaaatgattgaaggactttacaaatataattctgacaggaaacagtttagccacatacccgctaaaactttatctgccagtgttgatgcaattaccattcatagccatttatggcagaccaaaagaccagtaacacccaaaaaacttttacccactaaggcatagaagttgggaaatacttgcttcagaacattcatggtaaatttgcacttcatctttcctgcctatagaaaatctttctaattgccaacaagacttttattaattaaaactggacattaagctctgttgtcatgaacaactggaatgtaaaccacagtattttggagtgcagaacattctcaattaagtgataagtccaaatgatgaaggaaatgttttaattcacaaatggagatttgtatgtgttatcaggttcacctgcttgatattagatacattaaagcactgaattttcatggatattagttggatttatcattgaaatatggttaagattacaaattatgtgttttatttgttgcttttttttaaccttttaatgtatattcttgtcttcagatggtttgctatttttctctcctgggggtttattctaagatacctttgtattttatttcatgtggagatcatgaaagtaggaaatatacctttagaagtaactcgcacctttcttatgatgttaagagaaacactagtgtttagttttacagtaaccctcatattttaatggtgttacagcatttgcaaaaattattctgctaagtatttacaactctatttattattcactcaagtattaacattctctattaaataagaggaggtgttgtaaagagctgctagtaggttcgctttaaaccacatgagcttaaccaagaatatgttatgagaagttgctgattaaatcagtgctgtttttacaccacttctggccaactcagaataatttagattgttcttttaacaaaaaggctttctatctcttttaaagtaagtcactttataagttggcagaagtgaatgacactttgagagtagtctttcaatctgaagatgtaagacttcctgaaacaagttctcaagaagtctttacattatatttataactcatataaaaattatatttagaatttttaaacatgtacaaagggctacattttaattttaaaatagcttcacattattttacttatattgggtttttcttcattttaatccttttcaagtggaatggcttagaataagtatacacttgaaatctcctctacatgatctttgttctttaacagtgtataccagagggttagttggggaaaaacttcattctcaggaaaagacttgaatgattatgtgaccctgttatatttcagtgttgtgacaaatgtgtaaactagcgggggaagacagtattgtatcataaatgagatgcgtagtttgttttctttcatgggaagtagagataaaaatatatacatttctctaattgagttgtttagagaaagaactaatgtctcatatgatgtatttacttattttaaaaaaaagaataggaatgagatgtccctgagctgtacttttctattattataaggcctttaggcatcagtgcatctgggttatcaacattttctcaaatgctgtcaatattttactgtaatttatgttcttatatttatgtatatttgttaaaactgtaaaaaaatttcacagatttttttccaatacctgtgcaagatacatgtgtagctcaaaacctatttgtgatctactgtttgcatgtaagagaccaggatatgtaactcttatattttaagtgtatacatattgtgtatataacatatggatattaaaaatggggaattgcacattttaccttttggacagtaatttctatcacagttagaaggaaatgatagtcaaatacacgtttagattaaaactagtttaaaaaattataaatgaatctaatcaaaatgtgaatagtagtcaaaaggataatttaataagcattttacgttactaaatttgttcatttcaatattaactaaatttccctcatcaaagcaatctttgtgatattacttcgctattaaataaagaaaattggatgcaagacaatggagaaactttaaaactaaacaggaccaccctttattcttaaatttgtgtgtgtccaacagttgaattgaatgtctataaggtctaaaggtagaatgtgaatattgccacagagttcattgctctcagtataagattttactttattaatgcagaaggaatatggatatatttctttaagtctgcagnnnnnnnnnnnnnnnnnnnnnnnnnnnnnnnnnnnnnnnnnaaaattatacagttgaaaaatatgccatttcataaagtctgaggattttcgtcaaccttactgaaacacactggtgctttcatcatcagaggtcaaattattatgataactattccattaagtttgccaaacatttgtcgtggttaccagtgcagcctgtcaaattctgctatttgacacagctttggaaagatttagttctttggtttttccgttttgtattagaatgactgttacagttttatttggctgtttaaagccaaattcagctatttaattatggttttcatggacactgttgagcaatgtacagtgtatggtgtgcttacctgtcactctaaagcattgctacaag

SEQ ID NO: 188002 - DNA, 1924 bp, Homo Sapiens
ttggatctttgatcccctgaacctgaatagcctcctggatgaggaagtgagccgcactctcaacgcggagacccctaagtcatccccccttccggccaaagggcgagatccggtggagatcctcatccccaaagatattactgacccgctcagtctcaatacttgcactgatgagggccatgtagttcttgcttcgccactcaagactggtcggaagcggcatagacaccggggacagcaccaccagcagcagcaggcagccggagggagtgagagtcaccccgtgccgcccacagcccctctcacccccttactccacggggagggcgcctcacagcagccgcggcacaggggccagaaccgggatgccccccaaccctatgaactcaacacagccatcaactgcagggatgaagtggtgtctccccttccatctgctctgcagggtccctcaggctccctatcagcccctccagctgcctcagttatctctgcacccccatcttcctcctcccgacatcgcaaacgtcgcaggacttccagcaagtcggaggcaggggctaggggtggaggccagggttccaaggaaaagggccgagggagttggggaggccgccaccaccaccaccacccactgcctgcagcaggcttcaaaaagcaacagcgcaagttccagtatgggaattattgcaaatactatgggtaccgcaatccttcctgtgaggatgggcgccttcgggtgttgaagcctgagtggtttcggggccgggacgtcctaaatctgggctgcaatgtgggccatctgaccctgagcattgcctgcaagtggggcccgtcccgcatggtgggcctggatatcgattcccggctcatccattctgcccgccaaaacatccgacactacctttccgaggagctgcgtctcccaccccagactttggaaggggacccgggggcagagggtgaggaagggaccaccaccgttcgaaagaggagctgcttcccagcctcgctgactgccagccggggtcccatcgctgccccccaagtgcccttggatggagcggacacatcagtcttccccaacaatgttgtcttcgtcacgggtaattatgtgctggatcgagatgacctgggtggaggcccaaacacctgagtatgatgtggtgctctgcctcagcctcaccaagtgggtgcatctgaactggggagacgagggcctgaagcgcatgtttcgccggatctaccggcacctacgccctgggggcatcctggtcctagagccccaaccctggtcgtcgtatggcaagagaaagactcttacagaaacgatctacaagaactactaccgaatccaattgaagccagagcagttcagttcctacctgacatccccagacgtgggcttctccagctatgagcttgtggccacaccccacaacacctctaaaggcttccagcgtcctgtgtacctgttccacaaggcccgatcccccagccactaagtggccccctaaacagaaagtgtgaagaggctgccctcgctgctcataaggacctgggggaagaggaaagtgtcccaaggtctttcctttctgactccaaaaatagtttcctttcttggatctgcaaagaaagcttttcttccgtcgctgcctcagcctcctccctatgcctctggcacctgcgcagcaaggctggctgtgctggagtcaccatcatcttcctctcccccagcctcccaggctggatggcatggactgtttgctgacctctgttctcttagggcatgggaggtgggaggatatcaaattctctagccctttcctcctattctctagcccttctattctcccaaggagagagattcccatttctcctcggccattgtaccttagctcttgtccctagctgcatttcagtg

SEQ ID NO: 188003 - DNA, 1493 bp, Homo Sapiens
ttgggtgggaagctatgcggtatagacccggctagaatctgaagtgcgggagagtgctggaccctgagtgatggggccggcgccagctggagagcagcttcgcggagcgactggagagccagaggtgatggaaccagccctggaaggcacaggcaaagaggggaagaaagcatcctccaggaagcgtacattggctgaacctccagcgaagggcctcctgcagccagtgaagctcagcagggcagaactgtacaaggagcctaccaatgaggagcttaatcgccttcgggagactgagatcttgttccactccagcttgcttcgtttacaggtagaggagctactaaaggaagtaaggctgtcagagaagaagaaggatcggattgatgccttcctacgggaggtcaaccagcgggttgtgagggtgccctcagtccctgagacagagctcactgaccaggcatggctcccagctggggttcgagtgcccctccaccaagtgccctatgccgtgaagggctgtttccgcttcctgcccccagcccaggttactgttgtgggcagctaccttctgggcacctgcatccgaccagacatcaatgtggatgtggcactgaccatgcccagggaaatcctacaggacaaggacgggctgaaccagcgctacttccgcaagcgtgccctctacctggcccacttggctcaccacctggcccaggaccccctctttggcagtgtttgcttctcctacacaaatggctgccacctgaaaccctcactgttgctgcggccgcgtggaaaggatgagcgcctggtcactgtacgtctgcatccgtgccctccacctgacttcttccgcccgtgccgcttgctgccaaccaagaacaatgtgcgctctgcctggtaccgagggcagagtcctgcaggggatggtagcccagagcctcctaccccccgctataacacatgggtcctgcaagatacagttctcgagtcccatttgcagctgctgtcaaccattctgagttcagcccagggcctgaaggatggcgtggcacttctgaaggtctggctgcggcagcgggagctggacaagggccagggtgggtttactgggttccttgtctccatgctggttgtcttccttgtgtctacacgcaagatccataccaccatgagtggctaccaggtcctgagaagtgtcttgcagtttctggccactacagacctgacagtcaacgggatcagtttatgtctcagctcagatccctctttgccggccctggctgacttccaccaggccttctccgttgtcttcctggattcctcacgccatctcaacctctgtgctgatgtcactgcctctacttaccaccaggtacagcatgaggcacggctgtctatgatgttgctggacagcagagctgacgacaggttccacctgctgttgatgactcccaaacccatgatcccgggcttttgaccatgtcctg

SEQ ID NO: 188004 - DNA, 941 bp, Homo Sapiens
ttggcggtttcgtgaggagaatttgagttaaaattataagacctaattatgagtgatcaaattaaattcattatggacagtctcaataaggagccctttaggaagaactataatttaatcacgtttgattccttggagccaatgcaactattacaagttctcagtgatgttctggctgagattgacccaaagcaacttgtggatatcagagaggagatgccagagcagacagccaaacgaatgttgagccttcttggtattcttaagtacaaaccttcaggaaatgccacagatatgagtacttttcgtcagggtttggtgattggaagtaaacctgtaatttacccagtgctccactggcttcttcagaggactaatgaactgaagaaaagagcatatttagctcgttttttaataaaacttgaggtaccaagtgagtttcttcaggatgaaactgtggctgacaccaataaacagtatgaagagttaatggaagcctttaaaactttgcataaagaatatgagcagctcaagatatctggattttctacagcagaaataagaaaggatatcagtgcaatggaagaagaaaaggatcagctcattaagagagttgaacatttgaagaaaagggttgagacagctcagaatcatcaatggatgcttaaaatagcaaggcaacttcgagttgaaaaagagagagaagaatatcttgcacaacagaaacaggaacaaaagaatcagctatttcatgcagtgcaaagattgcaaagagtacaaaaccagctgaaaagcatgcgccaagctgcagcagatgcaaagcctgaaagtttaatgaagaggctagaggagagataaaatttaatttatatatggtaactgaaaaatttcctaaagaattagaaaataagaaaaaggaattacattttttacaaaaagta

SEQ ID NO: 188005 - DNA, 866 bp, Homo Sapiens
ttgggttcggagcgggagctcgggctcgcggacggtatggaggactacgagcaggagctgtgcggcgtcgaggatgatttccacaaccagttcgcggccgagctggaggtgctggcagagctggaaggggcgtcgactccgtcgccctccggggtccccctgttcaccgcgggccgacccccgcggacgttcgaggaggcccttgccagaggggacgcggcctccagtcccgccccagccgcatctgtgggcagcagccagggcggcgccaggaagaggccggtggacgccgacctgcagccggccgggtccctgccccacgcccccaggatcaaacggcctaggctgcaggtggtcaagaggctgaacttcaggtcggaggagatggaggagccgccccctcccgactcctcgccgacggacatcaccccgccgccgagccctgaggacctcgcagagctttggggccacggagtctcagaagctgctgccgacgtgggtctcacacgggcctcaccagctgcccgcaatcccgtcctgaggcggccccccatcttggaggactacgtccacgtgacatccacggagggcgtccgggcttatctggtgctgcgtgctgaccccatggccccgggggtgcagggctctctcctccacgtcccatggcgaggcggtggccagctggacctgctgggtgtgtccttagcctccctgaagaagcagtcgacggcgagcggcgggagcggctgcttcacgaggccagaggctttcagacaccctgcacagtctcaagtcgggggaggaggaggcagcccagccccttgggggcccctgaggaggagccgactgacgggtcaagacgcctc

SEQ ID NO: 188006 - DNA, 1716 bp, Homo Sapiens
ttggccctcttcgagtgagtgagagacagcatctcaaagacaaattttggaattttattttctacaagttcattttcatctttggtgtgctgaatgtccagacagtggaagaggtggtcatgtggtgcctctggtttgccggacttgtctttctgcacctgatggttcagctctgcaaggatcgatttgaatatctttccttctcgcccaccacgccgatgagcagccacggtcgagtcctgtccctgttggttgccatgctgctttcctgctgtggactggcggccgtctgctccatcaccggctacacccacggaatgcacaccttggctttcatggctgcagagtctcttcttgtgacagtgaggactgctcatgtgattttacgatacgtaattcacctctgggacctcaaccacgaagggacgtgggaaggaaaggggacgtatgtctattacacagactttgtcatggagctcactctcctgtccctggacctcatgcaccatattcacatgttgttatttggcaacatctggttatccatggccagcctggtcatctttatgcagctgcgttacctgtttcatgaggtgcaacgtcgaattcgtcggcacaagaactatctacgtgtggttggaaacatggaggccaggtttgcagttgcaactccagaggagctggctgtcaacaatgacgactgtgccatctgttgggactccatgcaggctgcgcggaaactgccctgtggacatcttttccacaactcctgtcttcgttcctggctagaacaagacacctcctgtccaacatgcagaatgtctcttaatattgccgacaataatcgtgtcagggaagaacatcaaggagagaacttggatgagaatttggttcctgtagcagcagccgaagggagacctcgcttaaaccaacacaatcacttcttccatttcgatgggtctcggattgcgagctggctgccgagtttttcggttgaagtgatgcacaccaccaacattcttggcattacgcaggccagcaactcccagctcaatgcaatggctcatcagattcaagagatgtttccccaggttccataccatctggtactgcaggacctccagctgacacgctcagttgaaataacaacagacaatattttagaaggacggattcaagtaccttttcctacacagcggtcagatagcatcagacctgcattgaacagtcctgtggaaaggccaagcagtgaccaggaagagggagaaacttctgctcagaccgagcgtgtgccactggacctcagtcctcgcctggaggagacgctggacttcggcgaggtggaagtggagcccagtgaggtggaagacttcgaggctcgtgggagccgcttctccaagtctgctgatgagagacagcgcatgctggtgcagcgtaaggacgaactcctccagcaagctcgcaaacgtttcttgaacaaaagttctgaagatgatgcggcctcagagagcttcctcccctcggaaggtgcgtcctctgaccccgtgaccctgcgtcgaagatgctggctgccgccgcggaacggaggcttcagaaagcagcagacctcctagcgctcccttgccttcctcagctgcctcctgcgccctgtgcccgactgactggaagaaggcctgtcccaattctgcccgctccatggaaaagcgggcttgactg

SEQ ID NO: 188007 - DNA, 962 bp, Homo Sapiens
ttggggatccgagggtcaggctgcagaagcccagaatcccaccccagtccccaagtacagagggcgctgtcaagatggagtttccaacccagtaaatccaagggccagaccgtgacctcataaagcatgatctccttctgtccagactgtggcaaaagtatccaagcggcattcaaattctgcccctactgtggaaattctttgcctgtagaggagcatgtagggtcccagacctttgtcaatccacatgtgtcatccttccaaggctcaaagagagggctgaactccagttttgaaacctctcctaagaaagtgaaatggtccagcaccgtcacctctccccgattatccctcttctcagatggtgacagttctgagtctgaagatactctgagttcctctgagagatccaaaggctccgggagcagacccccaacccccaaaagcagccctcagaagaccaggaagagccctcaggtgaccaggggtagccctcagaagaccagctgtagccctcagaagaccaggcagagccctcagacgctgaagcggagccgagtgaccacctcacttgaagctttgcccacagggacagtgctgacagacaagagtgggcgacagtggaagctgaagtccttccagaccagggacaaccagggcattctctatgaagctgcacccacctccaccctcacctgtgactcaggaccacagaagcaaaagttctcactcaaactggatgccaaggatgggcgcttgttcaatgagcagaacttcttccagcgggccgccaagcctctgcaagtcaacaagtggaagaagctgtactcgaccccactgctggccatccctacctgcatgggtttcggtgttcaccaggacaaatacaggttcttggtgttacccagcctggggaggagccttcagtcggccctggatgtcagcccaaagcatgtgctgtc

SEQ ID NO: 188008 - DNA, 1463 bp, Homo Sapiens
  misc_feature (509)..(524): n is a, c, g, or t
tgtacaaaatagatggcaagctggtttttaaaagacatttttctttcatgtgtatattaacagctttgaatgaaacaatctagaaggcagtgattttaagtaaacttactcagatgtttgacaccctgcaggcctaccaggaagaaatggggaaaaagggagccaagggtttgggtatcctggagaacaaggtcctcctggtcccccaggtccagagggccctcctggaataagcaaagaaggtcctccaggagacccaggtctccctggcaaagatggagaccatggaaaacctggaatccaagggcaaccaggccccccaggcatctgcgacccatcactatgttttagtgtaattgccagaagagatccgttcagaaaaggaccaaactattagtgtctgatgcctcattcagcagcctaggcatggtgctttttctgtggtcttttgcatctcaggaagataaccaacagtaatcccttgaaaagaaacttaagtacctcggtgnnnnnnnnnnnnnnnncttatggaaaaaaatataaaagatcacatatactgattttaaaggctcctcagtcatttgtagcccttggattagcagcattaattaaatctcaagggtttcttgtaaagtccatttatgttaatcaaagttgaatataaaaatccaccattgcctgttagccagtcagttttagtcactgtgaaatatttcacattcagcctccatgcagtagagatttgagtttaatttcatgtccatgtgactttcatgtttcctatctcatagctcatgctactacataagccaaaacatgtatctcatcattggaagtaagatcagggctgatattcacctgggatagacagtattggtgaactactcatttactacagtgtctcagccttgataaggggcagtggattgcctgttgttcggtgttgtgaatagcacctctgaataagattagagtgtttcttaattcatttcaaactctaaaattagattaatggtggtgctaagaaagagtattaattactttgggaatggtcaaaattaacattaaaaacattttagacaaaaagtttcattgtacattcaaagaaaatgtaagtttggaagtactaaaagactattttatacttgttgattaatcggaatgtttgttgtatgccttcattttccatttcacttatatgtgtatgtccatatatgttaattttcattgtagcaaagctaatggaaataaagctaatgctctagttgaaagaaaaggaaaactcctgaaatcctagaatgtcttgttatttttagctgactgtaaaatattatgaacagtctttgtgtattgtgcttaatgcttttgtaagaaacagaatttgaaatatttcatccttgtcatgctcaaaattttgttacatgcttgttattcagagtataataaagttttgtacaggcctg

SEQ ID NO: 188009 - DNA, 1266 bp, Homo Sapiens
  misc_feature (93)..(133): n is a, c, g, or t
  misc_feature (289)..(317): n is a, c, g, or t
aaatagagaaaggacagggcaacctgcccagccactagcatcgaaaacaaaaaggtatgttaattgtgaggctctcaattctagaaatgcccnnnnnnnnnnnnnnnnnnnnnnnnnnnnnnnnnnnnnnnnnctctttctagaagtcatttatttacatattatatgtccgatatataatgtgtagataaatgtatactgcagtgaaagtgaccactctactgaactgtacagcacattataggacaaattattggaagttttcatctcatactggtatcttttaatnnnnnnnnnnnnnnnnnnnnnnnnnnnnncgtctggccagggccaggataagacaaacaggaacacttcagaatccaaggcaggggaaggctgttggcctctcttcagaggactgcaggggtgggaaaagggagggacagatcatgcacaaaagtacttacaaattacacacccaacccccaccctcaataaaaacagaagaaaaagccccatcacttaacaccaaacagcaacattatcaatacaccctttctttgctgcccaccatgccttatttgaaagaggaggcctgtgagaagtggaaagagccagggtgagagggaagatttgcacttcagtctagtttccaatttccatttctcttacaggaagtcttcagtcatctgatgcctgacatcgagctctgagcagaaaccgagtatgtggtggccacgactggggtgccattgttggctgagtagccttgcctcaatgtttcaaaatatgatgcctgcacgggtttgtgatactgcagcacttttatggcgtcttctattttaaaccattccctcttccttccaatgttaactgaatcttcccagtcttccagcacttcagtgacaatgagcacatagacatacgtcctgtgcttcctctcctggttctcaaaaattccaactaatcttcccaatgtcccttttactccagcctcctcacagacttcacgaactgctgccacacttggctcctcctcgggctccatgcctcctccagggacaatccatctgtctggatggcgactactgctcacgagtagcacttttctcactaacagaaatctgaggaagacagctactggagttggtctgaccacttgatgccatcaaggcccagactctgtatctttgcactctcccattcctcctcatggcctcaaagtggcggctacaactccagatacaacttcagcgttcaaggcagatgacagaagtaatccaa

SEQ ID NO: 188010 - DNA, 2121 bp, Homo Sapiens
ttggagaagagattgttttgagtctgtgttaattcttttttaatgtttgatggaattatccagtgagttcatttggatctgcttttgtctggtcctctgagccccagtgagagtttcctgaggtacctcacccttccacaagacaacaggcttgccattgatctgcaacaaacggcggttgttgtcatggcccatttagaccgtctggctacaccctgtagatgcctcctctgtgtagctctccgacgtctcataagagtcattttttacaggtcagaactgtagaaataatgagaaagtgacacttgtacgcatagctgatttggagaaccataataacgatggaggcttctggactgtgattgacaggaaagtgtatgatataaaggacttccagacacagtcgttaacagaaaatagtattcttgctcagtttgcaggggaagacccagtggtagctttggaagctgctttgcagtttgaagacacccgggaatccatgcacgcattttgtgttggccagtatttggagcctgaccaagaaggcgtcaccataccagatctggggagtctctcctcacctctgatagacacagagaggaatctgggcctgcttctcggattacacgcttcctatttagcaatgagcacaccgctgtctcctgtcgagattgaatgtgccaaatggcttcagtcatccatcttctctggaggcctgcagaccagccagatccactacagctacaacgaggagaaagacgaggaccactgcagctccccagggggcacacctgccagcaaatctcgactctgctcccacagacgggccctgggggaccattcccaggcatttctgcaagccattgcagacaacaacattcaggatcacaacgtgaaggactttttgtgtcaaatagaaaggtactgtaggcagtgccatttgaccacaccgatcatgtttccccccgagcatcccgtggaagaggtcggtcgcttgctgttatgttgcctcttaaaacatgaagatttaggtcatgtggcattatctttagttcatgcaggtgcacttgatattgagcaagtaaagcacagaacgttgcctaagtcagtggtggatgtttgtagagttgtctaccaagcaaaatgttcgctcattaagactcatcaagaacagggccgttcttacaaggaggtctgcgctcctgtcatcaaacgtttgagattcctctttaatgaattgagacctgctgtttgtaatgacctctctataatgtctaagtttaaattgttaagttctttgccccattggaggaggatagctcagaagataattcgagaaccaaggaaaaagagagttcctaagaagccagaatctacggatgatgaagaaaaaattggaaacgaagagagtgatttagaagaagcttgcattttgcctcatagtccaataaatgtggacaagagacccattgcaattaaatcacccaaggacaaatggcagccgctgttgagtactgttacaggtgttcacaaatacaagtggttgaagcagaatgtgcagggtctttatccgcagtctccactcctcagtacaattgctgaatttgcccttaaagaagagccagtggatgtggaaaagagaaagtgcctactaaaacagttggagagagcagaggttcgcctggaagggatagatacaattttaaaattgtatctgggaacctcttactgattgtttaaaggatgttgatttgatcccgccttttaatcggatgctgctggaagtcacctttggcaagctgtacgcttgggctgttcagaacattcgaaatgttttggtggatgccagtgccaaatttaaagagcttgccggttcccctgcaaaccatcaccaatgagaacccatcgggaccgagcctggggaccatcccgcaagcccacttcctcctggtgatgctcagcatgctcaccctgcagcacagcgcaaacaaccttgacctcctgctcaattccggcacgctggccctcgctcagacggcactgcgcctgattgggccccagttgtgacaacgttgaggaagatatgaatgcttctgctcaacgtgcttctgccacagtttt

SEQ ID NO: 188011 - DNA, 1478 bp, Homo Sapiens
ttggcttatttgatgtgttttcagataccaaaatgtagggagctagtggattagataagttctcagataaaaggttctctgccagaaacaactgatgatcctgacgtgattctaaacatacacacttttggtttgatccatactgaatggtttgattaaactgatggtaggctgggccttccaaagtgctgggattatatgcgtgaaccaccgcgcctgaccatggaatcagtttttcaatctgtgctcgaggtgttgtgttcttaactatcttctactcctttgcaaagataatctttcttaaacatagattttctaatcagttctctagcattgtttcattctgtctttggcatgttttcactttgctgtgctgtacttttacacattctttttaactatagcttcctgctttgctctggatcaggaagctattgaagctgacacccacagagttaaactcagttgctgaagccaccagctccccctcccagtccttcttttcagagtaggctggcagctgtcctaactgcctactaaagccaaatgcttgaggagagagagagagtaaggagccagccatgaatcctttccagaaaaatgagtccaaggaaactcttttttcacctgtctccattgaagaggtaccacctcgaccacctagccctccaaagaagccatctccgacaatctgtggctccaactatccactgagcattgccttcattgtggtgaatgaattctgcgagcgcttttcctattatggaatgaaagctgtgctgatcctgtatttcctgtatttcctgcactggaatgaagatacctccacatctatataccatgccttcagcagcctctgttattttactcccatcctgggagcagccattgctgactcgtggttgggaaaattcaagacaatcatctatctctccttggtgtatgtgcttggccatgtgatcaagtccttgggtgccttaccaatactgggaggacaagtggtacacacagtcctatcattgatcggcctgagtctaatagctttggggacaggaggcatcaaaccctgtgtggcagcttttggtggagaccagtttgaagaaaaacatgcagaggaacggactagatacttctcagtcttctacctgtccatcaatgcagggagcttgatttctacatttatcacacccatgctgagaggagatgtgcaatgttttggagaagactgctatgcattggcttttggagttccaggactgctcatggtaattgcacttgttgtgtttgcaatgggaagcaaaatatacaataaaccaccccctgaaggaaacatagtggctcaagttttcaaatgtatctggtttgctatttccaatcgtttcaagaaccgttctggagacattccaaagcgacagcactggctagactgggcagctgagaatatccaaagcagctcattatggatgtaaaggcactga

SEQ ID NO: 188012 - DNA, 2225 bp, Homo Sapiens
  misc_feature (471)..(581): n is a, c, g, or t
  misc_feature (2083)..(2093): n is a, c, g, or t
ttggatttgatctcttcagaatgtctaataatatttctttcctttttaggtttttcaggcagaaaatccttttgattttatggaaaacatttctttagaaggaaaaacaaatttctttgagaaacgagtttcagagtatcagcgttttgcagttatggcagaaaccacagataacgtcttcaccttggatgcagatttttaaaaaacctctcgttttaaaactctataaacttgtcattggtaaatagtagtctattttcctctgcttaaaaaaaattttaagtatatcctttaaaggactgggggtttgctcaaaaggaaatccaaaacctattctaaacaatttgcatttatataattttcctgtttaacaacaagagtgtgacctaaatgcttttgtcttgtcactgaaataaaagatggcattatgtggttaagagcatggggcgaggggtcagacatgagtctaannnnnnnnnnnnnnnnnnnnnnnnnnnnnnnnnnnnnnnnnnnnnnnnnnnnnnnnnnnnnnnnnnnnnnnnnnnnnnnnnnnnnnnnnnnnnnnnnnnnnnnnnnnnnnnggatattaggattaggatgcaaaaataaatgcttaaccaacactactactgttagcaccactactaattatcattcattgataatattaattgcaatgatgttgtaataaaatactctcatttccttaaaataattgtgattctaggtcctaggatctagaattagatctttgtatttttaatgcttaggggaagaatataagtatctccttaaaaagaacataattctcattcacgcaagaataagttctttgaattccttagtatgtagtgaagaaaatttagttgttagttgctttgggaagcctacttatggagtggaaaccaggaggttatcatggtagttgaccttataagaaaaatgattcttcttcagaaattaaaaacataactattgccagatttagctctggaatgtttagaatcaggctagaatagcattttccaaagaatattctaagagctattagctcctctagatatttttttgggggaaaaaggggattctgtggtcagatgagtttgggaaatgctgaacacttcattcttctttagcaagtacagtcagtacatcaaagactgagcagttcagtggtacataaatttatctcgccctgcatattcccaacatacttaacacagatgttttttacctgttaacatctcacccagctagtgttcctcagaacaaagattggaaaaagctggaaccatttatacatagaggaagggcttatggactgagaaagggagaacatggtagggattattgaatcatttcaaatttataccagcctgaatagtgtaccagcaattgacttaggctgtgtttctttatggttttaaaactcttgagctgttataagagatagttcttttaatgtgactatgcaacatgatagccaatggtgagggaaaaggaggtttctctagaagagtctgatgaaaggccgggaaccaaggtttttgagaagtctgcccctatttatttttagtaagtatcaagaggtagcctgagcctagttagagttagacctgtctttggatgaagaagtcttaatactgaaatactgaatttttaatacattattatttggtattctgtataccccttcaagcagttgtttcccattcccaacaaactgtactttatacaattctggatgctaaaacttagagattttctctttgcataaattttggctccattctttccataacaatctaatcaaaactgggagttctcaagtgaatgcaaaaggagcaggccataactttatttgttagatacactgtcagaaacttgagatcttttggcctatgataataccattaatttttgcattgcttcagtttgccaagtgtttttacatcatctcatttgatctcaaaacagcttgacagagcaactgttattgaaatattacagatggaaagaatgaggctcacggaagttaaatgacttggccaagatctgctcatcgtcactgtctgtacagtannnnnnnnnnnagaggttgtaatgtctcagatttagtcctttaccatctatgttgatttgcttttgtctatttcctcattaattgaatatactttaaatatatatatattaaagtatcaaaatatagagagacatttgaactg

SEQ ID NO: 188013 - DNA, 1507 bp, Homo Sapiens
  misc_feature (814)..(850): n is a, c, g, or t
  misc_feature (918)..(965): n is a, c, g, or t
ttgggatggcgattccgggcaggcagtgagtgatccgggagttagggtcaggctgggggatgagaaactacggcgactgtatctttggccgaggagttttaaatgcgctggaagtgaagggactgtgtcgtcaagggtagagacgggaaaaaacgagaagtcctgaggaacatagattcccctcccccgtacattttcccggatggaagcccgaagtttgagggagaaacttgtgaggaaataaaggaagttgggctgaggggcagagagcgagacttttctattttccaaaagctcggtctgaggcccctcattcttgcttcctaacccgcgcttgagtttctccccgcttggatgctctcaggggcagtgtgaagagagacagttcctggcttccttagagggccttgttctccttggcagaagctcaagtcctgattcccgcccttccttctcgttttaggaatattgttctgagaagccacagaaaaagggtatgggcttattttgccaaagaaaacacagcagttgcaccctgttttgcaaaaaccatcagtgtttgggaatgattctgatgatgatgatgagacctctgtgagtgaaagccttcagagggaagctgctaagaagcaggccatgaaacagaccaaactggaaatccagaaggcccttgcagaagatgctactgtgtatgaatatgacagtatttatgatgaaatgcagaaaaaaaaggaggaaaataatcccaaattgcttttggggaaagacagaaagcccaagtatattcacaacttgctaaaagcagttgagatcnnnnnnnnnnnnnnnnnnnnnnnnnnnnnnnnnnnnntacagagagaacgagaaatggaaaagggggagtttgatgataaagaagcatttgtgacatctgcatannnnnnnnnnnnnnnnnnnnnnnnnnnnnnnnnnnnnnnnnnnnnnnnggctgctgcactggaagcatgtttggatgtaaccaagcagaaagatctcagtggattttataggcacctattaaatcaagcagttggtgaagaggaagtacctaaatgcagctttcgtgaagccagatctggtataaaggaagaaaaatcaaggggcttctccaatgaagtaagttcaaaaaacagaataccacaagagaaatgcattcttcaaactgatgtgaaagtagaggaaaacccagatgcagacagtgacttcgatgctaagagcagtgcggatgatgaaatagaagaaactagagtgaactgcagaagggaaaaggtcatagagacccctgagaatgacttcaagcaccacaggagtcaaaaccactctcggtcacctagtgaagaaagagggcacagtaccaggcaccacacgaaaggatcacgaacgtcgagaggacatgagaaaagggaagatcagcaccagcagaagcaatccagagaccaagagaaccattacactgaccgtgattaccgggaaagaaagggattctcat

SEQ ID NO: 188014 - DNA, 1754 bp, Homo Sapiens
  misc_feature (116)..(152): n is a, c, g, or t
  misc_feature (220)..(267): n is a, c, g, or t
ttgggtatttatgatcgaaatgcagaaaaaaaaggaggaaaataatcccaaattgcttttggggaaagacagaaagcccaagtatattcacaacttgctaaaagcagttgagatcnnnnnnnnnnnnnnnnnnnnnnnnnnnnnnnnnnnnntacagagagaacgagaaatggaaaagggggagtttgatgataaagaagcatttgtgacatctgcatannnnnnnnnnnnnnnnnnnnnnnnnnnnnnnnnnnnnnnnnnnnnnnnggctgctgcactggaagcatgtttggatgtaaccaagcagaaagatctcagtggattttataggcacctattaaatcaagcagttggtgaagaggaagtacctaaatgcagctttcgtgaagccagatctggtataaaggaagaaaaatcaaggggcttctccaatgaagtaagttcaaaaaacagaataccacaagagaaatgcattcttcaaactgatgtgaaagtagaggaaaacccagatgcagacagtgacttcgatgctaagagcagtgcggatgatgaaatagaagaaactagagtgaactgcagaagggaaaaggtcatagagacccctgagaatgacttcaagcaccacaggagtcaaaaccactctcggtcacctagtgaagaaagagggcacagtaccaggcaccacacgaaaggatcacgaacgtcgagaggacatgagaaaagggaagatcagcaccaacagaagcaatccagagaccaagagaaccattacactgaccgtgattaccggaaagaaagggattctcataggcacagagaggccagtcatagagattcccattggaagaggcatgaacaggaagataaaccaagggcgagggaccaaagagaaagaagtgacagagtatggaaaagggagaaagatagggagaaatattcccaaagagaacaagaaagagatagacaacaaaatgatcagaaccgacccagtgagaaaggagagaaggaagagaaaagcaaagcaaaggaagagcatatgaaagtaaggaaggaaagatatgaaaataatgataaatacagagatagagaaaaacgagaggtaggtgttcagtcttcagaaagaaatcaagacagaaaggaaagcagcccaaattctagggcaaaggataaatttcttgaccaagaaagatccaacaaaatgagaaacatggcaaaggacaaagaaagaaaccaagagaaaccctctaattctgaatcatcactgggagcaaaacacagactcacagaggaagggcaagagaagggtaaagaacaagagagaccacctgaggcagtgagcaagtttgcaaagcggaacaatgaagaaactgtaatgtcagctagagacaggtacttggccaggcagatggcgcgggttaatgcaaagacctatattgagaaagaagatgattgatggctaccccaagagaaagatttaaggaagcacagaaaactgtaattcctggaacctgctgcgtaaaaccataaaggagtgtgttaccagtagtttggagggcatttttaaatttattttcaaaattttaagttaaaagtcagtcttacagcttggatgtttggatgtggatgtttggctgaatttatatatagtgtgtactcatcaataccacattctttgttgtattcaagaaccgttaagagtgtgctaattccctgtaggtacataatgaggaaaatttgctccactacaaccatta

SEQ ID NO: 188015 - DNA, 949 bp, Homo Sapiens
cgataaaagcacctttgtacaaaaaagttggtttctcataacagcgtcagagagaaagaactgactgaaacgtttgagatgaagaaagttctcctcctgatcacagccatcttggcagtggctgttggtttcccagtctctcaagaccaggaacgagaaaaaagaagtatcagtgacagcgatgaattagcttcagggttttttgtgttcccttacccatatccatttcgcccacttccaccaattccatttccaagatttccatggtttagacgtaattttcctattccaatacctgaatctgcccctacaactccccttcctagcgaaaagtaaacaagaaggaaaagtcacgataaacctggtcacctgaaattgaaattgagccacttccttgaagaatcaaaattcctgttaataaaagaaaaacaaatgtaattgaaatagcacacagcattctctagtcaatatctttagtgatcttctttaataaacatgaaagcaaagattttggtttcttaatttccacaaattccatgattagtactcaatttgttttcaatcttcagcaatcccctgaagaaggaagaggtggcaggtggtgataaaaataaactgtcctacagcatgtgacaaaagtcatccaacaagattctacttgcacaataagcctttcagtgggtcagaatgactgcctttgtctccataagttgattatcaggaaattagaaaaattctctttgaataaagattatgtttcttcaccttaagtttaaattgttcatagctgagctctttagcatcaataatgggaaattctgtcaccattcatccataactggctacaaatcaaagtcagcctaatgagccacttggcacttgagtagggaaatggctgactctcttcgtcactttcaggattacaggtacctcaaacatttaaatattt

SEQ ID NO: 188016 - DNA, 1423 bp, Homo Sapiens
ttggatagatatcaaggaaatcaagacagagttttgaggcaggtcacagtcatcagtcgtgaaacattgactgatgagatgggttccaagtacagtgcatttgggaaaatgttcaatcggtgcacagaccttgctcctttaagtcaaaaattccataagtttgattcatgtgaaaatagcttgaagtctaattcagacttactaaattataacaggagctatgcaagaaagaaccccactaagagatttagatgtgggagaccacctaagtataatgcttcctgttctgtgcctgagaaggaaggcttcattcatactggaatggagccctatggagatagtcaatgtgaaaaagttctcagtcataagcaagcccatgttcagtataagaaatttcaagccagagagaaacccaatgtttgtagtatgtgtgggaaagcctttatcaagaagtcacagctcattatacatcaaagaattcatactggagagaaaccatatgtatgtggagattgtaggaaagccttcagtgagaaatcacacctcattgtgcatcagaggattcatactggggagaaaccctatgaatgtactaagtatggaagagcattctcccggaagtcacctttcactgttcatcagagagtccatactggagagaaaccctatgagtgttttgagtgtccaaaagctttctcccagaagtcacatctaattatacatcagagagttcataccagagagaagccctttgaatgcagtgaatgcaggaaagccttctgtgagatgtctcacctttttatacaccagataactcatactgggaagaagccctatgaatgtactgaatgtgggaagaccttccctcggaaaacacagctcattatacatcagagaacgcatactggagagaagccctataagtgtggtgaatgtgggaaaactttctgccaacagtcccacctcataggacatcaaagaattcatacaggagaaaaaccttatgtgtgtactgactgtgggaaggccttttcccagaagtcacacctcactggccatcaaagacttcatactggagagaaaccttatatgtgtactgaatgtggaaaatccttctctcagaaatcacctcttatcatacaccagagaattcatacagggggagaaaccttatcagtgtggtgaatgtggcaaaaccttctcccagaaatcactcctcattattcatctgagagttcacacaggggagaaaccttatgagtgtactgagtgtgggagggccttttccctgaagtcacatctcattctacatcagagaggtcatactggagagaaaccctatgaatgtagtgaatgtggaaaggccttctgtgaaagtctccactcatatacatcagaaaactcatcctaaggagaaaacccc

SEQ ID NO: 188017 - DNA, 1548 bp, Homo Sapiens
ttggcctgatttgaatgctgtcctttataccaaccgggcagcagcacagtactatctgggcaattttcgttctgctctcaatgatgtgacagctgccagaaagctaaaaccctgccacctcaaagcaataataagaggtgccttatgccatctggaactgaaacactttgccgaggccgtgaactggtgtgatgagggactgcaaatagatgccaaagagaagaagcttctggaaatgagggctaaagcagacaagctgaagcgaattgaacagagggatgtgaggaaagccaacttgaaagaaaagaaggagaggaatcagaatgaggctttactccaggccatcaaggctaggaatatcaggctctcagaagctgcctgtgaggatgaagattcagcctcagaaggtctaggtgagcttttcctggatggactcagcactgagaacccccatggagccaggctgagtctagatggccagggcaggctgagctggcctgtgctctttctgtacccagagtatgcccagtcggacttcatctctgcttttcatgaggactccaggtttattgatcatctaatggtgatgtttggtgaaacaccctcttgggacctagagcaaaaatattgccctgataatttggaggtctactttgaggatgaggacagggcagaactataccgggtgcctgccaagagcaccttgctacaggttctacagcaccagaggtactttgtaaaagccctgacaccagcatttttggtctgtgtaggatcctctcctttttgcaagaattttctccgggggagaaaggtgtaccagatacgatgactaagccagggcccctggatctcctcccttaccctcctctgctgggaacctagcacacctgaatcagctggacatactgctggagtccagtgctttctttccgtcaccctggggatagtccttcctggcatcgtggtgggggaggagcctctggcttccctaaactgcagcctctctggctggtcttcactttcctcagttgatataaaactctgggtcttggccatgatgtccttggactccatcgctaaagggaccatctgctgcagttaccacagcaactgacctgagcggcaccctggtctgtggagatggactcaggatccagtgacatgattctgaacttttgtggagtttgacaccttagagaagctacccctcaaactgcacatctacacacaaacaaacaatgcataggattccaaggctttaaagctgagagaccctggcctcaagttatttcatgcgcacagaaggaagccatgtggggttgctgaagatgccttgaggtgaaaatgggggcaggaaagccacatcttgctctgcatttataaagaccgtacaaactcagatctttgtacccctaaaaagattgccatttttcttcatcttggccatatggaggactgtgacagactttggacagtggcctcttgagttcctctgcagttttgacatttaggatatgtgtcctttaaactggaaaatcttctaac

SEQ ID NO: 188018 - DNA, 905 bp, Homo Sapiens
tgtacaaataagaatactctgtttaatactttctctcttcctttttctttcccttcaggaaaggctactaggaaaaaccagaagtggagaggaccagatgaaaacattagggccaatcttcgtcaatatggtttagagaagtattaccttgatgtcctggtttcagatgcatctaaaccttcctggaggaagggcacatattttgatgcaatcattactgatcctccatatggtatcagagaatctacaagaagaacaggttcacagaaggagataccaaaggggatagaaaaatgggaaaaatgtccagaaagccatgttcctgtttccttgagttatcatctgagtgatatgtttcttgacctgttaaacttcgcagctgagaccctcgttttaggtggaagactagtctattggttaccggtgtatacgccagaatacactgaagagatggtgccttggcacccttgcctggaactcgttagcaactgcgagcagaagctttccagtcacacatcaaggcgcttgatcacaatggaaaaggtgaagaaatttgagaatcgggaccagtattcacatctgctaagtgatcattttctgccataccaaggtcataattccttccgtgagaaatattttagtggggtaacaaaaagaattgccaaggaagaaaaatcccacccaggaatgaaaattaagattttgacaatgaagaaagaataagaatttgatttaaaaagacatctggatgtgaactttcatgtatgatccagaaaataggtacggttttaaaatattttatatagaaaaagctaccaaagtaaaattgagcaatgcttttaaagttatctttgttttatagaccttttttgttgtatgtattacagtctttatatccttattta

SEQ ID NO: 188019 - DNA, 3012 bp, Homo Sapiens
ttggcatcttcctcagacagcagccctgtgggtccctgggccgggctgggccctttcctgggctggggagttgggtgagcgagagcctcctcctcaagctgggcctgggctcttgtgagatgccttggaggtgcctgctgggtctgggagcacttgagggaggtctggctgtcacagccccagaacttccctggaggcagcagagcttcccatgggtggtcatggagtgtcccctggtcatggggagtgctgggtctccgtggggcctcctgtgcccacccacctgcctctgtgttttggcaccagcacgtggccgcgctgtttcccggcgatgtggaccgcctgcgcaggatgtctgtgatcgaggagggggactgcaagcggatcaacatggcccacctgtgtgtgattgggtcccatgctgtcaatggtgtggcgaggatccactcggagatcgtgaaacagtcggtctttaaggatttttatgaactggagccagagaagttccagaataagaccaatggcatcaccccccgccggtggctgctgctgtgcaacccggggctggccgataccatcgtggagaaaattggggaggagttcctgactgacctgagccagctgaagaagctgctgccgctggtcagtgacgaggtgttcatcagggacgtggccaaggtcaaacaggagaacaagctcaagttctcggccttcctggagaaggagtacaaggtgaagatcaacccctcctccatgttcgatgtgcatgtgaagaggatccacgagtacaagcggcagctgctcaactgcctgcacgtcgtcaccctgtacaatcgaatcaagagagacccggccaaggcttttgtgcccaggactgttatgattgggggcaaggcagcgcccggttaccacatggccaagctgatcatcaagttggtcacctccatcggcgacgtcgtcaatcatgacccagttgtgggtgacaggttgaaagtgatcttcctggagaactaccgtgtgtccttggctgagaaagtgatcccggccgctgatctgtcgcagcagatctccactgcaggcaccgaggcctcaggcacaggcaacatgaagttcatgctcaacggggccctcaccatcggcaccatggacggcgccaacgtggagatggccgaggaggccggggccgagaacctcttcatcttcggcctgcgggtggaggatgtcgaggccttggaccggaaagggtacaatgccagggagtactacgaccacctgcccgagctgaagcaggccgtggaccagatcagcagtggctttttttctcccaaggagccagactgcttcaaggacatcgtgaacatgctgatgcaccatgacaggttcaaggtgtttgcagactatgaagcctacatgcagtgccaggcacaggtggaccagctgtaccggaaccccaaggagtggaccaagaaggtcatcaggaacatcgcctgctcgggcaagttctccagtgaccggaccatcacggagtatgcacgggagatctggggtgtggagccctccgacctgcagatcccgccccccaacatcccccgggactaggcacaccctgccttggcgggaccagcgggcatttgttttcttgctgactttgcacctccttttttccccaaacactttgccagccgctggtggtccctgcttttctgagtaccatgtttccaggaggggccatgggggtcagggtggttttgagagagcagggtaaggaaggaatgtgctagaagtgctcctagtttcttgtaaaggaagccagagttgacagtacaaagggtcgtggccagccctgcagcttcagcacctgccccacccagagtgggagtcaggtggagccacctgctgggctcccccagaactttgcacacatcttgctatgtattagccgatgtctttagtgttgagcctctggattctggggtctgggccagtggcatagtgaagcctgggaatgagtgttactgcagcatctgggctgccagccacagggaagggccaagccccatgtagccccagtcatcctgcccagccctgcctcctggccatgccgggaggggtcggatcctctaggcatcgccttcacagccccctgccccctgccctctgtcctggctctgcacctggtatatgggtcatggacccagatggggctttccctttgtagccatccaatgggcattgtgtgggtgcttggaacccgggatgactgagggggacactggagtgggtgcttgtgtctgctgtctcagaggccttggtcaggatgaagttggctgacacagcttagcttggttttgcttattcaaaagagaaaataactacacatggaaatgaaactagctgaagccttttcttgttttagcaactgaaaattgtacttggtcacttttgtgcttgaggaggcccattttctgcctggcagggggcaggtctgtgccctcccgctgactcctgctgtgtcctgaggtgcatttcctgttgtacacacaagggccaggctccattctccctccctttccaccagtgccacagcctcgtctggaaaaaggaccaggggtcccggaggaacccatttgtgctctgcttggacagcaggcctggcactgggaggtgggggtgagcccctcacagccttgcccctccccagggctggcaacctgccttccattgcccaagagagagggcagggaacaggctactgtccttccctgtggaattgccgagaaatctagcaccttgcatgctggatctgggctgcggggaggctctttttctccctggcctccagtgcccaccaagaggatctgcgcacggtgcacagcccaccagagcactacagccttttattgagtggggtggggcaagtgctgggctgtggtcgtgccctgacagcatcttctccatgccccggctctgtggaggaggccatactcccctagttggccactgggggccacc

SEQ ID NO: 188020 - DNA, 889 bp, Homo Sapiens
tcatccaggcaggggtagtggtcacccattttggatctcatcaacatcagcaatccaggcccgggcttagcaagagcctcctttgagagcctggatgttgggcaggtgaacagggatgttttccgcttcacggattatggcctcaagtgtggctggtggatgcttctgcctggcctccaggcagaggtgggctttctcctcccagcgttcagcaatggtcagcagttcctgcagctcggcctgggctttatccacagcagggctaggggctacactggcacccgcgaccaacagtcctcgcatgacagccaaggtgccccttcgggctgagggggccagtgtgcgtttcacctcatccagccatcgcgcctgttccacctgccgctggagctgctgggcctcaggcacctccacccccagctgccgccccctctccaacagggactgcagtagccctggactggagggcagtgaggccagggcctcacgagcctcagcctggtaggcctccacctgttccagaacacccttgacatccccaatctggtgcatggcgcaaggcaggttgttcatctggtccagaaaggcccggagctcagtcagggtcatctgtagaccagccaccctgtgggggccagcttcctggccgctgaccagtcccagagctcgggacacgcaagcctctgcctcactcaggcagttctttagttgctgcagcagctcactattaggaaacctccgctcacgggcttcagactctagtgccctcagttcttcaaggctgcgcttccgcccatcctccacctccagggccactcgcactttgttggcccaggtgtcaaaggactcagcccgaaccttcagcttatgcagcatggcagccaaccaa

SEQ ID NO: 188021 - DNA, 1404 bp, Homo Sapiens
  misc_feature (80)..(96): n is a, c, g, or t
ttggctatttccctccctccccccttttcgtttccggcgctcccgccttctctccgcagagctcttctctgagcctgttnnnnnnnnnnnnnnnnncgtggaggaactggggttcgcgggagcacgagctgcagcaccacttccggaaagttcaggagccctggaaaggagaaggaataagacggcaggaggaagagagagagaggaatggaagaatctcacttcaattctaacccgtacttctggccttctatccccacagtctcaggtcagatcgagaacacaatgttcatcaacaagatgaaggatcagctgttgccagagaagggctgtggtctggccccacctcactaccccaccttgctgacagtgcctgcctcagtgtccctgccctcaggcatcagtatggacacagagtccaagtcagaccagctgaccccacacagccaagcgtccgttacccagaatatcacggtggtccctgtgccgtctacaggactgatgactgctggagtctcctgttctcagaggtggagaagagaagggagtcaatcaaggggtccgggtttggtaatcacgtccccctcaggctctcttgtgaccacagcatcatcagctcagaccttccccatttcggctcccatgattgtctcagctcttccccctggctcacaagccctgcaggttgtccctgacctctccaagaaggtagcatcgaccctaaccgaggaaggaggcggaggtggtggtggaggtggcagtgtggctcctaagccaccccggggccggaagaagaagcggatgctggaatcagggctgcccgagatgaatgacccttatgtcctctcccctgaggatgatgatgaccatcagaaagacggcaagacctacaggtgccggatgtgctcactgacattctactccaagtcggagatgcagatccactccaagtcacacaccgagaccaagccccacaagtgcccacattgctccaagaccttcgccaacagctcctacctggcccagcacatccgtatacactcaggggctaagccctacagttgtaacttctgtgagaaatccttccgccagctctcccaccttcagcagcacacccgaatccacactggtgatagaccatacaaatgtgcacacccaggctgtgagaaagccttcacacaactctccaatctgcagtcccacagacggcaacacaacaaagataaacccttcaagtgccacaactgtcatcgggcgtacacggatgcagcctcactagaggtgcacctgtctacgcacacagtgaagcatgccaaggtgtacacctgcactatctgcagtcgggcatacacatcagaaacataccttatgaaacatatgcgcaaacacaacccgcctgatctt

SEQ ID NO: 188022 - DNA, 1672 bp, Homo Sapiens
ttggctttgtggaccactaaggactttgctgctatttgagcacagtgatattgttgtcatttcactactcagtgttttgttcaccagttctggaggaggaccagcaaagacaaggggagctgcttttttcattattgctgtgatctgtttattgctttttgacaatgatgatctcatggctaaaatggctgaacaccctgaaggacatcatgacagtgctctaactcatatgctttacacagccattgccttcttaggtgtggcagatcacaagggtggagtattattgctagtactggctttgtgttgtaaagttggttttcatacagcttccagaaagctctctgtcgacgttggtggagctaaacgtcttcaagctttatctcatcttgtttctgtgcttctcttgtgcccatgggtcattgttctttctgtgacaactgagagtaaagtggagtcttggttttctctcattatgccttttgcaacggttatcttttttgtcatgatcctggatttctacgtggattccatttgttcagtcaaaatggaagtttccaaatgtgctcgttatggatcctttcccatttttattagtgctctcctttttggaaatttttggacacatccaataacagaccagcttcgggctatgaacaaagcagcacaccaggagagcactgaacacgtcctgtctggaggagtggtagtgagtgctatattcttcattttgtctgccaatatcttatcatctccctctaagagaggacaaaaaggtacccttattggatattctcctgaaggaacacctctttataacttcatgggtgatgcttttcagcatagctctcaatcgatccctaggtttattaaggaatcactaaaacaaattcttgaggagagtgactctaggcagatcttttacttcttgtgcttgaatctgctttttacctttgtggaattattctatggcgtgctgaccaatagtctgggcctgatctcggatggattccacatgctttttgactgctctgctttagtcatgggactttttgctgccctgatgagtaggtggaaagccactcggattttctcctatgggtacggccgaatagaaattctgtctggatttattaatggactttttctaatagtaatagcgttttttgtgtttatggagtcagtggctagattgattgatcctccagaattagacactcacatgttaacaccagtctcagttggagggctgatagtaaaccttattggtatctgtgcctttagccatgcccatagccatgcccatggagcttctcaaggaagctgtcactcatctgatcacagccattcacaccatatgcatggacacagtgaccatgggcatggtcacagccacggatctgcgggtggaggcatgaatgctaacatgaggggtgtatttctacatgttttggcagatacacttggcagcattggtgtgatcgtatccacagttcttatagagcagtttggatggttcatcgctgacccactctgttctctttttattgctatattaatatttctcagtgttgttccactgattaaagatgcctgccaggttctactcctgagattgccaccaaaatatgaaaaagaactacatattgctttagaaaagatacagaaaatt

SEQ ID NO: 188023 - DNA, 856 bp, Homo Sapiens
aagaatccacagaggcctcctccccacccaccacacggggggtcttcaggctcttcccacaggcaagacagtgcagggagaccagggagctgagagacagggcccacttgagttccgcatgcgaagctcctggctgttttctgtgatttcaacaacatccagatcctggtctgggccaatctccacagctctgaaagtgggtttgctgctgtagcccatctgcctacaggctgtctcagcgagagcttctgtgaagttgtcgaaacaggcagagaaccagttccctgtggccgagtccagcacctgcagtgtggatcggtccttggagaggcggactgccactgcaggcccttcggggaagctcttgacacagtgctcctcgtcctcccccaagggacagtccagctctccgtcacacagctgcttcctcgggatgaagtggagaggctgcccgcagaggaagtagtatttatccagaatcaccttgatgaggacaaccacaatgatgatactcgccaggctcagtagtgctatgatgatggggatccccacctttctgaaggtctccatggggatacggggtttgcgcaggggtttgacatcgaggctgttcagaggttgatcactgtcaggatccatgctggctctgtgatcctcccggtctccctgtagcctggagctgagattgtcaccccaaggcagcaggagggcctccccacacaggtcctggctggccagcaggtcagaagtccctggtcagcactggctggaggaggcccgagtgcagggcaggccttggtccctcacgcccagcatccttgtccgctgagcaagctgctgcctctctctgtgccaa

SEQ ID NO: 188024 - DNA, 941 bp, Homo Sapiens
aaaaagtacttgaaggcctcggtgagcttcccaggctgaactacctggggcagtcccccacagtccgccatctttagcaaagttgtatttatagggttcaggcgggaattgcattcgaccacagcctcaactgcaggcgaattgtcccctaccaccagtaaagtagaacactttaatgtttttgatttgttatcatttggcccagtatgggtctttcgatctccaggtctctgcgtccattgtaggaattcaagaagagctgcaggttgtcttggttgatgtcttgggcaatatgcattctgtaggtttggatcaggtccaggttggcctgtaactcttcctgcccaaagtgatgagccaaaataatgtccacaacattggttgtcaggccagagagtttggaagctgcccagtcaatccagcctttagcgcaagggtcaacattaatgagcacaaggccttccacaagctctggatggttgagtgcaaatctgctgaggatgtaagctccagctccaactccaattccaatgatgcttttcaggcttaggtgggtaagaacaggaggcagcatttcagccagctcatccattgtggggtactgataccctgttgggaaagagggtgcaccttcctgctggcctggggcatccacatgacagacagcaaagtgctgggtgatctcttgcatatcctcaaagttaaagaatgcattgaaacaggatttatggttgaggccaatgtcatgatatgttagtataactggtctgtttcctttgggtaagcctcttatagtgacgtggaccacaccatgagttgtttctatatcatgttcctgacagtcaaagtcctggaagtttcttgtaccattcttatcatttagaagtggtttgatctctgtgagctgaagacgatcctgaagccaacttttttgtacaaag

SEQ ID NO: 188025 - DNA, 1575 bp, Homo Sapiens
aattgatgagcaatgcttttccttataaagcccactttgtacaaaaaagttggatgaaggagtggactgcagccttggcctagccactgggctgggatcttctgggtcatgtgactgtgtatccaggagcagaaacttgtattctcaggattcaggatctacccagcaccaaagatgtattttcaggagaacagacctagaaatgggcctgtctggcatttcagagtcaggcaaagcaggcagggccagggagcttctgtgggtctacacaagaaggttcctgtgagggctatcagttgttgccttctagcttgctggtaactttggcgcctccgccaagccctgccagactcccctggctgtgatggcattctgtgccatcctccttgtccccagcctctgcaggatgccctccctacccacctctccctgggccttccctgtccactgggctggattcatgttcaaaccactggactggcagggcaacgacttcttctcacctcaagatgaggtcctcgcccccttgtcttggcataaaaacacctttaaagcatgagccatgtgcttctttgcccttctctgtcctgttccaatcttctgcctcccagtcactccctggggactatgggatcactgtccccccacctgtgtggccacaccatgtgtcctgtcaatccagaactgcctctgagctccaggctgaccacagatcagccacagcctgatgcctgcagccccactttgctcacccttcccctcccctcctccttccttccacacagcaagcctacctttctccatccatgctcaccatagcccccttccttgtgacctggaccctccattgtacctggctgagactgtcagcctcctggaggagtggggtccaccttcttcttgccctatgcagtgcaagctcacttctcacccagcaaggttgactcatctgcctccatgtctctggggctttgctgttgccctgaaacctagctgggctggtcttgctcccagcttgcttccccctcctcggatgtccctttgcaggcccctgtcgttcctccggcaccagtgtccttggctgccatggcaagctcatcaggggcttgtaccctggtcaccaagcatggtagcagctgcctgcattgtatctccatctggtcactgcaggtgccaacccttcatcccccatgttttcctgggccatggagggctgacctccgtttctggggaatgtggctgagctgtggtaaccagctacaccccaggtgctctttccatggtggtgcctgctcatcttgctgatgcaaactaggaagttaggctgcatctcggagtggctttcgctggagaggtgctttgctgtctctcagactcagtcactgtgttccctccccgcctctcttatctccatggctgtttgcagctctcccaggtactttggggtctgagctggaattcctttgtggtttgctcttctgcttctcactcttgtattaagaaggattccacaagggagagtggcatccctgctgctgctgtgccagaccagagtttcctgaggggccctgaccc

SEQ ID NO: 188026 - DNA, 1182 bp, Homo Sapiens
  misc_feature (425)..(524): n is a, c, g, or t
ttggcaagatggcggaccttgattcgcctccgaagctgtcaggggtgcagcagccgtctgagggggtgggaggtggccgctgctccgaaatctccgctgagctcattcgctccctgacagagctgcaggagctggaggctgtatacgaacggctctgcggcgaggagaaagtggtggagagagagctggatgctcttttggaacagcaaaacaccattgaaagtaagatggtcactctccaccgaatgggtcctaatctgcagctgattgagggagatgcaaagcagctggctggaatgatcacctttacctgcaacctggctgagaatgtgtccagcaaagttcgtcagcttgacctggccaagaaacactcaacaaatttggaatagaggggaacttctcagcctgataaagagcatctgtgnnnnnnnnnnnnnnnnnnnnnnnnnnnnnnnnnnnnnnnnnnnnnnnnnnnnnnnnnnnnnnnnnnnnnnnnnnnnnnnnnnnnnnnnnnnnnnnnnnnnaaccttggaacacaaaccgcctctatcaggccattcagagagctgatgacatcttggacctgaagttctgcatggatggagttcagactgctttgaggagtgaagattatgagcaggctgcagcacatattcatcgctacttgtgcctggacaagtcggtcattgagctcagccgacagggcaaagaggggagcatgattgatgccaacctgaaattgctgcaggaagctgagcaacgtctcaaagccattgtggcagagaagtttgccattgccaccaaggaaggtgatctgccccaggtggagcgcttcttcaagatcttcccactgctgggtttgcatgaggagggattaagaaagttctcggagtacctttgcaagcaggtggccagtaaagctgaggagaatctgctcatggtgctggggacagacatgagtgatcggagagctgcagtcatctttgcagatacacttactcttctgtttgaagggattgcccgcattgtggagacccaccagccaatagtggagacctattatgggccagggagactctataccctgatcaaatatctgcaagtggaatgtgacagacaggtggagaagtggtagacaagttcatcaagcaaagggactaccaccagcagtgagcaggggaa

SEQ ID NO: 188027 - DNA, 923 bp, Homo Sapiens
gccaactttgtacaaaaaagttggccaagatggcggaccttgattcgcctccgaagctgtcaggggtgcagcagccgtctgagggggtgggaggtggccgctgctccgaaatctccgctgagctcattcgctccctgacagagctgcaggagctggaggctgtatacgaacggctctgcggcgaggagaaagtggtggagagagagctggatgctcttttggaacagcaaaacaccattgaaagtaagatggtcactctccaccgaatgggtcctaatctgcagctgattgagggagatgcaaagcagctggctggaatgatcacctttacctgcaacctggctgagaatgtgtccagcaaagttcgtcagcttgacctggccaagaaccgcctctatcaggccattcagagagctgatgacatcttggacctgaagttctgcatggatggagttcagactgctttgaggagtgaagattatgagcaggctgcagcacatattcatcgctacttgtgcctggacaagtcggtcattgagctcagccgacagggcaaagaggggagcatgattgatgccaacctgaaattgctgcaggaagctgagcaacgtctcaaagccattgtggcagagaagtttgccattgccaccaaggaaggtgatctgccccaggtggagcgcttcttcaagatcttcccactgctgggtttgcatgaggagggattaagaaagttctcggagtacctttgcaagcaggtggccagtaaagctgaggagaatctgctcatggtgctggggacagacatgagtgatcggagagctgcagtcatctttgcagatacacttactcttctgtttgaagggattgcccgcattgtggagacccaccagccaatagtggagacctattatgggccagggaga

SEQ ID NO: 188028 - DNA, 988 bp, Homo Sapiens
gcctttaagcttatttattaatgggatctggttttcactgtgggtggcacttccactttaacgcaacgatcaaaaacattaagatctacgacaggatggatattgggacaataagcatgacaatgtcattgttgccaagccaaattttacaagaggtgaagggaagcaaagggtaactagaatgcagaggttttcatcatcatcttcaatcagctgtcacagaattccccactactgaacctcccttacaattcttacttctccccacccctccaggtatctaaaatagaaaagaaaggaaataattctccctgagagatttccgcctccttcttctttcttttcaacagcaacctcaactgttgacagaggttccttaggattcaaagaacaattctgaagctgaaaacagaatagtctgtttttgaataaatcctaaaatattttcatttcacacccttgttccatgaggaaaaaatttacatagagacaaataggttttgttcaggcagtgtgcaataataaagtttaggccaaattagatttataattagatattaaatgctggtttggtactaagtttagggataaaatgaacccatatccacatatgtacttatagacaccaaagcacagaacagataatctagctggcatccagtgtttcttgactttggctgaatctctgttccccagaacagactgtaagctccaaaaggtggggaccatgttttggtcagctttggatttctccaacaccttgcacagtgttcatgcaaagagccactcacagaaattgttgaattcacttaaaaaagaaaacaattttggctgggtacagtggctcatgcctgtaatcccagcactttctcaccatctttaaataaaaacaatttgcattttccaatcggaagctgctggggcattaggactcatgtgctttctgctccacaggtttcagatgccactgcactactaactcccccaa

SEQ ID NO: 188029 - DNA, 1281 bp, Homo Sapiens
  misc_feature (664)..(705): n is a, c, g, or t
actttgtacaaaaaagttggggaaaatttcaggctgaaggtttagcgggtgccgcctctaaagagagcaatcactacacttatggctgggattttgcgcttagtagttcaatggcccccaggcagactacagaccgtgacaaaaggtgtggagtctcttatttgtacagattggattcgtcacaaattcaccagatcaagaattccagaaaaagtgtttcaggcctcacctgaagatcatgaaaaatacggtggggatccacagaaccctcataaactgcatattgttaccagaataaaaagtacaagaagacgtccatattgggaaaaagatataataaagatgcttggattagaaaaagcacatacccctcaagttcacaagaatatcccttcagtgaatgcaaaattgaaagtagttaagcatttgataagaatcaagcccttgaagttgccacaaggacttccaacagaggagaacatgtctaacacgtgcctcaaaagcactggggagttagtagtgcagtggcatctgaaacctgtggagcagaaagcacatgagtcctaatgccccagcagcttccgattggaaaatgcaaattgtttttatttaaagatggtgagaaagtgttttcattaaaatatgttttcaaaaccattttcannnnnnnnnnnnnnnnnnnnnnnnnnnnnnnnnnnnnnnnnnttacaggcatgagccactgtacccagccaaaattgttttcttttttaagtgaattcaacaatttctgtgagtggctctttgcatgaacactgtgcaaggtgttggagaaatccaaagctgaccaaaacatggtccccaccttttggagcttacagtctgttctggggaacagagattcagccaaagtcaagaaacactggatgccagctagattatctgttctgtgctttggtgtctataagtacatatgtggatatgggttcattttatccctaaacttagtaccaaaccagcatttaatatctaattataaatctaatttggcctaaactttattattgcacactgcctgaacaaaacctatttgtctctatgtaaattttttcctcatggaacaagggtgtgaaatgaaaatattttggatttattcaaaaacagactattctgttttcagcttcagaattgttctttgaatcctaaggacctctgtcaacagttgaggttgctgttgaaagaaagaagaaaggaggcggaaatctctcatggagaattatttccctttcttttccattttaa

SEQ ID NO: 188030 - DNA, 1119 bp, Homo Sapiens
ttggtgctgtgttgagataattagaactgattttaataggctattgcatgccattaaaaattctggggtggggcaggtggtagtaataacatcagagctaaaatttagagaaaatattttgccgtagtgttcatgatggattgtttgaaagactataccacaatttattgtggttgtaaaaaacttgcttttatatttcttttgaatatcaagaaagaaaaagacagtttattggaagacatcaaaagactgaaacaagacaaacaagctcttgaagtagacttcgaaaaaatgaagaaagagagggaccaagccaaagatcagattgcttatgtcacaggtgagaaattatatgaaataaaaattttagaagaaacacataaacaagaaatcagtcgtctgcaaaaaagattacagtggtatgctgaaaatcaggaacttctggataaagatgcacttcggcttagagaagcaaatgaggaaattgagaagctcaaacttgagattgagaaactgaaagctgaatctgggaatccatctattcggcagaagatacgcttaaaagataaagcagcagatgccaaaaaaattcaggatctggagcgacaagttaaggaaatggaagggattctgaagagaagatatcccaattctttacctgctttaatattggctgcatcagcagctggtgatacagtggataaaaatacagtggaatttatggagaaaaggataaaaaagctagaagctgatctggagggcaaagatgaagatgcaaagaaaagccttcgtaccatggaacaacagtttcagaaaatgaagattcagtatgaacaaagactagagcagcaggagcagctacttgcctgcaattgaatcaacatgactctcccagaattaaagccctagagaaggaacttgatgacatcaaggaagcccatcagatcactgtaagaaaccttgaagccgaaatagacgttcttaaacatcagaatgctgaattagacgtcaagaaaaatgataaagatgatgaagattttcagtctatagaattccacgtggaacagctcatgctaaagctaaattagtaagactcaatgaagaactggctgcaaaaaa

SEQ ID NO: 188031 - DNA, 1343 bp, Homo Sapiens
ccaactttgtacaaaaaagttggcgccgtggaccatgctaacggagaagatccaccagacggggctaaaggtcgtgcgcctctgcgccaagagccgtgaggccatcgactccccggtgtcttttctggccctgcacaaccagatcaggaacatggacagcatgcctgagctgcagaagctgcagcagctgaaagacgagactggggagctgtcgtctgccgacgagaagcggtaccgggccttgaagcgcaccgcagagagagagctgctgatgaacgcagatgtcatctgctgcacatgtgtgggcgccggtgacccgaggctggccaagatgcagttccgctccattttaatcgacgaaagcacccaggccaccgagccggagtgcatggttcccgtggtcctcggggccaagcagctgatccttgtaggcgaccactgccagctgggcccagtggtgatgtgcaagaaggcggccaaggccgggctgtcacagtcgctcttcgagcgcctggtggtgctgggcatccggcccatccgcctgcaggtccagtaccggatgcaccctgcactcagcgccttcccatccaacatcttctacgagggctccctccagaatggtgtcactgcagcggatcgtgtgaagaagggatttgacttccagtggccccaacccgataaaccgatgttcttctacgtgacccagggccaagaggagattgccagctcgggcacctcctacctgaacaggaccgaggctgcgaacgtggagaagatcaccacgaagttgctgaaggcaggcgccaagccggaccagattggcatcatcacgccctacgagggccagcgctcctacctggtgcagtacatgcagttcagcggctccctgcacaccaagctctaccaggaggtggagatcgccagtgtggacgcctttcagggacgcgagaaggacttcatcatcctgtcctgtgtgcgggccaacgagcaccaaggcattggctttttaaatgaccccaggcgtctgaacgtggccctgaccagagcaaggtatggcgtcatcattgtgggcaacccgaaggcactatcaaagcagccgctctggaaccacctgctgaactactataaggagcagaaggtgctggtggaggggccgctcaacaacctgcgtgagagcctcatgcagttcagcaagccacggaagctggtcaacactatcaacccgggagcccgcttcatgaccacagccatgtatgatgcccgggaggccatcatcccaggctccgtctatgatcggagcagccagggcccggccttccagcatgtactttccagacccatga

SEQ ID NO: 188032 - DNA, 1166 bp, Homo Sapiens
ttggctggaagagacccggcgtcagaaggagctcctgtgcaagatggagagggagaagagcattgagatcgagaacctgcagaccaggctacagcaactggacgaggagaacagtgaactccggtcctgcacgccctgtctgaaggccaacattgagcgtctggaggaggagaagcagaagctgttggatgagatagagtcgctgacgctgcggctcagtgaagagcaggagaacaagaggagaatgggggacaggctgagtcacgagaggcaccagttccagagggacaaggaggccacccaggagctgatcgaggacctccgaaagcagctggagcacctgcagctcctcaagctggaggccgagcagcggcggggccgcagcagcagcatgggcctgcaggagtaccacagccgcgcccgggagagcgagctggagcaggaggtccgcaggctgaagcaggacaaccgcaacctgaaggagcagaacgaggagctgaacgggcagatcattaccctcagcatccagggcgccaagagcctcttctccacagccttctccgagtccctggctgcagagatcagctccgtctcccgagatgagctcatggaggcgattcagaagcaggaggagatcaacttccgcctgcaggactacatcgacaggatcatcgtggccatcatggagaccaacccgtccatcctggaggtcaagtagaggcaggaaggtccagcctgagctggattcgggactccaacaccctggagtggttccgtcagaccatgaggagccaagaccagcaggtcccacagccgacagtgcccagagcatgcagggaaccctcgtgcagctgagctggggccgccaaagaccggggctgccaaaggggcagagggtggtggagaggagagggagaaagggaagtcccagggcccggggtccacagaggatgagggttgtggcagggccgtccatcagcgctgaccttccgggggcccagagcttcccagctctgagtcaagctggccatgaacgcgtacacttcagttcagcaggatgggctggagagcctctctgtgcagcggtgtggggtgagccctgctgtggcctccttgtggtggtccctcttcccacgtgcagccctgttgggaagaaaggaagaaaa

SEQ ID NO: 188033 - DNA, 1125 bp, Homo Sapiens
  misc_feature (292)..(301): n is a, c, g, or t
ggcatgagtacccaggcaggcaaggaagatgagacaggtggatttcagctcctggaaggagccccggatcagagtagctgctgagtacccagccttgccctcctctgacgtgggaacgggtgtgctgtgctgccacctggtggcctcttccctcactgcagggtgaaatgatgtggatgccagcccttaggtgtgggctccagctggggtcacagagcatcccagccctcagcactgcccgacatagagggaacccctaccactggccctatgtggcctgggggtgagagannnnnnnnnnaaaagcgagggacttcaggccactgacaccgtggaaggaccacaacagaccccaccccagaccagccacaggatgacccaaggccgtggggtccagacaccacaccaggaagcctcccaggcagcccaggtgtagcagaggctgtgcagctgcagcggcctgggcagagaagaaagagcaggaaggacagaggaaggcgcctgtggtgaagaccctgcctccctcacgcccccacgcacctgtgctgactgctgctcaaggggtcagcctggaggtcttcccggtgcttggacgaggctgagaagggaggacgtgaaggaacagagtagctggaaaagcccccgcgggtcctgcagctcctgcactcaggctggggctgggctggcgcggggggcaggtgctgcttcctgcctggactgacctgctaccccagcctgaagggcggcttgtccagagcccacggcctctcgctgggcagaggcagggccacagcgcagactgcctcagagccacttccctgcatgcccacagcccggaagagacgccgcagagccaggggctgctgaaaacgctccggagatgacctcacactcagcagcacagtaaattgccaacgccaggaaacacggagcagctggggctggcccacgtggaggcacgaagccagcgccggctggcccagaatgcccactcctcagggaaaaagggccttccacactgggaggacggttctccagggcatcctctcccgccatcccgcaggcagccccaccccaggagctgctgtagctcgtcctcatgttcagagaatgtctcggcgccaa

SEQ ID NO: 188034 - DNA, 1226 bp, Homo Sapiens
ttggcttttatgtgggaaagggcaggctctggtttctgctgcctcttctcttacattgtcatttatttcttcactgtgttgagctgggaggagtcttcaatgtgggaagggattttctgccaaatgccattaatgctgctttatccttaggccctagagatactgaaagtcctggggcagtatcttctgatggtgtgcatgtgaggagaagatgaggttaggactgagaagtgcagaagttggaacagtggtaaggctgttttaaaataagatgttttgttttaataatatgctcctggcacaaagctaggagtaaatgtgactccaaagggagttcagttaatctctgaaatgcacaaaacctagctattttctccctctcatcacagtctgagtctggtccattgctaccccaattctctggggacataaaaccaggctggaaagggaccaggaagtttgaaatagtgacatatcatccactagtcccaagggctaaggaatagtgagtttattctggaaggaactgggaagcttagtctaattagtgcctggggatgacctatgcaatcacaccgcttatgaccatcctagagagggccctgagcaccagcttgatcttagggatttccaaagtaacctgctttttgcctggatagggttaaaatagacctttcttgcctatccttgccttaacctatctgcctgaggttggcctgagattgtgagtcaacgactttgctatcttttcctcagtgttgaactttcattaagaaataaagtcctagcttcttacagagaggggtccaaatggtgaatgctcatcctgcctggattcaaggaattagctcagagattggcccctagcttttctgcctttgtagggacagcaaaaggggaaaatttgctgcagaaaattccaaaagattgctgtagctctcacagggaagtggtaaagatcagctaaacctgggttggggtgctttctgcccagtgggtcttggcataagtagattaatcctgctcttttaagaaaaggcaacttattcaacagtctggaaagggggttctcagaaactcagtttctttattccttcttttctcccaactactgttactggttatagaggtctttggactctaaagaccaatgtttggccactaactggactaatatgtatctttctgtgatttcatcatagaggtctgttttgtgagggtttggg

SEQ ID NO: 188035 - DNA, 981 bp, Homo Sapiens
ttggctacactggcctagggaaggaagaatatagagaaggctctttagagtacgttcccatcagtctcaaagtaggaagtatcctggtatccaggggcttagagaagggagcaggtgaacattctaattagaggagattatgagttcaaaaacctaaggatggtcaagcatggatccttcaggaaacttcgaggtcctcatgggcggagtaatggagcttcgtcacacaagcctggcagcagcccatcatccccgcgggaaaaggaccttctgtccatgctgtgcaggaatcagctgagccctgtcaatatccatcccagttatgcaccttcttccccaagcagtagcaactcaggctcctacaaaggaagcgactgtagccccatcatgaggcgttctggaaggtacatgtcttgcggtgaaaatcatggtgtcagacccccaaacccagagcagtatttgactccactgcagcagaaagaggtgacagtgagacacctcaaaaccaagctgaaggaatctgagcgccgactccatgaaagggaaagtgaaatcgtggagcttaagtcccagctggcccgcatgcgagaggactggattgaggaggagtgtcaccgggtagaggcccagttggcactcaaagaagccaggaaagagattaaacagctcaaacaggtcatcgaaaccatgcggagcagcttggctgataaagataaaggcattcagaaatattttgtggacataaacatccaaaacaagaagctggagtctctccttcagagcatggagatggcacacagtggctctctgagggacgaactgtgcctagactttccatgtgattccccagagaagagcttaaccctcaacccccctcttgacacaatggcagatgggttatctctggaagagcagtcacgggggaaggggctgacaggagctactggtaggagatagcatagccaacagcacagatttgtt

SEQ ID NO: 188036 - DNA, 918 bp, Homo Sapiens
ttggcttcttcttcacgcaatcgaggtcctcatgggcggagtaatggagcttcgtcacacaagcctggcagcagcccatcatccccgcgggaaaaggaccttctgtccatgctgtgcaggaatcagctgagccctgtcaatatccatcccagttatgcaccttcttccccaagcagtagcaactcaggctcctacaaaggaagcgactgtagccccatcatgaggcgttctggaaggtacatgtcttgcggtgaaaatcatggtgtcagacccccaaacccagagcagtatttgactccactgcagcagaaagaggtgacagtgagacacctcaaaaccaagctgaaggaatctgagcgccgactccatgaaagggaaagtgaaatcgtggagcttaagtcccagctggcccgcatgcgagaggactggattgaggaggagtgtcaccgggtagaggcccagttggcactcaaagaagccaggaaagagattaaacagctcaaacaggtcatcgaaaccatgcggagcagcttggctgataaagataaaggcattcagaaatattttgtggacataaacatccaaaacaagaagctggagtctctccttcagagcatggagatggcacacagtggctctctgagggacgaactgtgcctagactttccatgtgattccccagagaagagcttaaccctcaacccccctcttgacacaatggcagatgggttatctctggaagagcagtcacgggggaaggggctgacagggagctactggtaggagatagcatagccaacagcacagatttgttcgatgagatagtgacagccaccaccacagaatctggtgacctggagcttgtgcattccacccctggggctaacgtcctggagctgctgcccatagtcatgggtc

SEQ ID NO: 188037 - DNA, 1596 bp, Homo Sapiens
actttgtacaaaaaagttggaacggaagtgcaggttacggtctgagacatcaccgccaagctgggcatcggggagatggccgagactgaccccaagaccgtgcaggacctcacctcggtggtgcagacactcctgcagcagatgcaagataaatttcagaccatgtctgaccagatcattgggagaattgatgatatgagtagtcgcattgatgatctggaaaagaatatcgcggacctcatgacacaggctggggtggaagaactggaaagtgaaaacaagatacctgccacgcaaaagagttgaaggttgctaataatttatactggaatctggcatttttccaagccaagagaagatcgaatggctttttgcagctaactactatgtgtagacaggttttatattataaagtatgcattcttatcacctagtatatagttagtttgtagagtgatttccccccagtttcttgaacatggtatcttcacatcttggaccttggtcagttgtgctattcattattaaacactaaaactttggcggttcttgcataacattgtcagattttttagtgtatttctgtgaagtcattttttttcttgtcattccttttgtagtagttgctgtttggataaaagttgatgtgtgattttttattaaacaaatagtaaacccttcaattatagttagtcttggtgaagtaagatgtttgtagactttagagttctttaattcttggcacaacgtgactgttgagctaacaccaaatagtgtgttggcaatacttttcaaatggctgaaaacacctaaaaattgttcattcagaaatatctgtcactgctctgttgccaaaactcagaatagaacttagacgtatgtctgagtccctgagatcacatgctaaagtcgatgaaaagtaaccactgccactgtcttgtgtcagaacttttacagtacagaaaataacagaatagccttctgtaatgaggcgtttgttagagttttgcatgagattctaatacttcagtaggaccctacctacgtggttcatctacaatggttaccataaaaaatctggcaggattttaaaactcaatcagtctttcctttgagctagtgacttgaaaagaaagagagaaggaaaagagaccatattaagtccatgccagttgcttggctagaatatgatcaacgacttgtagtagactcaagtttttaaaaaacactattttacttaaactgtttcttatctaaattcttgcagagtgtcaatgttatcattgattatagaagacagggataatacctttatctctggccgctcaaaaatgcagtgccaggagtgctaaacctagaggccaatactgatgacctggaaagtgatccatatgattgtcaccacaaagtgcttttacacaaaaacttgaaaatttgaaaaacatgatttttttaagtttctcatctcacaagtctttggtgtttatattgcaaatctatcaaagtaagaaataatttgtgctgtatacaaatttacatggggaacataaaaggagtgaaattccttctgtgataaatgaattcaccactctggtt

SEQ ID NO: 188038 - DNA, 1318 bp, Homo Sapiens
ttggcagagttaaagacaaagtggcagtccctgagtttgtttggctggcagcctgttgtgctgtccctggaggaggctgggccatgggctttgtcaagcacacccgggacagtgacatcatagaagatgtgatggtaaaagatcttcagaaactgcttccatttaaccctcagctgtttcagaacaactgtggtgaaactgagcaagacacagagaaaatgaaaaaaatcctggaagtggttaaccaaatccaggatgaagaacgaatggtacaatctcaaaagagttctagtcccctttctagcaccaggagcaagaggtctactctgttgcctccagaggcatctgagggaagtagtagctttttgggaaaactcatgggcttcattgctaccccattcatcaagctttttcaattaatttattaccttgtggtagcaatcctgaagaacattgtctatttcctgtggtgtgttaccaagcaggtgattaatggcatagaaagttgcctttaccgcctgggctcagccaccatctcatacttcatggccattggggaagagttggtgagcattccctggaaggtgctcaaggtcgtggccaaagtcatcagggctctcctccggatcctttgttgtctgctgaaggccatttgccgagttctgagcatccctgtccgtgtccttgtggatgtggccactttccctgtgtacaccatggtcgctattccaattgtttgcaaggacattgcactgggccttggtggcactgtctcactgctctttgacactgcttttggtaccctgggtggcctatttcaggtggtttttagtgtctgcaagcggattggctacaaggttacttttgacaattctggggagttataaactcaaaaaactaatagtatccagtcacagtgaatttgaaagctggaatagtttgtctttacaatgggtttctgttcactgtcagttatcattatattttggcctttggtggggatgtctgcttgtttttgcaaaagaagatggcagaatttagacttgacagaggagaaatgctcagggtgagattaggtgtagtaatctgctgtttacctccagttatatgtgcaaactcccaagccactaataacttcagttatgcactctaacacagacgaccacctgaaatgcactggtatctatctctgataattaaaaattacaggggagggaagaactagaaaaagaacaactttagacaaaggtgtctgagaaaaggagaaagggagcttgttcttcccattgctctttgtgatttaagggcaaaacagatt

SEQ ID NO: 188039 - DNA, 764 bp, Homo Sapiens
catctcccgtgggcgtggattacatccgcctttgacaacacattctgggcaaaggcctcaacagggtccacaccatcctcctgggtgggtgggacgtagaagcgcacctccatgagagacacctctgcgtcatcgttttgggtggaattccagtgtcacctcattcttgcctgtggtgcactgggacacattgctgaggggtatctcaaagactggctggtcaccaatgtcaaaggaaagcagctgcccaccaaatttcactgtcccccagttccagcccttcacacaaaggtccttctccattagctcaaggcgatagtgagttttgaagaaatcagagagtttctcaaactccgattctcggaagccatcatacttgtagacatggccattctttgtaagcagtttaagtccatggcccagagcaacacggcgccagataccttctgttaactccccagcctggatgttgtccactttgcctgtcttgctattcttgaagatgatgccctgacggctcaacctcagtcgaccatcattcatggaacctttcacctcctgatagacgtcgttgaactccagtgtctctgccatgtcgacccctgcctgtggtggcctgggcagagccccaggctgcacaagggaaaccaagtaaactgggagctgggccccaactcctgagtgggtgtgcggatgctcagcaggttgggaatctcctcaggctgcggcctcgcgagggccccggcgcgagaggtgggcgcgct

SEQ ID NO: 188040 - DNA, 1710 bp, Homo Sapiens
tcatcccggtcactgtcacctcattactggaggagctggcagaggcgttgctgtcaaactcctctgccacatcttcctcctcttcacctgggttgaatgactcatcggtttcttctcgtgagtcatcgctgctgtcattggcattctcctcccggatcttgcttcctccttcatcctctccaagtaggcatcatgctggtcctcatcagagtcagcatattcatcgtagcttgggttcatgccctctttcaatcctcggtttttgatgttgagctttttcgcgttgacaaaatcaaacagtttcccgtactcctccctctcaatgctgctgaaggtatactgagtgccctgcttggtctcaatttcaaagtcaaaggaacgagtagtagtggtaccacgagcaaagttgacaaaggagatctcatcgaagcggatgtgcacaggtggcttgtggacgtagatgaagccccgctccagcgggtagagcagtcctgagcttgccttgtaggaacaggtaatgcactgggcccctgagtgcccttggaagttgcctggcactgtgatcttgcggtttaccagtgctttcatgacccggctgaccatctcatagagggatcctgacatgttcttggtgagccgaccctcaaagcgcttctccacttcttcctcgttcatgttcagagtcaacgaaatgtcctcgtccttggagaagaggaggatcaggaagtggtagcgagtttggccttgcttgattgggggatccaggctgatcacaaagaacatctggcgctggtccttgtggggtaacaaaaacagacgcagtactgtggtgtaggggatcttgtagtcaaaggtcttgccatgcaggtgcagaaaggtggggtagatccgaatgtcataacccacgaggagtcagacactgcagctcccggaagatgcagatggcatctcccgtggcctggattacatccgcctttgacaacacattctgggcaaaggcctcaacagggtccacaccatcctcctgggtgggtgggacgtagaagcgcacctccatgagagacacctctgcgtcatcgttttggtggaattccagtgtcacctcattcttgcctgtggtgcactgggacacattgctgaggggtatctcaaagactggctggtcaccaatgtcaaaggaaagcagctgcccaccaaatttcactgtcccccagttccagcccttcacacaaaggtccttctccattagctcaaggcgatagtgagttttgaagaaatcagagagtttctcaaactccgattctcggaagccatcatacttgtagacatggccattctttgtaagcagtttaagtccatggcccagagcaacacggcgccagataccttctgttaactccccagcctggatgttgtccactttgcctgtcttgctattcttgaagatgatgccctgacggctcaacctcagtcgaccatcattcatggaacctttcacctcctgatagacgtcgttgaactccagtgtctctgccatgtcgacccctgcctgtggtggcctgggcagagccccaggctgcacaagggaaaccaagtaaactgggagctgggccccaactcctgagtgggtgtgcggatgctcagcaggttgggaatctgaattcaccaacttttttgtacaaagttggctataaataaaaaagcattgct

SEQ ID NO: 188041 - DNA, 1066 bp, Homo Sapiens
gagcaatgcttttttataatgccaactttgtacaaaaaagttggcccctacaccacagtactgcgtctgtttttgttaccccacaaggaccagcgccagatgttctttgtgatcagcctggatcccccaatcaagcaaggccaaactcgctaccacttcctgatcctcctcttctccaaggacgaggacatttcgttgactctgaacatgaacgaggaagaagtggagaagcgctttgagggtcggctcaccaagaacatgtcaggatccctctatgagatggtcagccgggtcatgaaagcactggtaaaccgcaagatcacagtgccaggcaacttccaagggcactcaggggcccagtgcattacctgttcctacaaggcaagctcaggactgctctacccgctggagcggggcttcatctacgtccacaagccacctgtgcacatccgcttcgatgagatctcctttgtcaactttgctcgtggtaccactactactcgttcctttgactttgaaattgagaccaagcagggcactcagtataccttcagcagcattgagagggaggagtacgggaaactgtttgattttgtcaacgcgaaaaagctcaacatcaaaaaccgaggattgaaagagggcatgaacccaagctacgatgaatatgctgactctgatgaggaccagcatgatgcctacttggagaggatgaaggaggaaggcaagatccgggaggagaatgccaatgacagcagcgatgactcaggagaagaaaccgatgagtcattcaacccaggtgaagaggaggaagatgtggcagaggagtttgacagcaacgcctctgccagctcctccagtaatgagggtgacagtgaccgggatgagaagaagcggaaacagctcaaaaaggccaagatggccaagaccgcaagagccgcaagaagcctgtggaggtgaagaagggcaaagaccccaatgcccccaagaggcccatgtctgcatacatgctgtggctcaatgccagccgagagaagatcaagtcagaccatcctggcatcagcatcac

SEQ ID NO: 188042 - DNA, 1211 bp, Homo Sapiens
aagggtgagccaggtctagcccaacagtctaaactatccagtcaataccgagtgaagtggcagccagcactgttcactctgtgtcttttgaagtgccttgaaggcccagatgaaattttaaagggagggggtccatgtccttccctcccccaccccgcctcattctttaatcaaaggatgtcttctcccttgtttgagaatgaagaaactcgccacctctgacctacctttgcctttttctgtcatggagaatactcacccttcagaaacagaccaaaggccaaaacctgctgatttttctattgaaaatatgtccccttgcaaagaccctaaacaaaaagttaagtttctttctttcacctatttgtacaactccaagttacagctgaatctgtcgtgactttcctgagatctacccggggcttggctgtctgttctgggcactggctccgagttcccctcctgggatttgcaggagggcagtactgaacctgcattcttctccttgtaaatgtaggccgggtgcccctgttctccgggtttggaacaatacgaggttggtgctgatgggatttacttgcgtacgtgctcttcacaaaaacaccgtggatgctgaagttagagcacgtcgccacagagcttgacatcaatgttagagggtctcttactccccgcccagctgtgatgtttcatctgctttggttgttttggtggtcttttttaaaaatagagatttcacatctgcccagaccccactcaaaacgatttggtcaggttctggttggacaagtttaaaatcaaagtagtgcccggaattccctcaaaccacccaacttcatccaggaatacagtctgcagtgcagcaacagaaccgcttaccaagaactgtgcttacatacctttgtcatctctcttccccccttggaagttgtcctcagggggatttgttcctgtcctggggatttacctgggatggtggctgcctgtgcttttgctcatggccttgacagtgctctagttgctggatctaatggcctgtcttggtttctatcacatgagaaggggttgtttttttggggtgactcggactgaattccccatactgtttccacgccgggacaccatgttctccatcaagctaaagaaatcacgtgcctgaaactgtgcttaaagttttgggggaaagatggagttccttatccagagccccc

SEQ ID NO: 188043 - DNA, 1744 bp, Homo Sapiens
actttgtacaaaaaagttggctcaaaacgatttggtcaggttctggttggacaagtttaaaatcaaagtagtgcccggaattccctcaaaccacccaacttcatccaggaatacagtctgcagtgcagcaacagaaccgcttaccaagaactgtgcttacatacctttgtcatctctcttccccccttggaagttgtcctcagggggatttgttcctgtcctggggatttacctgggatggtggctgcctgtgcttttgctcatggccttgacagtgctctagttgctggatctaatggcctgtcttggtttctataatcacatgagaaggggttgtttttttggggtgactcggactgaattccccatactgtttccacgccgggacaccatgttctccatcaagctaaagaaatcacgtgcctgaaactgtgcttaagttttgggggaaagatggagttcctatccagagcccccagatttccagaatcgagtgagcttcctggaaggagactgcgtcttctctcaattccagtcatctcagtcgttgtcgttaggtgacatgtgcactttaaatgctctcatcggttggcttcattttcaagacaatcaaatgtattgactgtgttttcttcttagaaaatggagagggttaaaaacatgcaaactgccactttcaacctttgccagtattccctctacccccgtgagagctatctggggggaagaatccttaccaaggtttttttggaaaggtacgaatcttaacttttttccccttctgtgtctcagggtaatactattcagagtcgcccctttgctcattttctcccgtatttgttaccttcctgaggcctcagtattagtcgtgagcacaaagttttgagacctttggcgttgtttcttgatgtgggaggggaggtgttagtgcatgcaagggttgaactagatagaccctgccttagtagaggatgggactataaccttagaggccagaacttgatccagaagttgctgtccacagaagtgctttctatttcatcatttttgtttctagggctctttttctgtagccaggtcttcccaaggattttagtatttgcattggagttgaggtttactctaatgatggtggcccagctgtgcccagaggacagccaggcaggccccgggagggagtttagaaagacagtcctggtgaatgggcttcaagtggtcacaaagagggtggctgtgaggtgaccccagacactgcagaacgatgtgcaccctctgcattttggatgtccttggaatgtgggagcctagaaataaccctgtggatggaattggggcagcggctgctggagatctgtgtgccttgccttccttcagcaggaccgtctaggtgcgcagccacctatggatgcgtcccagccagccccgtcgctctcgtccatcctcagagacaaagaagagggcagggagtttgggcttggttttgaactttcctttcaatgtagcaaagcattcctagttaaccagagccttggaatctactgcctgctggccaggctttaaaatgaaaagtgttttaatgctgccataaaagggaggcgggggggaggaagggaaaataaaggcatctttccaagtactcatctaatttaattgtcaaaagattgataggccatgaattactttcttcatctcactaagggttaaaggcgtgcaactctctcactggcctgtgtctcctgtcacc

SEQ ID NO: 188044 - DNA, 1195 bp, Homo Sapiens
ttggggcagggcacctccaggtgggcaggagctaccactcagcaccatgagcaccgccacaggcccagaagctgccccaaagccaagcgccaagtctatctatgagcagaggaagcgttactccacagttgttatggctgatgtatcccagtacccagtcaatcacctggtgacgttctgcctgggtgaggacgatggcgtgcataccgtggaggatgcctccaggaagttggccgtcatggatagccagggccgagtctgggcacaggagatgctgctgcgagtgtctcccgaccatgtcacgctgctcgacccggcctccaaggaggagctggagtcgtacccactgggcgccatcgtgcgctgtgacgcggtgatgccacccggcaggagccgctcgttgctgctgctcgtgtgccaggaacccgagcgcgcgcagcccgacgtgcacttcttccagggcctgcgcctcggggcggagctgatccgagaggacatccagggggctctgcacaattaccgctcgggccgcggggagcgcagggcggcggcgctcagggccacgcaggaggagttgcagcgcgaccgctcgcccgccgctgagaccccgcccctgcagcgccgcccgtcagtccgcgcagtgatcagcaccgtagagcggggcgcgggccgcggacgaccccaggcgaagcccattcccgaggcagaggaggcgcagaggcctgagccggtggggacctcgagcaacgctgactcggcctccccggacctgggtccccggggtcctgacctggcggttctgcaggcggagcgggaagtggacatcctgaaccacgtgttcgacgacgtagagagctttgtatcgaggctgcagaagtcggcggaggcggccagggtgctggagcaccgggaacgcggccgcaggagccggcgccgggcggctggggagggcttgctgacgctgcgggccaagccgccctcggaggccgagtacaccgacgtgctgcagaagatcaagtacgccttcagcctgctggcccggctgcgcggcaacatcgccgacccctcctctccggagctgttgcacttccttttcgggcctctgcagatgattgtgaacacgtcgggggggccggagttcgcgagcagtgtgcggcggccgcatctgacatcggatgccgtggcgctgctgcgg

SEQ ID NO: 188045 - DNA, 1881 bp, Homo Sapiens
ttggctccccttctacagagttcctccggcgcttcctccaccccgggatacacagaacctcatctcctacggtgctgaagcctgcagcagggcaggatgggcaggagagcagagccgcggagtctgcggcgcgggtgaagagcggcgcgtaattcccgcagcaagattgttccgcgcccgcagcccctggactagcaggatccgaaccccggcggctgcgtgcttataggcgcagacgtcagagagcccgcggcttaaagcgcgtcgcctggctagcgccaccccctagccttcttcaaggcctccagggctgggcccaagcgcccgtcgacggcaccctgggcccagaggactcgcgggcctcatctccaatgattcagaactcacgtccgtcgctgctgcaaccccaagatgtcggagacacggtggaaacgcttatgttacatccggtgatcaaggctttcctgtgtggctccatcagtgggacctgctctaccctccttttccaacctctggatctccttaaaacacgcctgcaaaccctccagccctcagatcatgggtctagacgtgttgggatgttggctgtactcttgaaggtggttcgcacggagagtcttttgggcctttggaaagggatgtccccttccattgtgagatgtgtccctggcgttggaatctactttggcactctctactctttgaagcagtatttcttgcgaggccatcccccaaccgccctggagtcagtcatgctgggggtgggctctcgctctgttgcaggggtctgtatgtcacctatcactgtaatcaagacgcgctatgagagtgggaaatatggctatgagagtatctacgctgccctgaggagcatctatcacagtgaggggcaccggggcctcttcagtggcctgacagcaactctccttcgagatgcgcccttctcaggaatctacctgatgttttacaaccagaccaaaaatatagtgcctcatgaccaggtggatgcaacccttattcctattacaaatttcagctgtgggatatttgctggtattctggcctcactggtaactcaacctgcggatgttatcaaaactcatatgcagctttatccactgaagtttcaatggattggccaagcagtgacacttattttcaaagactatggactacgtggcttcttccaaggtggcatcccccgagccctccgcagaactctaatggcagcaatggcgtggacggtgtatgaagagatgatggccaagatgggcctgaagtcctgaccaagagaggactgggaacgggtgaaatctgttgccctgcttggtttctgccaagggctgctgcttcttactattctgcagtaagatgaagtcctacctggaaaaccaggcagaaattgtgttgcctttgccttcagtaatccccttaaggagaaaatatatggacctgatttcagccttcagaatctccaaaagaggagtcatcaattcatagagcacactagggtgttaggagagagctttgcatactctgagaggctacttggaaaggcattttcccaggagagctctgtcaggtggctgcgcttcagccccacccctacaccacagggtctccttgggtatgttcttgggcaagcaatcacaaagctagagaagctgtaagctgcctgccgggcctgaaggagctcccaaccagggaagactggatgtgaggagaggagtcactgtcaccaggtcacagactgactgaggtgatggtaggatgaggaggaacagatgcccttctttattggttctcagttaacttctcagaggctctggagaacgggacagtggctttctagcctctgaatgttccagtaaaattttttgg

SEQ ID NO: 188046 - DNA, 974 bp, Homo Sapiens
gaggacttcagcatctggttttctacaggatggctggaggggatcttcaggtgtgggggctatcccctccccacaaggctggctcactgggacatccccgagcccacatcctctgctgtcacttcggtagacagatcatgtttgggaagaggcaggtcagcttcaggctggctcacctccaccttggccttggaggatctgagatcaggtttggcaaagcccaaactgggaatgtggacctgtggccggtggaggttcacaccctcacttcctgtggcacttgctgttgcaccaagtcctcccctaccaccgtcactgctggccttttctgtgtcttgaaagctaccccctgctgtggcactagaaagggaaggatccacgtctctctgtggcaggctgaccccactcttagaagccttcattttgggaagtgcaagttttggcatggcaaagccaggctttgtgctcctccccttctctccatccctctcaggaggcagatccatgtggatggcagactgcggggccacttcatccttgtctaaaaccaggctgagttttgagtcctccacgctgcattctgggtccacctttggccctgtttccttcttcggggaccacctaaatgatggaagcttaatcttaggcattttcaagggactccctttcccttcgtggtcagcatcttcagaaggggcttctccaggggccactactgatgtctgcaaggaggccacaagctcttctgggccctgagacacacaggtgcctggggatggcagctgggtgcttggcaaggggcactgcactctttctccagggctaagaggagacatgactggggcacccactgctgcatgtaggtctccctcaggaactgccatttgggggactgaaaacacaaactttggtttatagaatttaggaaaagatacctgaccaagagaaacaggaatcatggaattcagtgccaa

SEQ ID NO: 188047 - DNA, 2100 bp, Homo Sapiens
  misc_feature (465)..(503): n is a, c, g, or t
  misc_feature (523)..(544): n is a, c, g, or t
ttgggtgacaccgagccggacccagcgcgacctgcggcggctccgggtgactcgggccagtgtagaggtcctcaggccgccggcaggagcagctgggccaattccctggccgggagcggaaggggatggcgtcgggcctgggctccccgtccccctgctcggcgggcagtgaggaggaggatatggatgcacttttgaacaacagcctgcccccaccccacccagaaaatgaagaggacccagaagaggatttgtcagaaacagagactccaaagctcaagaagaagaaaaagcctaagaaacctcgggaccctaaaatccctaagagcaagcgccaaaaaaaggagcgtatgctcttatgccggcagctgggggacagctctggggaggggccagagtttgtggaggaggaggaagaggtggctctgcgctcagacagtgagggcagcgactatactcctggcnnnnnnnnnnnnnnnnnnnnnnnnnnnnnnnnnnnnnnnaagagcaaatccaagcggannnnnnnnnnnnnnnnnnnnnntgatgatgatgattcaaaggagcctaaatcatctgctcagctcctggaagactggggcatggaagacattgaccacgtgttctcagaggaggattatcgaaccctcaccaactacaaggccttcagccagtttgtcagacccctcattgctgccaaaaatcccaagattgctgtctccaagatgatgatggttttgggtgcaaaatggcgggagttcagtaccaataaccccttcaaaggcagttctggggcatcagtggcagctgcggcagcagcagcggtagctgtggtggagagcatggtgacagccactgaggttgcaccaccacctccccctgtggaggtgcctatccgcaaggccaagaccaaggagggcaaaggtcccaatgctcggaggaagcccaagggcagccctcgtgtacctgatgccaagaagcctaaacccaagaaagtagctcccctgaaaatcaagctgggaggttttggttccaagcgtaagagatcctcgagtgaggatgatgacttagatgtggaatctgacttcgatgatgccagtatcaatagctattctgtttctgatggttccaccagccgtagtagccgcagccgcaagaaactccgaaccactaaaaagaaaaagaaagaccaccaggactattgcgaggtgtgccagcaaggcggtgagatcatcctgtgtgatacctgtccccgtgcttaccacatggtctgcctggatcccgacatggagaaggctcccgagggcaagtggagctgcccacactgcgagaaggaaggcatccagtgggaagctaaagaggacaattcggagggtgaggagatcctggaagaggttgggggagacctcgaagaggaggatgaccaccatatggaattctgtcgggtctgcaaggatggtggggaactgctctgctgtgatacctgtccttcttcctaccacatccactgcctgaatcccccacttccagagatccccaacggtgaatggctctgtccccgttgtacgtgtccagctctgaagggcaaagtgcagaagatcctaatctggaagtggggtcagccaccatctcccacaccagtgcctcggcctccagatgctgatcccaacacgccctccccaaagcccttggaggggcggccagagcggcagttctttgtgaaatggcaaggcatgtcttactggcactgctcctgggtttctgaactgcagctggagctgcactgtcaggtgatgttccgaaactatcagcggaagaatgatatggatgagccaccttctggggactttggtggtgatgaagagaaaagccgaaagcgaaagaacaaggaccctaaatttgcagagatggaggaacgcttctatcgctatgggataaaacccgagtggatgatgatccaccgaatcctcaaccacagtgtggacaagaagggccacgtccactacttgatcaagtggcgggacttaccttacgatcaagcttcttgggagagtgaggatgtggagatccaggattacgacctgttcaagcagagctatt

SEQ ID NO: 188048 - DNA, 880 bp, Homo Sapiens
ttgggttatatgctcctttctggagtcctgtagagaaagtgctctctgccgcattgatagcagcgagagctggaggtgttgggtcgggagaccagccgttcgatcccgccgcaggtaggagctggtttccatcctggcaccacggcacacacctccagcctcgagcccggcgctgctgcccgggggtctccttcaggctctttgacgccgttccagggggcacctatccaggcatcctctgggcctctagccagaggactggctcccggcttcagcactccgggctgcagtaagaagtgcccttatcgctctgagccctgccaccatcccgtgaaccaccgaaaccctggtccagcgcgacagccttggacctgggactggacggatccaaaacgctcagcctcggccccccacagacggggctctgcatcgtctctgatatgtcacccaccatctcccacaaggacagcagccggcaacggcggccagggaatttcagtcactctctggatatgaagagcggtcccctgccgccaggcggttgggatgacagtcatttggactcagcgggccgggaaggggacagagaagctcttctgggggataccggcactggcgacttcttaaaagccccacagagcttccgggccgaactaagcagcattttgctactactctttctttacgtgcttcatggtattcccctgggcttggcgggaagcatcccactcattttgcaaagcaaaaatgttagctatacagaccaagctttcttcagttttgtcttttggcccttcagtctcaaattactctgggccccgttggttgatgcggtctacgttaagaacttcggtcgtcgcaaatcttggcttgtcccgac

SEQ ID NO: 188049 - DNA, 458 bp, Homo Sapiens
tatgtagcatgtgactagctgatgaatctttgattatggctgaatgttctcattcattgcaggaaaaaaatatcctccaaatcactaggtagtatgtaagtgaccaaaacttttttccattttatgttggagccaaatcattagtgttaggataaattacttctttatgtatgtgctctaaaatgaaaagttatttctgaatattaaagcatatgtattaagagtataaaaacaagatacagattttggtgtgaaatatatcttatgattcaagtcataatttaaatagaattgaagatgatgtgaaatcactgggctggaagtagcttataccttgattagtaagaggaagcccgggatcatcctgtgatggtaaacacttttatatgttttacttataactttgccaggaaatttcaacaaacttcatattaaaggacatgatttctgtatactta

SEQ ID NO: 188050 - DNA, 1364 bp, Homo Sapiens
  misc_feature (47)..(69): n is a, c, g, or t
tacccactcttggaacccacaatgcactgctgggcaaacaggaaaannnnnnnnnnnnnnnnnnnnnnntaaatgccacaccagccctgaatggcgtggccagctagtcacagttgttgggtcagtagtacagtgctcaagaacaattcagactaacatgccaaggagcctgaggaaaagtctggtagtcatggctctcccagccagcattcccagtgggggaaactagaagacaccagcctggagaggctgaatattcaggagtccctgagatggggaatggaacagaggaaagtgtcttttgactcatcttaagtactcccctccccaaatagaaacctcaaagactgatccatttcccctagggcctgggccaggagtagctcactgctcactgctgaggagaaaggcacaagatataatgtcataagagcaggacagtggctcagcctacagagttccctataggggaaagaaggcaggaaataggcgcagggtctggtcctgtccctgcaccaccctgagcagctagtcttgggaagggattacaggccctgggccataggctgctcgccattctgctttcctatcctgtttctctccctgtgctgctcccttttagccagggctgagaaatgttcagcacctgaggcaaaactgccatagtacctctgaaagctgaatcaagggggaagaggcagaagaacacactaatagagaaaattttccttgctacgggtgctctttcacacccacctagggtaagtcaaggcaacttgtgaaggtgctttgagctgttccttcaagcaaacacattttcattacataatggcttaacgcaagggtgcagggaaggaccaccaccaactttggtgacatatttgaatctgggtgttcatcctactctgatattcaaaaaagcatagaaaaaggtctgatttctgctcatcaccagcccaggatagggttcaggtgtgctctgaccactgccaattcaggaaggcggcaccatggccaaaagctcccagattatttggaaaccatgttttcttcctagtccatggtaacaagaaaaagccaatggaagcatcattccaaacaataatctccaaagatggtggcaaccaagtgtcaaatggggactgcaggcacagaagagaccaccccaaaccctgcctgggtggacgaagcaggtatgctagaatagtcctgtcctgcagaatagggaacggcagcttggtcgatctgtgccctggaaaaagaaaatgagttgcaatagaagtgactctaagacagacaatgaacctactcttaagagagacagggccaggcacagtggctcacgcctgtaatcccagcacttt

SEQ ID NO: 188051 - DNA, 1282 bp, Homo Sapiens
ttggttcaagagtaacaaaaaaatgcaaactgtaatgaaactacattgtatttctaagtgtgaaaacgacaggctgccccgtttttactaattgcatttgcattttaaggtactactgaaggtcagatcaaagttgaaatgcaaaaatactaattagagaataatgtgaataaaatgggaatcttcttggtattttatgtgtattgtaagtagcagttaaattatttttttaaaagcaatttcagttttaatcactgaacaaaagaaacaggcaacattcacttctgtagtatggtttccacctatctctaacaccactattaaggtacaccagtgttaaggtacattaataactacacaaaattttatttaaagagaacacttagcagcctatgatagttttcaataaaatgttgcctctctttcggattctcactaacttttgttactattctaaaagtttgaatttgctggggtgtttattctgaggattatttaaccattgttctatttggcataaccctatttaatggtgcttagagctgaattacctacagaaactgtttctggtttaaataattagcacaaattggcctaagtattcatgagcccatgtttctgtgaagtaattattaaaccaacttaatgattcttatgtaaggtacactttttattttaatacattggtagtctctatgacttgtagcaatgttttacaaatgtttaaaatgctaaacttaattttccaagcttttcttgacaattagatacctatcctgtagttactgaaaatctgggtagtaaatctacccaattaaaatggcactttataaaagggaatagagaagagatgggactatttctatatttaaatgctgctggctattcctttgtatataaatgaaaaataccattcattaaaattaagtactcgtttaagtatggttcttaattacatttcattcatttatattagagtaaatggcttcataattactttaaaatttaacccacaagcatattaaatctgtttgttataagattggaaacaatttttgagagggactaatttaaacaagtcctcctttagtcttttgggtcgcgtagttgctgaaacctaagtacctgcagcctacaggataaggaagttcacagcctgcggggtgaatgaacccatgtgtgaactgcacagagcaattcatagaaaatgcatagaaatttgtaacactttggtcacatctgtctctagatggtcattgaatttgtttaaagatggatgaaa

SEQ ID NO: 188052 - DNA, 1677 bp, Homo Sapiens
atgagccaccatgcccagccaacctctttcttccttgactgcatgggtgatgtaggagtcctgggattcctgggaaacaggtatatcacactattatcccagtgttcgtcagcactggaaccattctagcagaagtagcaccccaggaatgactgacaccgtcccaacagcatggactaagcctgttcctgttgaaggagcagaaagctggtggtgtaggagggactggggatggccagagaggaagaaagggcaggagagaaggtatgtcgcaagtggggagtgaggaaaccgggttcataaggacagaaagggcgaagtgggactttctaaaaatcatcatttcaagtctcaggacttctttgactatggattcgttttatttctgagttcaacataatagtacttccaaatttgtttaagccaacaggaaagaagaaaaagaagtaatgtgtttgtcttttttatctaaccagagcacgattgaagacataaaagtgaaacacacagcaaaggcagaaaacatgatccaacttcagttcagaatggagcagatggttttttgtcaagatcagatttacagtgttgttctgaagaaagtccgagaagagatttttaactctctgggggacgccttcacagaatatgaagttgaactctcattttcccagtaatgagtcttcggtttcctcctttactgaaataggcatccacctgaatgcctacttcttggaaaccagcaaacgtctcgccaaccagatcccatttataattcagtattttatgctccgagagaatggtgactccttgcagaaagccatgatgcagatactacaggaaaaaaatcgctattcctggctgcttcaagagcagagtgagaccgctaccaagagaagaatccttaaggagagaatttaccggctcactcaggcgcgacacgcactctgtcaattctccagcaaagagatccactgaagggcggcgatgcctgtggttgttttcttgtgcgtactcattcattctaaggggagtcggtgcaggatgccgcttctgctttggggccaaactcttctgtcactatcagtgtccatctctactgtactccctcagcatcagagcatgcatcaggggtccacacaggctcagctctctccaccacccagctcttccctgaccttcacgaagggatggctctccagtccttgggtcccgtagcacacagttacagtgtcctaagatactgctatcattcttcgctaatttgtatttgtattcccttccccctacaagattatgagaccccagagggggaaggtctgggtcaaattcttcttttgtatgtccagtctcctgcacagcacctgcagcattgtaactgcttaataaatgacatctcactgaacgaatgagtgctgtgtaagtgatggagatacctgaggctattgctcaagcccaggccttggacatttagtgactgttagccggtccctttcagatccagtggccatgccccctgcttcccatggttcactgtcattgtgtttcccagcctctccactcccccgccagaaaggagcctgagtgattctcttttcttcttgtttccctgattatgatgagcttccattgttctgttaagtcttgaagaggaatttactaaagcaaagaaactttttc

SEQ ID NO: 188053 - DNA, 1581 bp, Homo Sapiens
ttggctctgttacagaagttctgatttttcctagcgagctggaggaaagtgatttgccttcaaggaaactggggagccagaaaattgggaactcatatcaacatggcaaacctattgaaaacagtggtgactggctgctcgtgtcctttacttagcaatttggggtcctgtaagggtctacgtgtgaagaaggattttttacgaacattttatactcaccaagaactgtggtgtaaagcgcctgtaaaaccaggaattccatataagcaactgactgttggagtccccaaagagatattccaaaatgagaagcgagtggcattgtctcctgctggtgttcagaacttggtcaagcagggttttaatgttgtcgtggaatcgggtgcgggcgaagcttccaagttctcagatgatcactatagagtggcaggtgcccaaatccaaggggcaaaggaagtgctggcttctgatttggtggtcaaagtgcgagcccctatggttaatccaacattaggtgttcatgaagctgaccttttaaagacatcaggaacgctgattagttttatttacccagcccaaaatccagagttgctaaataaactttcccaaagaaaaactacagttctggcaatggaccaggttccaagagtcacaattgctcagggatatgatgcgctaagctccatggccaacattgcgggttataaggctgttgtcctagcagcaaatcattttggacgtttttttactggtcagatcacagctgctggaaaagttcctccagctaagattctgatagttggtggtggtgttgctgggcttgcttctgcaggcgcagcaaagtcgatgggtgcaattgttcgaggatttgacacaagagctgcagctttggaacagttcaagtctcttggtgctgagcccttggaggtggacttgaaggaatctggtgagggacaaggaggatatgcaaaagagatgtccaaagagttcattgaagctgaaatgaaactctttgctcaacaatgcaaggaggtagacatccttatcagcacagcacttattccaggtaaaaaagctccagttttatttaataaagaaatgattgagtcaatgaaggaaggttcagttgttgtggatttagctgctgaggctggtggaaactttgaaaccactaagccaggagaactctacattcataagggaattactcacataggctacacagacctgcccagccgaatggccactcaggccagcaccctatattccaacaacatcaccaaactcctgaaggccatcagcccggacaaagataatttttattttgatgtgaaagatgactttgactttggtacgatgggtcatgtcattagaggaactgtagtgatgaaagatggtaaagtgattttcccagctcccacaccgaaaaatattcctcaaggtgccccagtaaaacagaagacagtggctgagctggaagctgaaaaagcagctaccattacacccttcagagacaatgtcaacggcttctgcatatacagcagtctcacagggatactgggtttgggcattgcggctccc

SEQ ID NO: 188054 - DNA, 1451 bp, Homo Sapiens
ttggcttcattattggagttacagttttagtggtcgcagtgccagaaggtcttccacttgcagtcacgatctcactggcttattcagtcaaaaaaatgatgaaagataataacttagtaaggcatctggatgcttgtgaaaccatgggaaatgctacagctatttgttcagataaaacaggaactttgacaatgaacagaatgacagtcgttcaagcttacataaatgaaaaacattataaaaaggttcctgaaccagaagctattccaccaaatattttgtcctatcttgtaacaggaatttctgtgaattgtgcttatacatcaaaaatattgccaccagagaaagagggtggattacctcgtcacgttggtaataaaactgaatgtgccttgttgggacttcttttggatttaaaacgggattatcaggatgttagaaatgaaataccagaagaagcactgtacaaagtctacaccttcaattctgttaggaagtccatgagtactgtcctgaaaaattcagatggaagttatcgaatattcagcaagggtgcatctgagataattctgaaaaagtgtttcaaaatcttgagtgctaatggtgaggcaaaagtattcagaccaagggaccgtgatgatattgtaaaaactgtgattgaaccgatggcatcagaaggcttgagaaccatatgtcttgcattcagagattttccagcaggagaaccagaaccagagtgggataatgaaaatgatattgtcaccggccttacatgcattgctgttgtggggattgaagatcctgtgagacctgaggtgccagatgcaattaaaaagtgtcagagggctggaattactgtgcggatggtcactggtgataatattaatactgctcgggccattgctaccaaatgtggtattttacatcctggggaagattttctgtgcctagaaggtaaagattttaacagaagaatacgaaatgaaaaaggagagattgagcaagagaggatagacaagatttggccaaaacttcgagtacttgcaagatcatctcctactgataagcatacactggttaaaggtataattgacagcactgtctcagaccaacgccaggttgtagctgtaactggtgatggtacaaatgatggcccagcactaaagaaagcagatgttggatttgcaatgggtattgctggaactgatgtagctaaagaagcatccgatattattctcacagatgacaactttacaagcattgttaaagcagttatgtggggacgaaatgtctatgacagcatctcaaaattccttcagttccaacttactgttaatgtagtagcagtgattgttgcttttacggggcgcctgcattactcaagactcaccgcttaaagctgtgcagatgctgtgggtaaacctcataatgggatacactcgcttccctgg

SEQ ID NO: 188055 - DNA, 1578 bp, Homo Sapiens
  misc_feature (1372)..(1381): n is a, c, g, or t
actttgtacaaaaaagttgggtcttctatccaccctacttggtaacaaagttctcagatgttaggtcatgtttcatttgctcagtcggggatcactcaaaactactagacaaaaaagtgagaggatagatttagaaaacatcagtgatgctcagataaacttttaggacctcatattaagagctaagcaaatggccacatttcctatattttgacagagatactgctggaaaaattaaaattaaaatgccataatagctacctaacaaatatatatgtttaatgtttatcataggccagacattgtgctatgtgcatatcatatgtattatttcatttaattctcacaacaattctgtgaaatggttacagctattatagtcatttcacagatgatgaaactaagattcagagcagctgatcttgtgaggcagctggaattggaactcagatttgttgaactctagaactaaagatcataatgttgtcttgtaatatatttatttacaaaacacttcattatttataaagaatttactaacagtttatcttatttatacccatacatctgctactttgggaggccctttacatagaaaacagcattctttttgccaaatatgaccaaattacttttatttataatttttgatttatatttcagctagatctaaaaagcatctgaaggaatttacaatgaaagatacctatgcaataacatttaggataatctttgacattttggaaaaataagaattgaggaaaaaaagtgtatctttcaagtagatgcaaagcattataatgactgacacttgtatctaactccagtcttacagataactaaggcaaaaagctaaataaacaatatgtaacctctaacatttggtaaaaggaagtatactggtctgttagcagagacaaactttttttagaattgaagtctgaaacaaacaaaagcaattcaatgtcaatagacattaagcaacataatagacaaacatctcctaagggaacatttgttacagctgctccttccctgaactgtgctttggaagataagctctgtcctgagtccaaaccaagcccttccaagagagaacaaaggtcagagatgttgaagattccagcaaatttctcctcttatttctaccaagcctttgtgaacattgctcttcattttggcctgtacttctccctcagggacgtagaacaatggaatgtcagtcagtctctgtagttaaaactttttctttaaaattcaattaagttacttctccctcagggacgtagaacaatggaatgtcagtcagtctctgtagttaaaactttttctttaaattcaattaagttacaccagaatttacaggcaagannnnnnnnnncattgctcccataagcaaatttgttttaaaataattgtaaatgaggtatatacttagttcttggttaaaaaatatattgctttgttaagtattaaagattatttgtaagtcattgtattaataatactaataaaatttatcaagcctttatagcaagggttcagtgaattaccactgcctgtgggccaaatctagct

SEQ ID NO: 188056 - DNA, 1739 bp, Homo Sapiens
  misc_feature (1101)..(1111): n is a, c, g, or t
gatacactttttttctcaattcttatttttccaaaatgtcaaagattatcctaaatgttatgcataggtatctttcattgtaaattcctttcagatgctttttagatctagctgaaatataaatcaaaaattataaataaaagtaatttggtcatatttagcaaaaagaatgctgttttctatgtaaagggcctcccaaagtagcagatgtatgggtataaataagataaactgttagtaaattctttataaataatgaagtgttttgtaaataaatatattacaagacaacattatgatctttagttctagagttcaacaaatctgagttccaattccagctgcctcacaagatcagctgctctgaatcttagtttcatcatctgtgaaatgactataatagctgtaaccatttcacagaattgttgtgagaattaaatgaaataatacatatgatatgcacatagcacaatgtctggcctatgataaacattaaacatatatatttgttaggtagctattatggcattttaattttaatttttccagcagtatctctgtcaaaatataggaaatgtggccatttgcttagctcttaatatgaggtcctaaaagtttatctgagcatcactgatgttttctaaatctatcctctcacttttttgtctagtagttttgagtgatccccgactgagcaaatgaaacatgacctaacatctgagaactttgttaccaagtagggtggatagaagaccatcagaaacattgttcaggagttttaaatatttacccacaatttaaattgtccaataatttaaaccatgggctgcttttcatgctgtgtaattctactatttttccatacaactcccctatatcagggttggcagcactacttacctgagccagtcttattttattttacattttggtaactttggtgaactgagggaagcgtggaaaggcaaaatttcatgacaaaattttggttttgtacatatgcctaattctgctaattctttacaatttcccccttacctgtactacctaactctaaaatctataattagaacatgaatgtaatgttttttcttctagccnnnnnnnnnnnctttaggaggtagtgactgacaagataataaagcccaaagcattatgctgactaggaccattgaagttggcaaaaaaaggccacaacaacagcaagaaggcccaggattttcaacagaaaagaaactgagaaattagatgaatccttcagggcccgagtcttgagtggcttcagtattctttgtttctgggtgaagatggcatttctggctccttcccattgcccaggcccaaccaggcgatactaataggagttgcagggtccgaaatagagtctcacagccagtttaggatctttgaacaagagagagcagaaatctggcttcgcacctatctctaaggcgagctcgtccaagtagtcaacataattggtctgcaacgtctggctctggctttctccaaacaggtcaattcttttttcattccttttgataatgtccatcatcatagttctctctgagggcaggctacacaagcctttgaaaactcttgtcacccaacgagcttgaagttcagcagttgggaaaatggaacctaggggctggatgagaccaatgcacgcgagggttgacttgtccaggtgagcggggaatatgtatttatacagtgagaccatattattctcccaa

SEQ ID NO: 188057 - DNA, 969 bp, Homo Sapiens
  misc_feature (730)..(770): n is a, c, g, or t
ccaactttgtacaaaaaagttggtttcttgcggtgtccggctcccgtctccctggctcccccgcccgccctgcggccccagcgcccctcgctctcctccagcccgcgaggagtgcgggcgccgcgccgcctttaaagcgaggccagggagcgaggcggtgaccggccgagatccggccctcgcctcctccctcggtggcgctagggctcccggcctctcttcctcagtgcgggcggagaagcgaaagcggatcgtcctcggctgccgccgccttctccgggactcgcgcgcccctccccgcgcgcccacccacccagtccggctggactgcggcagccgcgcggctcaccccggcaggatgttcgcagccgggctggctcccttctacgcctccaacttcagcctctggtcggccgcttactgctcctcggccggcccaggcggctgctccttccccttggaccccgccgccgtcaaaaagccctccttctgcatcgcagacattctgcacgccggcgtgggggatctgggggcggccccggagggcctggcaggggcctcggccgccgccctcaccgcgcacttgggctcggttcacccgcacgcctctttccaagcggcggccagatccccgcttcgacccaccccagtggtggcgccctccgaagtcccggctggcttcccgcagcggctgtctccgctcccagccgcctaccaccaccatcacccnnnnnnnnnnnnnnnnnnnnnnnnnnnnnnnnnnnnnnnnnctccgccctccgccccgggctggcgccctgcagcccccggcctcggggacgcgagtggttccgaaccccaacacagtggctctgccccggccccttcagcaaagacctcaatttggaattgaccgcattttatctgcagaattgaccccaaagttcaagaaggggacacgctgagagatctcacttccctgcaaaccgg

SEQ ID NO: 188058 - DNA, 1013 bp, Homo Sapiens
ttggaaaaagagaagatgtgcaataagattaataaagtaaattctgaaggcgaatttgataaagatagagactctatatctgaaacagtcgacttaaacaaccaggaaactgtcaaagtgcaaatacacagcagagcttcagaatatatcactgatgtccattcgaatgacctgtctacaccacagatccttccatcaaatgaaggtgttaatccacgtttatcggcaagccctcctaaatcaggcaatttgtggccaggattggcaccaccacacaaaaaagctcagtctgcatctccaaagagaaaaaaacagcacaagaaatacagaagtgttatttcagacatatttgatggaacaatcattagttcagtgcagtgtctgacttgtgacagggtgtctgtaaccctcgagacctttcaagatctgtccttgccaattcctggcaaggaagaccttgctaagctgcattcatcaagtcatccaacttctatagtcaaagcaggatcatgtggcgaagcatatgctccacaagggtggatagcttttttcatggaatatgtgaagaggtttgttgtctcatgtgtccctagctggttttggggtccagtagtaaccttgcaagattgtcttgctgccttctttgccagagatgaactaaaaggtgacaatatgtacagttgtgaaaaatgcaaaaagttgagaaatggagtgaagttttgtaaagtacaaaactttcctgagattttgtgcatccaccttaaaagattcagacatgaactaatgttttccaccaaaatcagtacccatgtttcatttccgctagaaggcttggatcttcagccatttcttgctaagatagtccagctcaaattgtgacatatgatcttctgtcagtcatttgccatcatggaaactgcaagtagtggacactatatagcctactgccgaaacaatctaaataatctctggtatgaatttgatgatcagagtgtcactgaagtttcagaatc

SEQ ID NO: 188059 - DNA, 1484 bp, Homo Sapiens
ttcttcagaaatctggccagaatctgctccttgctaagcatcacattaccacatttagtgactgcaatcttagtatgtcaataggacctggaggatctccatctttacccttcacaaaactttccccattctctaaaccactgcatactgatgcaataaaaagtagctggagagtcctctttttggaacgctctgttaagccgaataaaaatttccaattcagtttttcttcttttttcaattttctccgcctcaatttggcaagtatgacaaatgtacagatggttgacagctggtcctccaccatacctgctatataggttatcccaaatgttctgaggcagcatcaaaaccaggtcttcaatataaccagcttttcttggaggaacacctccatgaatacaaagaaagtcattatttgaaatagggccaggttcggcaaaggtcttaaatttattaagccactgtcgagaaatataaaactgaaggaggcttggttccattatgttcaataaatttgatatccttctcctctctttttgtgcctcttcgctgctcttcctatagaaaagaacgtaagcttctgcattttgtacagtagattctgaaacttcagtgacactctgatcatcaaattcataccagagattatttagattgtttcggcagtaggctatatagtgtccactacttgcagttccatgatggcaaatgactgacagaagatcatatgtcacaatttgagctggactatccttagcaagaaatggctgaagatccaagccttctagcggaaatgaaacatgggtactgattttggtggaaaacattagttcatgtctgaatcttttaaggtggatgcacaaaatctcaggaaagttttgtactttacaaaacttcactccatttctcaactttttgcatttttcacaactgtacatattgtcaccttttagttcatctctggcaaagaaggcagcaagacaatcttgcaaggttactactggaccccaaaaccagctcttcacatattccatgaaaaaagctatccacccttgtggagcatatgcttcgccacatgatcctgctttgactatagaagttggatgacttgatgaatgcagcttagcaaggtcttccttgccaggaattggcaaggacagatcttgaaaggtctcgagggttacagacaccctgtcacaagtcagacactgcactgaactaatgattgttccatcaaatatgtctgaaataacacttctgtatttcttgtgctgtttttttctctttggagatgcagactgagcttttttgtgtggtggtgccaatcctggccacaaattgcctgatttaggagggcttgccgataaacgtggattaacaccttcatttgatggaaggatctgtggtgtagacaggtcattcgaatggacatcagtgatatattctgaagctctgctgtgtatttgcactttgacagccaa

SEQ ID NO: 188060 - DNA, 1406 bp, Homo Sapiens
ttggatctgcagtgctgcctgcccgctgggtggtactgctacctagtgggtcttggggaccttcgaaatcgccgccgctctcacaatggcttgggtccagactgcgccacagcctctcgggagacgtgggccctcggaacctttttagtgccggactccgggccgcaggcagtcccgcggcagcaggatcacagaacctctggatggactcttcctgggaagctttgctactttgcagcagctggaccatgttcctcattaacatctgtctgtccgcttagtcatcacatcatttcactgtggtggcagggactcagctcggaattctgtatagaaaaagcacctggatcccagtctttcaatggcttcaagacaaccagaagtgcctgctcttgaggctagtgcgcctctaggcaagatgtccctgcccatcgggatataccgccgggcagtcagctatgatgataccctcgaggaccctgcgcccatgactcctcctccatcggacatgggcagcgtcccttggaagccagtgattccagagcgcaagtatcagcacctcgccaaggtggaggaaggagaggccagtctaccctcccctgccatgaccctgtcatcagccattgacagtgtggacaaggtcccagtggtgaaggctaaagctacccatgtcatcatgaattctctgatcacaaaacagacccaggaaagcattcagcattttgagcgacaggcagggctgagagatgctggctacacaccccacaagggcctcaccaccgaggagaccaagtaccttcgagtggccgaagcactccacaaactaaagttacagagtggagaggtaacaaaagaagagaggcagcctgcatcagcccagtccaccccaagcaccactccgcactcttcacctaagcagaggcccaggggctggttcacttctggttcttccacagccttacctggcccaaatcctagcaccatggactctggaagtggggataaggacagaaacttgtcagataagtggagcctctttggaccgagatcccttcagaagtacgattctggaagttttgccacccaggcctaccgaggagcccagaagccctctccattggaactgatacgtgcccaggcctaccgaatggctgaagatccagcagccttgaagccccccaagatggacatcccagtgatggaaggaaagaaacagccacctttttatttctcttcactgtgtacaagttcacttgttgtcttgaacactgtctcaaatacctgctttttgttttggatagtaccttgtctgtataagaagctggcctttccatagagaggccctggagtctaaaattatgagaacaattaatttatttgtgtcttctattatgatctcgttttga

SEQ ID NO: 188061 - DNA, 1848 bp, Homo Sapiens
ctttgtacaaaaaagttggcacagagacagagagccgggcacaagtaattccctcctggtcccagacagtctaagaggcacagataaacgcagaaatggacctgaattttccaatgacatcaagaaaaggaaggtggatgataaggactccagccactatgacagtgatggtgacaaaagcgatgacaacttagttgtggatgtgtctaatgaggacccttcttctccgcgagcaagccctgcccactcgccccgggaaaatggaatcgacaaaaatcgcctgctaaagaaggatgcttctagcagtccagcttccacggcctcctcggcaagttccacttctttgaaatccaaagaaatgagcttgcatgaaaaagccagcacgcctgttctgaaatccagcacaccaacgcctcggagcgacatgccaacgccgggcaccagcgccactccaggcctccgtccaggtctcggcaagcctccagccatagaccccctcgttaaccaagcggcagctggcttgaggacacccctggcagtgcccggcccatatcctgctccttttgggatggtcccccacgctggcatgaacggcgagctgaccagcccaggcgctgcctacgccagtttacacaacatgtcgccccagatgagcgccgcagccgccgcggccgccgtggtggcctacgggcgctcccccatggtggggtttgatcctccccctcacatgagagtacctaccattcctccaaacctggcaggaatccctggggggaaacctgcatactccttccacgttactgcagacggtcagatgcagcctgtcccttttccccccgacgccctcatcggacccggaatcccccggcatgctcgccagatcaacaccctcaaccacggggaggtggtgtgcgctgtgaccatcagcaaccccacgagacacgtgtacacaggcgggaagggctgcgtcaaggtctgggacatcagccaccctggcaataagagccctgtctcccagctcgactgtctgaacagagacaattatatccgttcctgtaaattgctacccgatggctgcactctcatagtgggaggggaagccagtactttgtccatttgggacctggcggctccactccgcgcatcaaggcggagctgacgtcctcggcccccgcctgctacgccctggccatcagccccgattccaaggtctgcttctcatgctgcagcgacggcaacatcgctgtgtgggatctgcacaaccagacactagtgaggcaattccagggccacacagacggagccagctgtattgacatttctaatgatggcaccaagctctggacgggtggtttggacaacacagtcaggtcctgggacctgcgcgaggggcggcagctgcagcagcacgacttcacctcccagatcttctccctggggtactgccccaccggggagtggctggcagtgggcatggagagcagcaatgtggaggtgctgcacgtgaacaagcctgacaagtaccagctgcacctgcatgagagctgcgtgctgtccctgaaatttgcttactgtggtaaatggtttgtgagtactggaaaagataacctcctcaatgcttggcggaccccctatggagccagcatattccagtccaaagagtcctcgtcagtgcttagctgtgacatctctgtggatgataagtacatagtcactggctcgggggacaagaaggctacagtctatgaagtcatctactgaaaacattatgtggtttaacgtttatagttgaattgggccaaaatgtttcgaatttatagaaatagaaaagttgtaactttaaaagag

SEQ ID NO: 188062 - DNA, 1210 bp, Homo Sapiens
  misc_feature (291)..(314): n is a, c, g, or t
cctttttttaatggagaaaaatgaaaaagtcccacttaggcttgcatattatatctatccaaattcactcagcccagaacacatttgatactagaaaaataaaaagagagcaaaatcatgtaatagatcacagaacagcccccaagatgataaatattagtgttatttatgcacatatgaattctagcaaagccagtaacagaaattaacaaccaattccaattccaatatcaatgtataagcatgcaataaataagctactttctaattattttagttggcattttaagnnnnnnnnnnnnnnnnnnnnnnnngacgctaaaccaagttttcaattacaacattaaaggaacagttacataaccttttgtttaacttctctctggttctgtttctgagaataaatacatttctgaaaaatgttgacctgacatcaaatttaacagaagtattaataaattgggaccatatgttagactcaagtagaaaacaggttttgttttcctcagagattaatgaacgttccccctcccccgccctgccaaagcccactaaattaaggtatatcactaaagtagaacataataaatggtatatatacatgttaacacatttatagcttaaagatagctataattaatttgcttaactctgactaatatttttaagaaagaaaaagcggaatgatcagtctcattatcaaatattcagcacagccctgatgagataatggtggacataaacatcttttgtaagaatatcaaacaggaaaatttctcactggcagaattttagctgttacgtatctttagatatgtcattaaaaatctgtgctacctgggttacccgaattaccagcctgattcaaatatgttgctagctaaaaaactaataagcaagcacatattggctctgaattctaaatgtgcctattttatttttgttcacgaaggaaatatccaaaataactgcaaaggatggttagtgaatctttaagatttgtaacttgaaatatctgtttattacaggggaaacactagaaattcccgatacagtaatgggccttactttattagcagcaggaacaagcataccagacacaattgcaagtgtgttggttgcaagaaaaggtaagaactaggtccctcaagctgcaatggtcattctacaaggctagaatgagtaaaagtagctttaaaaatgtttactt

SEQ ID NO: 188063 - DNA, 2098 bp, Homo Sapiens
ttggctccatcccggggatcacgttttgcctgggggagctgatcgcaagactaggcaacctccagccagtccctgggtcgggcggatcctcccagaggtggcacaatggagcgatctccaggagagggccccagccccagccccatggaccagccctctgctccctccgaccccactgaccagccccccgctgctcacgcaaagccagacccaggttctgggggccaacctgctggccctggcgcggcgggtgaggccctggcggtgctgacttcattcgggaggcggttgctggtgctgatacctgtgtatttggccggggcagtgggactcagcgtgggtttcgtgctcttcggcctcgccctctacctgggctggcgccgggtccgcgacgagaaagaacggagccttcgagcagcgaggcagctactggacgacgaggagcagctcactgcgaaaactctctatatgagtcatcgagagctacctgcctgggtcagcttcccagacgtggaaaaggctgaatggctcaataagattgtggcccaggtctggcccttcctgggccagtatatggagaagcttctggctgaaactgtggctccggctgttaggggatctaacccccatctgcaaacatttacatttacacgagtggaactgggtgaaaagccattgcgcatcattggagtcaaggttcacccaggtcagagaaaagagcagatcctgctggacttgaacatcagctatgtaggtgatgtgcagattgatgtggaagtgaagaaatatttttgcaaagcaggagtcaagggcatgcagctacatggcgttttgcgggtgatactggagccactcattggggaccttcccttcgtgggggctgtgtcaatgttcttcatccgacgcccgaccctagacatcaactggacagggatgaccaacctgctggatatcccaggacttagctcactctctgacaccatgatcatggactccattgctgccttcctcgtgttgcccaaccgattactggtgccccttgtgcctgaccttcaagatgtggctcagttgcgttcccctctgcccaggggcattattcgaattcacctgctggctgctcgagggctgagttccaaggacaaatatgtgaagggcctgattgagggcaagtcagacccatatgcacttgtgcgtttgggtacccagacattctgcagtcgtgtcattgatgaagaactcaacccacagtggggagagacttatgaggtgatggtacacgaggtcccagggcaggagattgaagtggaggtgttcgacaaggatccagataaagatgactttctgggcagaatgaagctggatgtagggaaggtgttacaggctagcgttctggatgattggttccctctacaaggtgggcaaggccaagttcacttgaggctagaatggctgtcacttttgtcagatgcagagaaactggagcaggttctacagtggaattggggagtctcctctcgaccagatcccccgtcagctgccatcttagttgtctacctggatcgggcccaggatcttcctctgaagaaggggaacaaggaacccaaccctatggtacaactgtcaattcaggatgtgactcaggagagcaaggctgtctacagtaccaactgcccagtgtgggaggaagcgttccggttcttcctacaagaccctcaaagccaggagctcgatgtgcaagtgaaggatgattccagggccctgactttaggagcactgacgctgcctctggcccgcctgctgactgccccagaactcatcctggaccagtggttccagctcagcagctctggtccaaactccagactctatatgaaactagtcatgaggatcctgtacttggattcatcagaaatatgcttccccacggtgcctggttgtcctggtgcttgggacgtggacagtgagaatctccagagaggcagcagtgtggatgccccacctcgaccctgtcacacgactcctgatagccagtttgggaccgagcatgtgcttcggatccatgtattagaggcccaggacctgattgccaaagaccgtt

SEQ ID NO: 188064 - DNA, 1138 bp, Homo Sapiens
  misc_feature (45)..(57): n is a, c, g, or t
ttgggatcattaatgcatttttccctcatcaagcatatatctgcnnnnnnnnnnnnngcaattctctgtattctatgtctttaaaaatttgatcttgacatttaatgtcacaaagttttgtttttttaaaaagtgatttaaacttaagatccgacattttttgtattctttaagattttacacctaaaaaatctctcctatcccaaaaataatgtgggatccttatcagcatgcccacagtttatttctttgttcttcactaggcctgcataatacagtcctatgtagacatctgttcccttgggtttccgttctttcttaggatggttgccaacccacaatctcattgatcagcagccaatatgggtttgtttggtttttttaattcttaaaaacatcctctagaggaatagaaacaaatttttatgagcataaccctatataaagacaaaatgaatttctgaccttaccatatataccattaggccttgccattgctttaatgtagactcatagttgaaattagtgcagaaagaactcagatgtactagattttcattgttcattgatatgctcagtatgctgccacataagatgaatttaattatattcaaccaaagcaatatactcttacatgatttctaggccccatgacccagtgtctagagacattaattctaaccagttgtttgcttttaaatgagtgatttcattttgggaaacaggtttcaaatgaatatatatacatgggtaaaattactctgtgctagtgtagtcttactagagaatgtttatggtcccacttgtatatgaaaatgtggttagaatgttaattggataatgtatatataagaagttaaagtatgtaaagtataacttcagccacatttttagaacactgtttaacatttttgcaaaaccttcttgtaggaaaagagagctctctacatgaagatgacttgttttatatttcagattttattttaaaagccatgtctgttaaacaagaaaaaacacaaaagaactccagattcctggttcatcattctgtattcttactcactttttcaagttatctattttgttgcataaactaattgttaactattcatggaacagcaaacgcctgtttaataaa

SEQ ID NO: 188065 - DNA, 1015 bp, Homo Sapiens
  misc_feature (60)..(72): n is a, c, g, or t
ctttgtacaaaaaagttgggatcattaatgcatttttccctcatcaagcatatatctgcnnnnnnnnnnnnngcaattctctgtattctatgtctttaaaaatttgatcttgacatttaatgtcacaaagttttgtttttttaaaaagtgatttaaacttaagatccgacattttttgtattctttaagattttacacctaaaaaatctctcctatcccaaaaataatgtgggatccttatcagcatgcccacagtttatttctttgttcttcactaggcctgcataatacagtcctatgtagacatctgttcccttgggtttccgttctttcttaggatggttgccaacccacaatctcattgatcagcagccaatatgggtttgtttggtttttttaattcttaaaaacatcctctagaggaatagaaacaaatttttatgagcataaccctatataaagacaaaatgaatttctgaccttaccatatataccattaggccttgccattgctttaatgtagactcatagttgaaattagtgcagaaagaactcagatgtactagattttcattgttcattgatatgctcagtatgctgccacataagatgaatttaattatattcaaccaaagcaatatactcttacatgatttctaggccccatgacccagtgtctagagacattaattctaaccagttgtttgcttttaaatgagtgatttcattttgggaaacaggtttcaaatgaatatatatacatgggtaaaattactctgtgctagtgtagtcttactagagaatgtttatggtcccacttgtatatgaaaatgtggttagaatgttaattggataatgtatatataagaagttaaagtatgtaaagtataacttcagccacatttttagaacactgtttaacatttttgcaaaccttcttgtaggaaagagagctctctacatgaagatgacttggtttatatttcgattttattttaaaagccatgtctgttaa

SEQ ID NO: 188066 - DNA, 1746 bp, Homo Sapiens
ttggctttcctgggatgtcaaggctaagtccccagagccgactatgagcaggcctgtccctcatgtcagttctgcatcctcaccatggtgccatctagcaggtggggagacagacactgagggctgacccagctaataagtggcaggggtagtaggtgaactcagtctaccccaggctggttgggcggggctatgaggaccctgtaggctagagggcttcccggggagtcctggggaggcagtagggtgtggacagggcttgagactgaagtgagtggggctgggcagtatcaaaggcctccccactgtgtccctgaagtatctgggctctcggacatcggagaaggtgaagaacaagatcttggagctcctctacagctggacagtgggcctgcccgaggaggtgaaaatcgcagaggcctaccagatgctaaagaagcaggggattgtaaagtccgaccccaagcttccagatgacactacctttccccttcctcctccacggccgaagaatgtgatctttgaagatgaggagaaatccaagatgctggcccgcctgctgaagagctcccatcccgaagacctccgcgcagccaataagctcatcaaagagatggtgcaggaggaccagaagcggatggagaagatctcgaagagggtgaatgccatcgaggaggtgaacaacaatgtgaaactgctcacggagatggtgatgagccacagccagggcggcgcagcagctggcagcagcgaggacctcatgaaggaactgtaccagcgctgtgagcggatgcggcccacgctcttccgactggcgagtgacacagaggacaatgatgaggccttagcggagatcctgcaggccaatgacaacctcacccaggtgatcaacctgtataagcagctggtgcggggtgaggaggtcaacggtgatgccacagccggctccatccctgggagcacctcggccctgctggatctctcaggcctggatctcccgcctgcgggcaccacctacccagctatgcccacccgccctggcgagcaggccagccctgagcagcccagtgcctcagtttccctgcttgacgacgagctcatgtctctgggcctcagtgaccccacacccccttcaggcccaagcctggatggtaccggatggaacagcttccagtcgtcggatgccactgagcccccagcccctgctctggcccaggcccccagtatggaaagccgacccccagcgcagacatccctgccagcaagcagcggtctggacgacctagacctcctggggaagaccctcctgcagcagtcgctgcccccggaatcccagcaagtgcggtgggagaagcagcagccaaccccccggctcacactccgggacctgcagaataagagcagcagctgcagctcccccagctccagcgccaccagccttctccacaccgtgtccccagagccccccaggcctccgcagcagcccgtaccaaccgagctctcactggccagcatcactgtgcccctggagtccatcaaacccagcaacatcctgcccgtgactgtgtatgaccagcacggcttccgcatcctcttccattttgcccgggacccactgccagggcgctccgacgtgctggtggtggtggtttccatgctgagcaccgccccccagcccatccgcaacatcgtgttccagtcagctgtccccaaggttatgaaggtgaagctgcagccaccctcggg

SEQ ID NO: 188067 - DNA, 1648 bp, Homo Sapiens
  misc_feature (809)..(826): n is a, c, g, or t
  misc_feature (1478)..(1492): n is a, c, g, or t
ttgggtcatacttgggctgctgagaatatgaaggaagagtcctgggaggtggaactgggtatttggatccagtaaatataagtgacaaaataataggactagtcttgccacaataatgaggctagaatgaaaccaagcttacctgaaaataaataggggttggggatttaatctcatatgttattttgctttcagtctgattttccctggtgttcgcttggcctctgatagccagttcagtgatttcctggatggccttggccctgctcagctagtgggacgccagactctggcaacacctgcaatgggtgacattcaggtaggaatgatggacaaaaagggacagctggaggtagaaatcatccgggcccgtggccttgttgtaaaaccaggttccaagacactgccagcaccgtatgtaaaagtgtatctattagataacggagtctgcatagccaaaaagaaaacaaaagtggcaagaaaaacgctggaacccctttaccagcagctattatctttcgaagagagtccacaaggaaaagttttacagatcatcgtctggggagattatggccgcatggatcacaaatcttttatgggagtggcccagatacttttagatgaactagagctatccaatatggtgatcggatggttcaaacttttcccaccttcctccctagtagatccaaccttggcccctctgacaagaagagcttcccaatcatctctggaaagttcaactggaccttcttactctcgttcatagcagctgtaaaaaaattgttgtcacagcaaccagcgttacnnnnnnnnnnnnnnnnnntcacaggttgcaaaccctggtaacactgcatgcttaatgttgtgtcttctgagcctgtttctagggatacaaagcaatcctgtgttctcagaggaagttgcacacattgtgccctaaagaaggccctcaggtgaaagagcagagctgtgaagaactatcagatttggaattcaatgacactcgagttctggtccaatctgaagccatggattaatctcaaagaatcagtcagtttcatgcaacagaagcccttttcaatggcacctttatatttttatcattcctttttcttcatttatctaaccccaaagccctgatatgccacagaaatggagctatacagccatgaagcggtgttacaggtgaggagtgtaatcctaggaagcatcaggtgaaaagcaggagaccaaagaagtggtcaggaacaatcatcagccctcctctgggcgggaatcagagcagtcagtccagcaggaagagtggcagactttgtagctccatgggcacgtcatttactaatgctaagatgtgttggactctgaaaaacaaaattctgtggctacactgtactgaatgaaattaaagaaactttttttgcatggacacagattagctgaatacttaaattattttcttggggctgcaacttgcnnnnnnnnnnnnnnngaataaaaatcagccattttcaacaatttatattatttttaaaaataaatttcactagtgcatggttttaaaaaggagagagaatgcaacagggtgatacaaagatacaccatgtttattctttaatcatagtctgtgttttggcagacattacaa

SEQ ID NO: 188068 - DNA, 3032 bp, Homo Sapiens
ttggctggattgtgcgctccatttctttcacctcaaagctggccgccaccgctgccacctgctcagagtgaaataatgaaggtggtcaacctgaagcaagccattttgcaagcctggaaggagcgctggagtgactaccaatgggcaatcaacatgaagaaattctttcctaaaggagccacctgggatattctcaacctggcagatgcgttactagagcaggccatgattggaccatcccccaatcctctcatcttgtcctacctgaagtatgccattagttcccagatggtgtcctactcttctgtcctcacagccatcagtaagtttgatgacttttctcgggacctgtgtgtccaggcattgctggacatcatggacatgttttgtgaccgtctgagctgtcacggcaaagcagaggaatgcatcggactgtgccgagcccttcttagcgccctccactggctgctgcgctgcacggcagcctctgcagagcggctgcgggaggggctggaggccggcactccagccgctggggagaagcagcttgccatgtgccttcagcgcctggagaaaaccctcagcagcaccaagaaccgggccctgctgcacatcgccaaactagaggaggcctcattgcacacatcccagggacttgggcagggtggcacccgagccaatcaaccaacagcttcttggactgccatcgagcattctctcttgaaacttggagagatcctggccaatctcagcaacccgcagctccggagtcaggccgagcagtgtggcaccctcattaggagcatccccacgatgctgtctgtgcatgcggagcagatgcacaagaccggcttccccactgtccacgccgtgatcctgctcgagggcaccatgaacctgacaggcgagacgcagtccctggtggagcagctgacgatggtgaagcgcatgcagcatatccccaccccactttttgtcctggagatctggaaagcttgcttcgtggggctcattgagtctcccgagggtacggaggagctcaagtggacagctttcactttcctcaagattccacaggttttggtgaagttgaagaagtactctcatggagacaaggacttcactgaggatgtcaactgtgcttttgagttcctgctgaagctcacccccttgttggacaaagctgaccagcgctgcaactgtgactgtacaaacttcctgctccaagaatgtggcaagcaggggcttctgtctgaggccagcgtcaacaaccttatggctaagcgcaaagcggaccgagagcacgcaccccagcagaaatcgggagagaatgccaacatccagcccaacatccagctgatcctccgggcggagcccactgtcacaaacatcctcaagacgatggatgcagaccactctaagtcaccggagggactgctgggagtcctgggccacatgctgtccgggaagagtctggacttgctgctggctgccgccgccgccactggaaagctgaaatccttcgcccggaaattcatcaatttgaatgaattcacaacctatggcagcgaagaaagcaccaaaccggcctccgtccgggccctgctgtttgacatctccttcctcatgctgtgccatgtggcccagacctatggttcagaggtgattctgtccgagtcgcgcacaggagctgaggtgcccttcttcgagacctggatgcagacctgcatgcctgaggagggcaagatcctgaaccctgaccacccctgcttccgccccgactccaccaaagtggagtccctggtggccctgctcaacaactcctcggagatgaagctagtgcagatgaagtggcatgaggcctgtctcagcatctcagccgccatcttggaaatcctcaatgcctgggagaatggggtcctggccttcgagtccatccagaaaatcactgataacatcaaagggaaggtatgcagtctggcggtgtgtgctgtggcttggcttgtggcccacgtccggatgctggggctggatgagcgtgagaagtcgctgcagatgatccgccagctggcagggccactgtttagtgagaacaccctgcagttctacaatgagagggtggtgatcatgaactcgatcctggagcgcatgtgtgccgacgtgctgcagcagacagccacgcagatcaagtttccctccaccggggtggacacaatgccctactggaacctgctgccccccaagcggcccatcaaagaggtgctgacggacatttttgccaaggtgctggagaagggctgggtggacagccgctccatccacatctttgacaccctgctgcacatgggcggcgtctactggttctgcaacaacctgattaaggagctgctgaaggagacgcggaaggagcacacgctgcgggcagtggagctgctctactccatcttctgcctggacatgcagcaagtgaccctggtcctgctgggccacatcctacctggcctgctcactgactcctccaagtggcacagcctcatggaccccccgggcactgctcttgccaagctggccgtgtggtgtgccctcagttcctactcctcccacaagggacaggcgtccacccgccagaagaagagacaccgcgaagacattgaggattatatcagcctcttccccctggacgatgtgcagccttcgaagttgatgcgactgctgagctctaatgaggacgatgccaacatcctttcgagccccacagaccgatccatgagcagctccctctcagcctctcagctccacacggtcaacatgcgggaccctctgaaccgagtcctggccaacctgttcctgctcatctcctccatcctggggtctcgcaccgctggcccccacacccagttcgtgcagtggttcatggaggagtgtgtggactgcctggagcagggtggccgtggcagcgtcctgcagttcatgcccttcaccaccgtgagtaccaccttcccggctctcctgctggtgctggggcctcgggg

SEQ ID NO: 188069 - DNA, 1342 bp, Homo Sapiens
aactttgtacaaaaaagttggctctaccccaaatacctctgttcttagtctcaaggggagaataacatcagggagcccctcatcttccccagaaggacttctcgttcctcatgtagttaactccattgattttcctatcttggtgctgatagctctctaagggtagggcacacctccccacagccaccctccctcttcagagagcccccagccagcagcaggcccctctgcctgcactcctcaggcttgcccctcgctgcctcagtgaggcactagtgccactgccgtggcccagccgggccatagctcaggctgcagcagaaatgcctctcagtggccaacagttgcttttctctctggtgtcaccctgtggcaacaggctggagcaggggaaggagaaagccttcctcttctctcataggatagaaaggcaggctcagaactgatgctcatcctgatctctaggccttgttcctcttccagggaagaaaagccaaatccttatcaaggaaaaagcacctaacagctccctttggatatccctgagctctgctgtggggagtatcataaaggttctagccttcgtgaagttgttctcgtggaggtctgttggtccctctgacctcagcatctgctcacatcccaccctctgcccaactctggcagtctctcctggcagatctccccagagtggtccttgcttctcacctggattcctgcttgtgcaggagcctgtgtacacagggcctccctcacccagcctggcccctctgctgagcactttgcgctgctcttgatgggcagcagtgggactgggaactccttagagagggccttgcagctttacactggaataagtctgcctctgcctctgcctcaccctgctggctcctggtgggtttcatcccaggcagagttgacattgctggaggggtttggtggactcctaagaatcatgaaaccacaggagcatgtttaggaagagatttgtctctggtccctgtctctgaaaggacacagatgctaaatatttattgtcttagatcatggattcctgatacctctcactcaaggggaccaaaagggacccccccgtgttcatcccttgtaaggtgagttcagtctacgttgtctctttccagtcactggatgcgtggcaccaactggtcaatgggtgcttggtgccataccctgctcaccctagtctctgcaggccatgtcctgaagggttcctcacgaggtcgggactagggtgggagaggcactatctgagacctgcaatcactcttgttggtcttgagcccattcatttccaaaacatccatctttctccacttccccc

SEQ ID NO: 188070 - DNA, 1070 bp, Homo Sapiens
gggcgctctgtaaattttgcaggtcttgggtttattttaagggttccagcatcccagagccaaaaacaaatagtgccatctgccccagtagaagatagatatctctttgagccactgcacaatggtgagaactgtagtgatgtaatagatgcactatggccgtgaagaacagccaaaggtgcacaggttcgaagacaccagactcggatcattttatcacaacttccagctgctatcatggtattctcatagtttacagccatgtctgatatttcagcagcatgtcctcttaaggtagctaacaacctcccatcatctgttgcccatattttcacaagacagtcatcagaaccagtaaatatccgtctgccagttcgatcaaaagttacacagtacacagatgacaagtgtccaagaattcgtttatgcattttcatgtgctgatacactgcagttggaacaagtcgctcaagtctgtatttcccattcagcttccttgaaaacagagtatccgcaatgctgggtgggctaccatagttaactggtgactcaggtggtcttccacagtgcaacgcagccagagcagatcctttccacacaacatgcttgcagcttttatttgtgcgtagtaaagactgtcttccagctcctaataaagtttgtactccaggaacactttgaggaatttcttgttcaagaagaggtcctagtcgatgacatatttgcagcaagtgatcaggtgctaagtgtctgtaatacttcaccagattctggtaggtcctgggatgctccttcccggtccagtcggtgcgccggggcagcagctccttctcggccacctcgcggatcagcacctgagccgcctgctgacagggtccatcttccaggaaccgggcgatgaggaagtagagctccgatcgcagctccgagaggcctttcctctcacaagacatgtttatgggtcacttcagggccgccgacgggacaccccgccgccgaggggaagcggggacggtgccgccgcctgccctatagctgtcagtgtgtgttcacgagccgagcttcgccaa

SEQ ID NO: 188071 - DNA, 895 bp, Homo Sapiens
tacaaaaaagttggcacacctgtctgccaggttaaacaaccatcgagcatgtgtcaatggcattgcttgggccccacattcatcctgccacatctgcactgcagcggatgaccaccaggctctcatctgggacatccagcaaatgccccgagccattgaggaccctatcctggcctacacagctgaaggagagatcaacaatgtgcagtgggcatcaactcagcccgactggatcgccatctgctacaacaactgcctggagatactcagagtgtagtgttggtggcgctgtgcccacgaggcaggggcttttgtatttcctgcctctgccccacccccaaagtaagaagaaacatgtttccagtggccagtatgtctttcattgctttgcacccactgttaccagaagctgctctaggagttcctggccagtcaccccatcgccctctgtggcagactcagtgctgtgtggcgcctcctcagcccagggctgagttttaagattttctctcctttcctcttctcctttggttcctcaattaaaaaatgtgtgtatatttgtttgtcaggcgttgtgttgaggagcagttcacgcactggctgtgtctattcctctgcccaggtgtctctgtttgctgcccaaggcagcagttcatgtctcgtccatgtccatgttcgtgttagcacttacgtgggaacaaataccaatttgtcttttctcctagtatcagtgtgtttaacaaattttaactttgtatatttgttatctatcacgctaatttttttatgaaaagaattttactctcctgcttcatttctttgtcttatagtcctccctctttgcaccttcttctcttccctcagtgcctggagctggtactgggcccctggcccc

SEQ ID NO: 188072 - DNA, 2166 bp, Homo Sapiens
  misc_feature (1161)..(1170): n is a, c, g, or t
  misc_feature (1510)..(1591): n is a, c, g, or t
tttgtacaaaaaagttggctcagtggttgaatcataggcaagtggtgtgtggcacaaaatgcaacacgctatttgtcgtagatgtccagacaagccagatcaccaagatccccattctgaaagaccgggagcctggaggtgtgacccagcagggctgtggtatccatgccatcgagctgaatccttctagaacactgctagccactggaggagacaaccccaacagtcttgccatctatcgactacctacgctggatcctgtgtgtgtaggagatgatggacacaaggactggatcttttccatcgcatggatcagcgacactatggcagtgtctggctcacgtgatggttctatgggactctgggaggtgacagatgatgttttgaccaaaagtgatgcgagacacaatgtgtcacgggtccctgtgtatgcacacatcactcacaaggccttaaaggacatccccaaagaagacacaaaccctgacaactgcaaggttcgggctctggccttcaacaacaagaacaaggaactgggagcagtgtctctggatggctactttcatctctggaaggctgaaaatacactatctaagctcctctccaccaaactgccatattgccgtgagaatgtgtgtctggcttatggtagtgaatggtcagtttatgcagtgggctcccaagctcatgtctccttcttggatccacggcagccatcatacaacgtcaagtctgtctgttccagggagcgaggcagtggaatccggtcagtgagtttctacgagcacatcatcactgtgggaacagggcagggctccctgctgttctatgacatccgagctcagagatttctggaagagaggctctcagcttgttatgggtccaagcccagactagcaggggagaatctgaaactaaccactggcaaaggctggctgaatcatgatgaaaccggaggaattacttttcagacattgacttcttccccaatgctgtttacacccactgctacgactcgtctggaacgaaactctttgtggcaggaggtcccctcccttcagggctccatggaaactatgctgggctctggagttaatgacaactccccaaatgcagagatttacactaacttccattctcagtttccttgtttcttttgannnnnnnnnncctaattgtgtgaggctcttgtgttttagtgggaacaccaaagtttgcctatagtttaggcacttaataggaagaagctctgtacagaaatctgaaagttgttttgctttttgttttcccctttggtaatcaaaattttactatcttttattatttctggcttttcaaccaaacattgttgctaatccctatttttctttaagtgacacacattctcctgtctctggcttcttcaggctgaaatgacatagtctttctcacccttacttcactcttgagaggtagggctcctttataattacatggttgctctcagactttctgtgaaagtttgggagcnnnnnnnnnnnnnnnnnnnnnnnnnnnnnnnnnnnnnnnnnnnnnnnnnnnnnnnnnnnnnnnnnnnnnnnnnnnnnnnnnncactgaaattacctggagtgaggattacttgtaattaaaatatttataaaagaaacaactttattcacagagtccagctttgggactagtctgtatcttgttttttaagtctaacaacactgataataggaagtaaaaacagaaaggaaaagaaattaccactgggaaaatctttttagttagattgtaggcttcctggggcctcccatgccaggactgcaaagtgatccagccctacctgtcttcccacctgtgtgtcccccgtgtgggaagttggtgtcacttccccttcccaccctcacatctgcttagccagtagccacacccctaaaacatcagactcaccatccaggtgcagctccagaggctacaaaagggcttcatgggacttgaatccccatcctagcttctctctccttcccctcaagacctgatctggttttaaggggcctggagctgggagtctcaagtctgctaagattcacatccatagcccccgtggctttgaggagaatcctctctgccattcttcaatctccccagtgggttttgctattattttctaattgggttaa

SEQ ID NO: 188073 - DNA, 2279 bp, Homo Sapiens
ttgggacaaagggaagcgaagccggagctgcgggcgctttttctgcccgcggtgtctcagattcattcttaaggaactgagaacttaatcttccaaaatgtcaaaaagaccatcttatgccccacctcccaccccagctcctgcaacacaaatgcccagcacaccagggtttgtgggatacaatccatacagtcatctcgcctacaacaactacaggctgggagggaacccgggcaccaacagccgggtcacggcatcctctggtatcacgattccaaaacccccaaagccaccagataagccgctgatgccctacatgaggtacagcagaaaggtctgggaccaagtaaaggcttccaaccctgacctaaagttgtgggagattggcaagattattggtggcatgtggcgagatctcactgatgaagaaaaacaagaatatttaaacgaatacgaagcagaaaagatagagtacaatgaatctatgaaggcctatcataattcccccgcgtaccttgcttacataaatgcaaaaagtcgtgcagaagctgctttagaggaagaaagtcgacagagacaatctcgcatggagaaaggagaaccgtacatgagcattcagcctgctgaagatccagatgattatgatgatggcttttcaatgaagcatacagccaccgcccgtttccagagaaaccaccgcctcatcagtgaaattcttagtgagagtgtggtgccagacgttcggtcagttgtcacaacagctagaatgcaggtcctcaaacggcaggtccagtccttaatggttcatcagcgaaaactagaagctgaacttcttcaaatagaggaacgacaccaggagaagaagaggaaattcctggaaagcacagattcatttaacaatgaacttaaaaggttgtgcggtctgaaagtagaagtggatatggagaaaattgcagctgagattgcacaggcagaggaacaggcccgcaaaaggcaggaggaaagggagaaggaggccgcagagcaagctgagcgcagtcagagcagcatcgttcctgaggaagaacaagcagctaacaaaggcgaggagaagaaagacgacgagaacattccgatggagacagaggagacacaccttgaagaaacaacagagagccaacagaatggtgaagaaggcacgtctactcctgaggacaaggagagtgggcaggagggggtcgacagtatggcagaggaaggaaccagtgatagtaacactggctcggagagcaacagtgcaacagtggaggagccaccaacagatcccataccagaagatgagaaaaaagaataagtgttgccttgttttgtgtgttctaaatactttttttaatgaaaaaatgttttttggttttaatggtgttacgtggtttgtgtattaattttttttcttgtccatatcacaccaccaaaggcttttggaccatttagcatcatgagcctaatggctcagtcagtcacctttcttaagtgttgtgaagatggctcttttctttggatcttgtttctagccctcaactgctgaaagcctcagaatttagattaattgagaaaacacccacctcttttagagaattatcctttgatgctgcagaatctactcttacaatgccttcctacagctcactggggtgcttaccaaagccatagctttaaaccttcccagtccccatcagtagcttcctgaaagtctcctctcttgtttacttctgcaaagggtagcttctgaaaaacgtgatcatgtatgagtatgtatttgttcacttacccttttttacttttaatcaatgtcagataccaagagttgtgttaagctgagtgtagtgtgtaactaactacacttggatcttactgatccagaaatagtccccatagttagagtagttacttatgaagtggttattaaagtgaacacagcacatatacattatctatactgctttttgttatgattaatactgggtatgttctggtaaatccatccttattgtatagaaaaaaaattacttttttaccaggttttccaaagacagaatagatcacaaagctcacgaatttaatattcttgtaatggactagataattcaaactgattagcccattccagaagaaaaacagctgggaattaagttaatccacttgaaattgttttacataatcagaacatcccaaacctcaagctcagatcccatagaccagagcccaccttcttgataaacttagtaaagtcttggagacta

SEQ ID NO: 188074 - DNA, 1688 bp, Homo Sapiens
ttggctttactgtttgaatttgtaactgaagtactggatatttaagtgtgagtaatgtcttcattagaaaatagcagaaccgctcttgtcttttagtgtatttttcaagaaaaaaggaaaggaaagacatcaagcagtggatcacaacatttatagcacaagaaataacttgtatataagcatcaaaaagattaagaattttttaatatgaaaaatatttgcagtgattttaaagtgcttttccagcaatgttcttagggactcctgagacacggttactttatctactggatcagtaaggcacacaattaacaattaacaattaatgtttatttacaaagtaaagggaaaacctgtgtaacatgagaatttggcatgacaaaatggagaccattttgtatctgctgttgtatcttgtccgggttgcagacgtgcactattaaagtcccaagttaatagagcacaaacccttctcgctcctcccccatgtgcccctctttttagatgtgtataacttaaactcgatggctcaggaaaattccactaattagaatcatgtacagtaccccaggtcgttgtccagatatacaagtttgctaatgtagttaagcctggattattaaacacttttcctaaattattgtaaacagaacagcttagagaaaggtattctcagtccttaatattgtatagtagtttatgagcccctctctaaatattggtatttttatattccagagatgtacccaatagaaaaaattaaaaattaatcagtatctaatttaatatccataagtatttttccttagattttagtcacgtacagtgggctatgtggatgtcacttgtgcttcaccatagtttaccactaggtgtcactgtggctctgcactgcgcttgttttgtagcaaagaacagcggcatcccctcgggagagaggagctgcttccagggcaacaggcaagcgggctcagaggttcaggagaaggcaacagaggcctggaaggggtcttcgtgcatctgtgccagttgtgcaagacgaactctttgaacactacatgctttggacttcagccaggcagaggctggaagaaggttgaccagagctcccttgctctggtagagggatgggtacatggagaagccccttcttccccatgagcctccctcctgtcagttcctctcagcctccagcttttataactccagaagcgtcacagttgggtggtttgattcagagagagttatttttctactgcagaaatgccttggacaaaaccagtgctcactgaatctttgccacaaaatggaataggctatcccagggggcaagaggtgcccgcccctgtgcccagcctcctcttgatgctcccagtgcccagcagcctcgcacaccctgcctgtctgttcctgggctgcccatttctcaagaaaccgacctgcaaaggcagccggctgctgcctccacaccgagggctgtgcggtcctgctgctcgctcactgggaggtgcagctctttctcctcttcctctaggaattccagaccgaccatctaccatgactaacaacaatgaacaaagggcttaggggcaagagctacctgcaaagacgtgtcatggaacccttcaccatgcaatgccttgaactcagctctggctgctcccagaaaggtggctggctgggggcct

SEQ ID NO: 188075 - DNA, 451 bp, Homo Sapiens
actttgtacaaaaaagttgtgcggccgtcaagtgaactgtggtgtatgtgccacgggatttgagtggttgcgtgggcaacactgtcagggtttggcttgtgtgtcatgtggctgtgtgtgacctctgcctgaaaaagcaggtattttctcagaccccagagcagtattaatgatgcagaggttggaggagagaggtggagactgtggctcagacccaggtgtgcgggcatagctggagctggaatctgcctccggtgtgagggaacctgtctcctaccacttcggagccatgggggcaagtgtgaagcagccagtccctgggtcagccagaggcttgaactgttacagaagccctctgccctctggtggcctctgggcctgctgcatgtacatattttctgtaaatatacatgcgccgggagcttcttgcaggaatactgctccgaatcac

SEQ ID NO: 188076 - DNA, 520 bp, Homo Sapiens
ttgggtgagtgttgactgactgtgtgtgtgtggaggggtgactgtccgtggaggggtgactgtgtccgtggtgtgtattatgctgtcatatcagagtcaagtgaactgtggtgtatgtgccacgggatttgagtggttgcgtgggcaacactgtcagggtttggcttgtgtgtcatgtggctgtgtgtgacctctgcctgaaaaagcaggtattttctcagaccccagagcagtattaatgatgcagaggttggaggagagaggtggagactgtggctcagacccaggtgtgcgggcatagctggagctggaatctgcctccggtgtgagggaacctgtctcctaccacttcggagccatgggggcaagtgtgaagcagccagtccctgggtcagccagaggcttgaactgttacagaagccctctgccctctggtggcctctgggcctgctgcatgtacatattttctgtaaatatacatgcgccgggagcttcttgcaggaatactgctccgaatcac

SEQ ID NO: 188077 - DNA, 1297 bp, Homo Sapiens
ttgggccccggaagccgttctttggccctgtgacacgtagcaacggggctggttcagggtctgaaacagagtttgggggttgtttgggattagtgaagctactgcctttgccgccagcgcagcctcagagtttgattatttgcaatgtcaggctttgaaaacttaaacacggatttctaccagacaagttacagcatcgatgatcagtcacagcagtcctatgattatggaggaagtggaggaccctatagcaaacagtatgctggctatgactattcgcagcaaggcagatttgtccctccagacatgatgcagccacaacagccatacaccgggcagatttaccagccaactcaggcatatactccagcttcacctcagcctttctatggaaacaactttgaggatgagccacctttattagaagagttaggtatcaattttgaccacatctggcaaaaaacactaacagtattacatccgttaaaagtagcagatggcagcatcatgaatgaaactgatttggcaggtccaatggttttttgccttgcttttggagccacattgctactggctggcaaaatccagtttggctatgtatacgggatcagtgcaattggatgtctaggaatgttttgtttattaaacttaatgagtatgacaggtgtttcatttggttgtgtggcaagtgtccttggatattgtcttctgcccatgatcctactttccagctttgcagtgatattttctttgcaaggaatggtaggaatcattctcactgctgggattattggatggtgtagtttttctgcttccaaaatatttatttctgcattagccatggaaggacagcaacttttagtagcatatccttgcgctttgttatatggagtctttgccctgatttccgtcttttgaaaatttatctgggatgtggacatcagtgggccagatgtacaaaaaggaccttgaactcttaaattggaccagcaaactgctgcagcgcaactctcatgcagatttacatttgactgttggagcaatgaaagtaaacgtgtatctcttgttcatttttatagaacttttgcatactatattggatttacctgcggtgtgactagctttaaatgtttgtgtttatacagataagaaatgctatttctttctaggttcctgcagccattgaaaaactttttccttgcaaattataatgtttttgatagatttttatcaactgtgggaaaccaaacacaaagctgataacctttcttaaaaacgacccagtcacagtaaagaa

SEQ ID NO: 188078 - DNA, 2102 bp, Homo Sapiens
  misc_feature (963)..(977): n is a, c, g, or t
ttgggataaatcatggaaaaaaatacgtccaagaccaacaaaaacaaattatgaaggaccatattatatatgtaaagatgttgctgctgaggaggaatgtagatattcaggccactgcacgtttgcttattgccaagaggagatagatgtgtggacactggagcggaaaggagcattcagccgggaggctttctttggcggcaatggaaagattaaccttactgtgttcaaacttctccaggagcatcttggggaatttatattcctttgtgagaaatgttttgatcataagcctagaatgataagtaaaagaaataaagataattctactgcttgttctcacccggttacaaagcatgagtttgaagacaataagtgccttgtccacattttgcgagagacaacagtaaaatactccaaaatacgttcttttcatggtcagtgtcagcttgatttatgtcgacatgaagttcggtatggctgtttaagggaagatgagtgcttttatgcccatagtcttgtggaactgaaagtctggataatgcaaaatgaaacaggtatctcacatgatgctattgctcaagagtctaaacgatattggcagaatttggaagcaaatgtacctggagcgcaggtacttggtaatcaaataatgcctggatttcttaatatgaagataaagtttgtgtgcgcccagtgtctgagaaacggtcaagtcattgaaccagacaaaaacagaaaatattgtagtgcaaaagcaagcattcgtggaccaaagaccggcgtgcgatgagagtgatgtctattgaacctgtgcaaccatattgcttctgggaaaaaatgtcaatatgttggaaactgttcctttgctcatagtcctgaggaaagagaagtttggacttacatgaaggagaatgggatacaagatatggagcaattttacgaactatggctcaagagtcnnnnnnnnnnnnnnngtgaagacatagccagtcagtcaaacaaggaaaatggaaaacaaattcacatgccaacagattatgctgaagttacagtggactttcactgctggatgtgtgggaaaaactgcaacagtgagaagcagtggcagggccacatctcctccgagaagcacaaagagaaggttttccacaccgaggacgaccagtactgctggcagcaccgcttcccaacaggctatttcagtatttgtgataggtatatgaatggcacctgcccagaaggaaacagctgtaaatttgcacatggaaatgccgaacttcatgaatgggaagaaagaagagatgccctaaagatgaagctcaacaaagcacgaaaagatcacttaattggcccaaatgataatgactttggaaaatatagttttttgtttaaagatttaaactaatatgctggcttttatgtatgatacctaatcagagcattgaccagaaaaattgaaagtgttctgaggcacatagcagaggagctgcagatttcctgcttgtattggcgtatatcgttcctcctgagcagcaacccacagtaggtaggaaaatgggctgtttcacaggcctggccacgctctcacggaaccactggcatcagatggtgaagtgactgctacccggttgccatctgttgaacagacttttggatgaagtgtgttggggaagaggataaggttatatctaggacaactctttgagttggtccttcatataagaatcgtgacggtaagagaataaacacttgtactgggatcagaatacatgatggatgaaattctttacatgttttagcagaatgaatttgtttaatataataaagtttgctacttatctgtatgtaggttgctaaaaaggattttcttaactcagattttaagccaaataaccatttaacactagtatttgttaaatggggtatttttctgtatttgtatgtttcactataataagggaattaaggataatgtgcattgagaatattttgaaaaataattgactcaaattttatttcttggtcttttgctgtttaaatgatgattttgaaagattaaacctgtactgttgctattgtgtcagtgtatggaccaatac

SEQ ID NO: 188079 - DNA, 1588 bp, Homo Sapiens
ttggcttcaatagaggtgcccggggacagaacaccctgcgccaactcctggctccagtggtaaaagagatcatcgacgacaagtcgctgattatcaacacaaaccctgtagaggtgtacaaggcttgggtgaaccaactagaaacacagactggagaggccagcaagttgccttatgatgtgaccacagaacaagctctaacatacccagaagtgaaaaataaactggaggcttccattgagaacctgagaagggtcaccgacaaagtcctgaattctatcatttcttcccttgatctactgccttatggattgaggtatatagccaaagtactgaagaattcgatccatgagaaattccccgatgcaacagaagatgagctattaaagattgttggaaacctcctgtactatcggtacatgaatccagccattgtagctccagatggctttgatatcatcgacatgacagctggaggtcagataaattctgaccaaaggagaaacttaggatcagtggccaaggttcttcagcacgcagcctccaacaagctgtttgaaggagaaaatgagcatctctcatctatgaacaattatttatcagagacgtatcaggaattcaggaaatatttcaaagaagcatgtaatgtccctgagccagaagagaagtttaatatggacaaatacacagacctggtgacagtcagcaaaccagtcatttatatttcaattgaagaaatcatcagcacacactcactcctgttggaacaccaggatgcaattgcccctgagaaaaatgacttactgagtgaattgctggggtcgctgggagaggtgccaaccgtggaatcttttcttggggaaggagcagttgaccccaatgaccctaacaaggcaaatacactaagtcagctttcaaagaccgagatttctcttgtcttgacaagcaaatatgacatagaggacggtgaagctatagatagccgaagcctcatgataaagaccaagaagctgataattgatgtgatccggaaccagccagggaacacattgacagaaatcttagagacaccagcaactgcgcaacaggaggtagaccatgccacggacatggtgagccgtgcaatgatagattccaggactccagaagaaatgaagcatagccaatctatgattgaagatgcacagctgcctcttgagcagaagaagaggaaaatccagaggaatcttcggacgttggaacagactggacacgtgtcatccgaaaataaataccaagacattctcaatgagattgccaaggatattcgaaatcaaagaatctatcgtaagcttcgaaaagctgaattggcaaaacttcagcagaccctgaatgcacttaacaagaaggcagcattttatgaagagcaaatcaattattatgacacctacataaagacttgtttagacaacttaaaaagaaaaaatactcggagatcaattaaactagatggaaaaggagaacccaaaggggcgaagagagcgaagccagtgaagtacactgcagcaaagctgcatgagaaaggtgtcctgatagatatagatgatct

SEQ ID NO: 188080 - DNA, 1587 bp, Homo Sapiens
  misc_feature (1323)..(1332): n is a, c, g, or t
gccaactttgtacaaaaaagttggcgccctgggggcggagcggaggggcccaccacggccttatttccgcgagcgccggcactgcccgctccgagcccgtgtctgtcgggtgccgagccaactttcctgcgtccatgcagccccgccggcaacggctgcccgctccctgctccgggcccaggggcccacgccccaccgccccgctgctcgcgctgctgctgttgctcgccccggtggcggcgcccgcggggtccggggaccccgacgaccctgggcagcctcaggatgctggggtcccgcgcaggctcctgcagcaggcggcgcgcgcggcgcttcacttcttcaacttccggtccggctcgcccagcgcgctgcgagtgctggccgaggtgcaggagggccgcgcgtggattaatccaaaagagggatgtaaagttcacgtggtcttcagcacagagcgctacaacccagagtctttacttcaggaaggtgagggacgtttggggaaatgttctgctcgagtgtttttcaagaatcagaaacccagaccaaccatcaatgtaacttgtacacggctcatcgagaaaaagaaaagacaacaagaggattacctgctttacaagcaaatgaagcaactgaaaaaccccttggaaatagtcagcatacctgataatcatggacatattgatccctctctgagactcatctgggatttggctttccttggaagctcttacgtgatgtgggaaatgacaacacaggtgtcacactactacttggcacagctcactagtgtgaggcagtggaaaactaatgatgatacaattgattttgattatactgttctacttcatgaattatcaacacaggaaataattccctgtcgcattcacttggtctggtaccctggcaaacctcttaaagtgaagtaccactgtcaagagctacagacaccagaagaagcctccggaactgaagaaggatcagctgtagtaccaacagagcttagtaatttctaaaaagaaaaaatgatctttttccgacttctaaacaagtgactatactagcataaatcattcttctagtaaaacagctaaggtatagacattctaataatttgggaaaacctatgattacaagtaaaaactcagaaatgcaaagatgttggttttttgtttctcagtctgctttagcttttaactctggaagcgcatgcacactgaactctgctcagtgctaaacagtcaccagcaggttcctcagggtttcagccctaaaatgtaaaacctggataatcagtgtatgttgcaccagaatcagcannnnnnnnnnaactgcaaaaaatgatggtctcatctctgaatttatatttctcattcttttgaacatactatagctaatatattttatgttgctaaattgcttctatctagcatgttaaacaaagataatatactttcgatgaaagtaaattataggaaaaaaattaactgttttaaaaagaacttgattatgttttatgatttcaggcaagtattcatttttaacttgctacctacttttaaataaatgtttacatttctaaat

SEQ ID NO: 188081 - DNA, 1082 bp, Homo Sapiens
ttggcttattgcccaccagcaacagaatccgcaagtttatgtgtctcagtctgcagcagctcaaatcccagccttctatatggacacaagtcatttattcaatacccaacatgcacgattggctccgccatccttggctcaacaacagggtttccaaccaggtctctctcagccaacttcagttcagcagattccaatccctatttatgcaccactgcaagggcagcatcaagcccaactgagtttgggggctggccctgctgtttcccaggctcaggaattgttcagctcctcacttcaaccatatagatctcagccagcttttatgcaaagcagtttatcccagccatctgtggtcctttctggtactgctattcacaactttccaactgtccaacaccaagaacttgccaaggcacaatccggtcttgcctttcagcaaacatcaaatactcagcccattcctatattgtatgaacatcaactggggcaggcatcaggactaggaggttcccagctgattgacacacatcttctccaggccagagcaaatcttacccaggcctcaaatctttattctggacaagtacaacagcctggtcagacaaatttttataacactgcccagtcaccaagtgctctccagcaggttacagtacctttaccagcatcccagctttccttgcctaattttggatctacagggcaacctctaattgctttgcctcagactcttcagcccccattacagcataccactccccaagcacaggctcagagtctgagtcgtcctgcacaagtaagccagcctttcagaggattaattcctgctggaacacagcatagcatgattgcaaccacaggaaaaatgtctgaaatggaactaaaagcctttggaagtggcattgatataaaaccaggcacacctccaatcgctggtagaagcaccacaccaacatctagtcccttccggggctacttctacaagtccgaacagccagtccagcaaatgaacagcattgtctaccagaggcagttccagtcagcccctgccactgtgagaatgacacaaccatttccta

SEQ ID NO: 188082 - DNA, 645 bp, Homo Sapiens
tcccacaactttaattcctgttaacttttttagtttgtgttcttttaataaacacacttacatagttacaattttgtaagaataaaaaccgattacctcatgccaagcatgccgagaatttgcagagtctcaatacccagtactatagttttcaagacacacaaaatttttaggcaaaacagcaccttgaaacaatttaataatgtattacattatagtagcatcacagcagcagtcaataatgccactttagacaaaaatcagtatttccattatgcattctgtgtataagaattcataaatcggtaaaagtcattctaagaaaacttggcaaatacagctttggactggaattggcatttctttgtctacttttccttcccctagattctttgttttaaactacagtattcatattttaaaatgttttaaattattttaagacgttaatatagcagttacatttttgaatagttatttgaaagtgactgtaagataaagttttagagaatctattatggatagggttgatttacattttcacattttctaaaaatcagctttggttttagaactgattgtttttcattttgggaaaacctaccaggtttaatcaattactttaaaaataattatcatatccaa

SEQ ID NO: 188083 - DNA, 2132 bp, Homo Sapiens
ttggagtaaaattaaaagtcgtcttggagacaaggaagcagttctcaacaggtacgaagatgccctggtgctcctgctcacagaggtgttgaatcgaatccagttcagatacaaccaagcccagctggaggagttggatgatgagactctggatgacgatcagcagacggagtggcagcggtacttacggcagagcttggaggtggtggccaaagtgatggagctcctgcccacgcacgccttctccacactgttccctgttcttcaggacaatttagaagtttatttgggattacaacagtttatagtcacttcagggtcaggacacaggttgaacatcacggcggagaacgactgccggcggctgcactgctccctgagagacttgagctccctgctgcaggccgtgggccgcctggccgagtactttatcggggatgtgtttgctgcacggttcaatgatgccctcacagtcgtggaaaggttggtcaaagtcactctgtacggatctcagataaaattgtacaacattgaaactgctgtgccatcagtattgaaacctgacctcattgatgtgcatgctcagtccctggctgcgctgcaggcttactctcactggttagcacagtattgcagtgaagttcaccggcagaacacgcagcagttcgtgacactcatctctactaccatggatgcaatcacacctctaatcagcaccaaggtccaagacaagctgctgctatctgcgtgccacttactggtctcactggccaccaccgtgcggcccgtctttctgatcagcatccctgcagtgcagaaagtattcaacagaatcactgatgcctctgccctgcgacttgtcgataaggcccaggtgttggtgtgccgagccctctctaacatcttgctgcttccgtggccaaaccttccagagaatgagcagcagtggcccgtgcgctccatcaaccacgccagcctcatctctgcactctcccgggactatcgcaacctgaagcccagtgctgttgccccacagagaaagatgccactggatgacaccaaactgattatccaccagacactcagcgtcttagaagatattgtggagaatatctcgggggagtccaccaagtctcgacagatttgctaccagtcgctgcaggaatctgttcaggtctccctggccctctttccagcttttatccatcagtcagatgtgactgatgagatgctgagcttcttcctcactctgtttcgaggccttagagtacagatgggtgtgcctttcactgagcaaatcatacagactttcctcaacatgtttaccagagagcagttagccgagagcatcctccacgagggcagcacaggctgccgggtggtggagaagtttctgaagatcctgcaggtggtggtccaggagccaggccaggtgttcaagcccttcctccccagcatcatcgccctgtgcatggagcaagtgtatcccatcattgccgagcgtccctcccctgatgtgaaggccgagctgtttgagctccttttccggacgctccatcacaactggaggtacttcttcaagtccaccgtgctggccagtgtccagagggggatcgctgaggagcagatggagaatgagccccagttcagtgccatcatgcaggctttcggacagtcctttctccagcccgacatccacctttttaaacaaaatctcttctacttggagactctcaacaccaagcagaagctgtaccacaagaagatcttccggactgccatgctgttccagtttgtgaacgtgctgctccaggtcctggtccacaagtcccatgatcttctgcaggaggagattggcatcgccatctacaacatggcctcagtcgactttgatggcttctttgccgccttcctcccagagttcctgaccagctgtgatggtgtggatgccaaccagaaaagtgtgctggggcggaatttcaagatggatcgggacctgccctcattcacccagaatgtgcacagggctggtcaacgacctgcgctactacagactctgcaaacgacagcctgccccctggcactgtgaaagctctaggcctgctactgcctggggacacggacttctgctg

SEQ ID NO: 188084 - DNA, 1844 bp, Homo Sapiens
  misc_feature (1573)..(1617): n is a, c, g, or t
acaaaaaagttgggtcagacgatgacctctaacaaccccttctcctccacggatgccaatggggactcgaatccattcgacgacgacgccacctcggggacggaagtgcgagtccgggccctgtatgactatgaggggcaggagcatgatgagctgagcttcaaggctggggatgagctgaccaagatggaggacgaggatgagcagggctggtgcaagggacgcttggacaacgggcaagttggcctatacccggcaaattatgtggaggcgatccagtgatgagtcggggacaggccagcgggggggacggaggcggcgggcccaggagcctcagccagccacgtgggcatccactccttttcctgcaagagatgatggttccattgctcttggcttcatggtgttcctggaaggcagatgagctggtcatttcgcctgggactcggcacctttccgagtgcagctggagggatctgagcgcaggaagacgcagaacaacagaaatagccgcccctccccgcccactgtgcctgttggcctatcatagatctctatgttcttgactttgtctctcctttccgagtcaatggtgggttacactgatcttgttccactgattactctctctgacgagtccatcacctgcaacttaaatgaacaagcttacatcccattttgagtgaagattttgaggtttttaatttaaaggctgtgtacagttatacttttttatacacctgttcatttctacttaaattatggcacagattgatgcgcaccagtcttgaggaaacgatctccctattcccttaccctgttactcagccacgccgtgtgtaggcttagcctcaggtggcagatgtttgaggaaaggaattatgccaggaaggtgggaccgggttatggtcgggtttctattgggaatgctctttgtgcttttgggcatctgaatggaagctttacatagaaccttaggtagaactcccccaaatcgccatatttaaaaattattttcactctattcttgcttaaaactgtactcttttgcaaattaacaattttatcactgattcagagttaaaaagaagactaacttttcaagcaaatgcatctgtaaagatgctttaaattagactgtcatgtctcagtgtctatctgtatatattatttgatattcagagaatctaaagcactcgtctactgttttaatgatatttaatttgttttaacagtgagtttcgtttgtgaactgcttgaagtctgtggcattcagggagacatctggctggccggctgggtctcctcccgggctcagtgggcctggggcctctctgacgtggtgcctgctggagggaggctcgtcgtcaccagctgactgctggtccggcttctgaccggcctttgtcctggctccgtagcagaacactgtaaaagtgcccgcgtctttgcagtagttgcagatttcagtcgtcgtgttacttgtgcacaaacagaagctgggtcttacccgcagcacgagtgtctcgggctgcccggagtcgcccgggagcaggtgctgcagccagagttnnnnnnnnnnnnnnnnnnnnnnnnnnnnnnnnnnnnnnnnnnnnnaacctgtgtttcacgtgactcagcagtgcccgccgccgtcaccagctatgcattcactccgtttccagtgagcagatgtcttgcttggaaagtggacctgtgtctgtgtctgtcctgagaacttaccagcagaaatcctcatttctgtgctacggatttaccaaaaattgtcaagtctttttcagtttaacagttcctttacatgtgtagtatttgaggaaaaaatc

SEQ ID NO: 188085 - DNA, 1182 bp, Homo Sapiens
ttggtttgataagaaaattcctgtaaagctgtttcctctgcctctcctctacgttggaaaccacataagtggattatcaagcacaagtaaattaagcctaccgatgttcaccgtgctcaggaaattcaccattccacttaccttacttctggaaaccatcatacttgggaagcagtattcactcaacatcatcctcagtgtctttgccattattctcggggctttcatagcagctgggagctagggaaatacggagtacttttctacaatgcctgcttcatgattatcccaactcttattattagtgtctccactggagacctgcaacaggctactgaattcaaccaatggaagaatgttgtgtttatcctacagtttcttctttcctgttttttggggtttctgctgatgtactccacggttctgtgcagctattacaattcagccctgacgacagcagtggttggagccatcaagaatgtatccgttgcctacattgggatattaatcggtggagactacattttctctttgttaaactttgtagggttaaatatttgcatggcagggggcttgagatattcctttttaacactgagcagccagttaaaacctaaacctgtgggtgaagaaaacatctgtttggatttgaagagctaaagagtctgcagcaggattggagactgacttgtgactgcgggctgggggggcattcccagtaggaatgtgaagccagaggtttcggattcgtgacatccaccccctgggcaagtgagagcatctgcaaaatgcaaagagaactacctcatatgcaggatgagccaatggcagtctcaagaaatgtactcgggcgacaccttacctgtggaaagcaaatcttttcaaaataagccactgggactcggtaggtggagccccagctgctcttctagggacctatggggccttcgtggcatctctgtgctgtgtgctggggaggaggttgatgtaatggtgactcttttctgatcagcaccttggccgtgattcccaaggtcccagccaaagcaaagggccagttgtttcagtttaaacagacatgtctttagtctaataaaattagttaactgccagtaaagttatttgttagctttgatgaaagctatgttggtatctttccctaatcatcaaagtaaataaaaa

SEQ ID NO: 188086 - DNA, 1758 bp, Homo Sapiens
  misc_feature (1364)..(1407): n is a, c, g, or t
ttggcaactttccactatcaaaagtttctgcaaaatatacttctcctataggttgaggtgtcttatattttgcagaaacttttgatagtggaaggttggctggatgggtcttatcaaaagcaaagaaagatgacatggatgaggaaatttcaatatacgatggaagatgggaaattgaagagttgaaagaaaaccaggtacctggtgacagaggactggtattaaaatctagagcaaagcatcatgcaatatctgctgtattagcaaaaccattcatttttgctgataaacccttgatagttcaatatgaagtaaattttcaagatggtattgattgtggaggtgcatacattaaactcctatcagacactgatgatttgattctggaaaacttttatgataaaacatcctatatcattatgtttggaccagataaatgtggagaagattataaacttcattttatcttcagacataaacatcccaaaactggagttttcgaagagaaacatgccaaacctccagatgtagaccttaaaaagttctttacagacaggaagactcatctttatacccttgtgatgaatccagatgacacatttgaggtgttagttgatcaaacagttgtaaacaaaggaagcctcctagaggatgtggttcctcctatcaaacctcccaaagaaattgaagatcccaatgataaaaaacctgaggaatgggatgaaagagcaaaaattcctgatccttctgccatcaaaccagaagactgggatgaaagtgaacctgcccaaatagaagattcaagtgttgttaaacctgctggctggcttgatgatgaaccaaaatttatccctgatcctaatgctgaaaaacctgatgactggaatgaagacacggatggagaatgggaggcacctcagattcttaatccagcatgtcggattgggtgtggtgagtggaaacctcccatgatagataacccaaaatacaaaggagtatggagacctccactggtcgataatcctaactatcagggaatctggagtcctcgaaaaattcctaatccagattatttcgaagatgatcatccatttcttctgacttctttcagtgctcttggtttagagctttggtctatgacctctgatatctactttgataattttattatctgttcggaaaaggaagtagcagatcactgggctgcagatggttggagatggaaaataatgatagcaaatgctaataagcctggtgtattaaaacagttaatggcagctgctgaagggcacccatggctttggttgatttatcttgtgacagcaggagtgccaatagcattaattacttcattttgttggccnnnnnnnnnnnnnnnnnnnnnnnnnnnnnnnnnnnnnnnnnnnnccgacatatgtataccacaaacaaaaggagtactagagcaagaagaaaaggaagagaaagcagccctggaaaaaccaatggacctggaagaggaaaaaaagcaaaatgatggtgaaatgcttgaaaaagaagaggaaagtgaacctgaggaaaagagtgaagaagaaattgaaatcatagaagggcaagaagaaagtaatcaatcaaataagtctgggtcagaggatgagatgaaagaagcagatgagagcaccgatctggagatgggccgataaagtcagtacgcaaaagaagagtacgaaaggactaaactagattgaaatattttaattcccgagagggatgtttggg

SEQ ID NO: 188087 - DNA, 1068 bp, Homo Sapiens
cttttcccctttaagccaactttgtacaaaaaagttggggtaaggtcgggccatggtggggcagaggttgggaagatggcgtggcgaggctgggcgcagagaggctggggctgcggccaggcgtggggtgcgtcggtgggcggccgcagctgcgaggagctcactgcggtcctaaccccgccgcagctcctcggacgcaggtttaacttctttattcaacaaaaatgcggattcagaaaagcacccaggaaggttgaacctcgaagatcagacccagggacaagtggtgaagcatacaagagaagtgctttgattcctcctgtggaagaaacagtcttttatccttctccctatcctataaggagtctcataaaacctttattttttactgttgggtttacaggctgtgcatttggatcagctgctatttggcaatatgaatcactgaaatccagggtccagagttattttgatggtataaaagctgattggttggatagcataagaccacaaaaagaaggagacttcagaaaggagattaacaagtggtggaataacctaagtgatggccagcggactgtgacaggtattatagctgcaaatgtccttgtattctgtttatggagagtaccttctctgcagcggacaatgatcagatatttcacatcgaatccagcctcaaaggtcctttgttctccaatgttgctgtcaacattcagtcacttctccttatttcacatggcagcaaatatgtatgttttgtggagcttctcttccagcatagtgaacattctgggtcaagagcagttcatggcagtgtacctatctgcaggtgttatttccaattttgtcagttacctgggtaaagttgccacaggaagatatggaccatcacttggtgcatctggtgccatcatgacagtcctcgcagctgtctgcactaagatcccagaagggaggcttgccattattttccttccgatgttcacgttcacagcagggaatgccctgaaagccattatcgccatggatacagcaggaatgatcctgggatggaaattttttgat

SEQ ID NO: 188088 - DNA, 1098 bp, Homo Sapiens
  misc_feature (549)..(558): n is a, c, g, or t
ttggctttatttgaactggctaagaaaacaaagtttaatttatgtcgtcataccgtggttacctgcatactcttggttgttatcaacttgttggtgatcttcataccctccatgaaggatatttttggagtcgtaggagttacatctgctaacatgcttattttcattcttccttcatctctttatttaaaaatcacagaccaggatggagataaaggaactcaaagaatttgggctgcccttttcttgggcctgggggtgttgttctccttggtcagcattcccttggtcatctatgactgggcctgctcatcgagtagtgacgaaggccactgaaacccgccgagaaaaagaaacatccctgttgtctgctcagtcaagtccccacacatcagcaatctctcaccacttcttttgcaagtttacagaagcaaacagaaatgtacaggatacttaaaatggaataactttttggttgcaaaacagagacatggttctataatgcttcatgtccctccaagatttgagatcaatttagggattgtgaannnnnnnnnncaaatttcatacaatcatatttcccagtacttttcacaatcattttttacccatctaactctatgttttgtggcttcccggtctcttaaaactttgaaaacatgatatacaataatgtttatttattatacatccagattctgaaataattttcctactgatgttcagctcacactatctgtacctttttagaagagaaaagaatcttgaattgtatatatttattttgctttacagaaaaaaatggtttcgtaaataatttgcctattttggttaacataccacatggaaataatcatctgaaagttatagggcactgccactgctgaatcaaagcatgcccaatatttgagggggctctgatttcctggcacctgaactcgggtagtccagtggcctacctggtaccacatctattcccatccaaaaacattctctggcaagtgttctcacctgaaaagtggttggggatgattcttaccttggtaattaaatgaaccaacacatttgggtaatctagcaaatgaagtattttttccc

SEQ ID NO: 188089 - DNA, 1590 bp, Homo Sapiens
gtacaaagaagaaggactcacagaaaacactggacttccccggaagctacttgaaaaacatgacccctggccggcctatgtcacctatacctctcagacagtgaaaagactcattgagaaaagcaaaactagagaactggaatgcatgcgtgccctcgaggaaagaccctgggcatcaaggcagaataaaccttccagcgtcattcagccgaaaaggaggaagtcttccaagtcttctggcaaagctgtgttcagggacacgctgtcagaatccacgttatcaatgtggggcgcttattcggtattggccatggctcctaccatgatcccagaacccacacacttacatgcggattccagagactgtccaactgaaaactataacaagatcatctttgcccgcaagcctatgatgaggatgctccctacagttcgctactgaccaacaaggagaaacatgcaaatgttttagccaggggtccctgcagccattccccaagaacgtacaaaagttaagctccatttaccactcacttgacagtgtcctttaaatctgaacttgctcttgctcatgcggagcttggctaagagaaaccagatcagaatgcaagctgtaggtgggtgggtgagtgtgtcccctcccacactgctctctggtgggtttgggcagtccctggctctagtctctgctgcagattctcaggaccaaaatgtgggtgatttgtctgggtccaggcaggagacagaaatcacacaagctcttttattagagataatataaagaatgattaaccaggtgacagtaaagggcaggaagggaatacaaaggtatccatggaggtagcaccacaggaagcaggcatcacacttgaggcttgggaacaaggggaagatgctggactcattgaaaggtggttgcttggagaagggacatggggctgaatctcagacttctgaggtgggggagtggggatgccactcaatgcagctggtatctctgagctctgaggagagtcctgtggggatggtgccccctcctctgaataggggagatgttttgttggtgtctctgaggggacccccatgaggctgcttttgtgagtgttggaaaaaccaaaaactgcattgaaatgtttctgggaggagttgccactgcctgggtgaagaaaaagcactgctagggttagcaacctgtctggcagggacaggaagctgatagaaagtgaacaggaagcaaacaggaagtgagcaaggggccacttcctacttcctcctttagcctagcagattccttctagctccccctgggggctgagcctatcagggcacaaagccagaatgtggtttgtagaatcccagccccagcatctccaagcataggatggattttgaagccaagagggaattagctctcggccgggttctgagtgatcccatccagctgctcctggacctggtattgagaggtttttcccttggagggcaaacaaagtggcagtggggaccagggtgtcccctgctgagaaatggagagctcttttcccctgtacttctctggggtttgccttgtggaaccaagtgcttggggga

SEQ ID NO: 188090 - DNA, 1787 bp, Homo Sapiens
actttgtacaaaaaagttggcgagcgtttcgtttggacttctcgacttgagtgcccgcctccttcgccgccgcctctgcagtcctcagcgcagtctttccacaggagccagcatacttcctgaacatggagagtgttgttcgccgctgcccattcttatcccgagtcccccaggcctttctgcagaaagcaggcaaatctctgttgttctatgcccaaaactgccccaagatgatggaagttggggccaagccagcccctcgggcattgtccactgcagcagtacactaccaacagatcaaagaaacccctccggccagtgagaaagacaaaactgctaaggccaaggtccaacagactcctgatggatcccagcagagtccagatggcacacagcttccgtctggacaccccttgcctgccacaagccagggcactgcaagcaaatgccctttcctggcagcacagatgaatcagagaggcagcagtgtcttctgcaaagccagtcttgagcttcaggaggatgtgcaggaaatgaatgccgtgaggaaagaggttgctgaaacctcagcaggccccagtgtggttagtgtgaaaaccgatggaggggatcccagtggactgctgaagaacttccaggacattatgcaaaagcaaagaccagaaagagtgtctcatcttcttcaagataacttgccaaaatctgtttccacttttcagtatgatcgtttctttgagaaaaaaattgatgagaaaaagaatgaccacacctatcgagtttttaaaactgtgaaccggcgagcacacatcttccccatggcagatgactattcagactccctcatcaccaaaaagcaagtgtcagtctggtgcagtaatgactacctaggaatgagtcgccacccacgggtgtgtggggcagttatggacactttgaaacaacatggtgctggggcaggtggtactagaaatatttctggaactagtaaattccatgtggacttagagcgggagctggcagacctccatgggaaagatgccgcactcttgttttcctcgtgctttgtggccaatgactcaaccctcttcaccctggctaagatgatgccaggctgtgagatttactctgattctgggaaccatgcctccatgatccaagggattcgaaacagccgagtgccaaagtacatcttccgccacaatgatgtcagccacctcagagaactgctgcaaagatctgacccctcagtccccaagattgtggcatttgaaactgtccattcaatggatggggcggtgtgcccactggaagagctgtgtgatgtggcccatgagtttggagcaatcaccttcgtggatgaggtccacgcagtggggctttatggggctcgaggcggagggattggggatcgggatggagtcatgccaaaaatggacatcatttctggaacacttggcaaagcctttggttgtgttggagggtacatcgccagcacgagttctctgattgacaccgtacggtcctatgctgctggcttcatcttcaccacctctctgccacccatgctgctggctggagccctggagtctgtgcggatcctgaagagcgctgagggacgggtgcttcgccgccagcaccagcgcaacgtcaaactcatgagacagatgctaatggatgccggcctccctgttgtccactgccccagccacatcaacccagtgcgggttgcagatgctgctaacaacacagaagtctgtgatgaactaatgagcatacataacatctac

SEQ ID NO: 188091 - DNA, 1182 bp, Homo Sapiens
ggaaatttttttaaaaaaattaagatttccaatttatttaacatcctccaacacattctaaagaaactaagtagcttgcaggagggttcctacttgttatctcatgcagcagaagattcttcactcctgatttataaggcctctgatggaaaagttactaggacagcatacaatttgtataaaacacattgcggccttcctggtgtaccttccagtctctcagttccctgggtcccattagatcccagcctgttattaccatatcatatccatcatggaagaataccttgtacttttccaccgaaatcactggataccacaacacaacaaaagattggtggaacgagaatgcctacacgcagccacaggaatccagtttccatggaaaccaaaagcagttgcttgcctgctcagcaagttgaaactgaaggagtggctccacataaaagaaaaataacttgaggactgtaccatggaaaactaaatttaaaaaaccagttataacagtgtttaatttagataagtttgagggaaaataatcagtaggcaagaggaacatttttcctgtagtagctagagtgccttgaaaaaatgtgttggctatgtgaaggaatatttcaactaaaatggaatggtatgcttttcacccttaaagtttgaggaggatcttgatatgttttaacattatcatggcagggaaatatataaagaagaaaaatatttttacattaaaccttttctaaaaattgtaaatagaaaaataatttggttttttatcaagaacaacacttatcgttatgtattgtgttagttatattgccagtctgttgcgactgactcaaaaagttaaatgttgccactgctgaagatgattatgagcatcgcaaactttgtttctgacccattttgacagtttttatatactcctttaaaatgatgaatgttacaggttaataaagttaatacctttaaaaacttggtgaaattccattacagaagccaaaaataaaaactctctgcctctgaaaagtcagattactgacttcctgtttggcaaccatcagtttgtttaataaaagaaaaaatttggtggtataacatgtttgatgacagatgcctctatctctagattcaagctgagtgttgaaatacactgctgaagcaaagagataggtatgtttt

SEQ ID NO: 188092 - DNA, 1292 bp, Homo Sapiens
ccccctttgtacaaaaaagttgggtcgctgaacacaaaacgatggtagttctggaggcctcgctccggggccgacccgaggccacagtgcctccgcggtagaccggacttgggtgacgggctccgggctcccgagggatggaagggtctaagacgtccaacaacagcaccatgcaggtgagcttcgtgtgccagcgctgcagccagcccctgaaactggacacgagtttcaagatcctggaccgtgtcaccatccaggaactcacagctccattacttaccacagcccaggcgaaaccaggagagacccaggaggaagagactaactcaggagaggagccatttattgaaactcctcgccaggatggtgtctctcgcagattcatccccccagccaggatgatgtccacagaaagtgccaacagcttcactctgattggggaggcatctgatggcggcaccatggagaacctcagccgaagactgaaggtcactggggacctttttgacatcatgtcgggccagacagatgtggatcacccactctgtgaggaatgcacagatactcttttagaccagctggacactcagctcaacgtcactgaaaatgagtgtcagaactacaaacgctgtttggagatcttagagcaaatgaatgaggatgacagtgaacagttacagatggagctaaaggagctggcactagaggaggagaggctgatccaggagctggaagacgtggaaaagaaccgcaagatagtggcagaaaatctcgagaaggtccaggctgaggctgagagactggatcaggaggaagctcagtatcagagagaatacagtgaatttaaacgacagcagctggagctggatgatgagctgaagagtgttgaaaaccagatgcgttatgcccagacgcagctggataagctgaagaaaaccaacgtctttaatgcaaccttccacatctggcacagtggacagtttggcacaatcaataacttcaggctgggtcgcctgcccagtgttcccgtggaatggaatgagattaatgctgcttggggccagactgtgttgctgctccatgctctggccaataagatgggtctgaaatttcagagataccgacttgttccttacggaaaccattcatatctggagtctctgacagacaaatctaaagagctgccgttatactgttctggggggttgcggtttttctgggacaacaagtttgaccatgcaatgggtggctttcctggactgtgtgcagcagttcaaagaagaggttgagaa

SEQ ID NO: 188093 - DNA, 1248 bp, Homo Sapiens
ttgggtctctgcatgagggacccacgaaccagctggatctgctcatccgggccgtggaagcatcagttcacagcagtaatgcacactgtacagataagacaattgaagctgctgaagccctgcttcatatggaatctcctacctgcttgagggattcaagaagtcctgtggaagtgtttgttcctccttgtgtatcaactccagaattcatccatgctgctatgaggccagatgtcattacagaaactgtagtggaggtgtcaactgaagagtctgaacccatggatacctctcctattccaacatcaccagatagccatgaaccaatgaaaaagaaaaaagttggccgtaaaccaaagacccagcaatcaccaatttccaatgggtctcctgagttaggtataaagaagaaaccaagagaaggaaaaggaaacacaacctatttgtgggagtttcttttagatctacttcaagataaaaatacttgtcccaggtatattaaatggactcagagagaaaaaggcatattcaagctggtggattcaaaggctgtctctaagctttggggaaagcataagaacaaaccagacatgaactatgaaaccatgggacgagctttgagatactactaccaaaggggaattcttgcaaaggttgaaggacagaggcttgtatatcagttcaaggatatgccgaaaaacatagtggtcatagatgatgacaaaagtgaaacctgtaatgaagatttagcaggaactactgatgaaaaatcattagaacgagtgtcactgtctgcagaaagtctcctgaaagcagcatcctctgttcgcagtggaaaaaattcatcccctataaactgctccagagcagagaagggtgtagctagagttgtgaatatcacttcccctgggcacgatgcttcatccaggtctcctactaccactgcatctgtgtcagcaacagcagctccaaggacagttcgtgtggcaatgcaggtacctgttgtaatgacatcattgggtcagaaaatttcaactgtggcagttcagtcagttaatgcaggtgcaccattaataaccagcactagtccaacaacagcgacctctccaaaggtagtcattcagacaatccctactgtgatgccagcttctactgaaaatggagacaaaatcaccatgcagcctgccaaaattattaccatcccagctacacagcttgcacagtgtcaactgcagacaaagtcaaatc

SEQ ID NO: 188094 - DNA, 1829 bp, Homo Sapiens
  misc_feature (1438)..(1446): n is a, c, g, or t
ccatttattgatgttgctcatttatttggaacgtttttagtttttctcagaaattgtcccattgcattagcacttactgtgttttcaggttgatatctaccaaaggacacaaattgaatggtagactgtaaaactggtataaacagaatgcagtttcccgaccatcagaacccaaatattaagaagcatataggaatccatctatgcatgaaacatgtaaaaaatatgttggttagtttaattaaaaatcttattgtgggtccagtgagaccatctcatccaaaagattttttttcccccaatgatgtttgctttagaagcaagatagaaaggaaaaaaagtattaggtagatatgtatagtagggacagagggaaatctttcttctttcctttctgaaagtaatacttcttgttacacattttatttattgagtttgttctaaataaaatattataaacttcagacttgaaaaaattccacttaactttaaagttacaatgtttgtatttgggattttaaatgcctttgagattaaaatgtagaattgcaggacccaaaaacttttaaaataattaaaattttaaaagagcacatgttgtgttttttgggcttgctattaatgcaaactctgattgcaaatggatgtcatgtttcataccttttttatcaggaaaaaagcagcaagccttcaggtgttccagtgatgcctgacacaattgagctggactttatgctgctctttacagtaagaggtgttgcattgtatgtggggactatgtgcactggcgtctaagacagtgacctcaacaatattagctttgcacaaaccatagagaacgatgttggatggttacataatcagttataacattctggcagctaaattgctacaagagctttttcttgcaaaagcttaaaatacaagatttttaataatttactcagaacagtataacttctgacacacacaaatgcttgcctctttattcatatgttcgttacctactctgtacatgtatctgtcatttagctgtttctcaagatgatgttcagcagttggctgcttagaaatctttttcaagccagtttctaaagacatttgtttaatgttctaccatagaataatgcacaccattgtcaaagatttgattattgtgttttatagtaagtccatttgacatttatttccctttcagtttattttccttccttattttgttatacatacccttccctttctcccctgcctttcgtacattcattcctcttcctctaccctccagcacatctacttactggtgctgtgctgtgtgtcagaagataaaacaggtgtattattgtataatgaattttgtatacatgtttatgaaatggtgagatcaactaaaggaggcatgttcataacagtgtttattatcagcagctatgtcccaggnnnnnnnnntgggaggggcaaatggctacagttgtaaatggataacatcatttagaaagccgaatttactgttcatctgagcggttacctggagtattatatctatgcactggtgagcatctcctgattccacttacttttctccctgtgaacagtttaccggtgccatgctgaagagaaagacatctaagtgataacatgaatgaagtcttaaaatttaaagtatttttactgctatataaactaaagactacattgtgcatattttgttaacactgtctcttgttatgataaacactgaaatagcatgttaaacagttgcctatactttaatataatcagttggggaaactgaccttttctcccccactgtatgattgtttcctggaagg

SEQ ID NO: 188095 - DNA, 1199 bp, Homo Sapiens
ttggctttgttttctgacacataagaggtgtgttctgctccctgtaaagacaagggtgggtatccagatggtcccatgagtagggctgcacaagatgctggaggcttggtaagttcctctgggtcgcagatcggtttctcgggtcgggatagtgtgagtgcctagcacagtgtcgggcacgcagaagggccccttaaaagtttctctttcatctggccagttttagatacacaattttgtcagtttacttacagtgcatactcttgggtagtacttgtgctgaccaagtatcttagaggcttattttattatagtagccaacatttatccagcacttaccttatataaagggctgtttgtgcatgagctcattaaaatcgtgacagcagaccaatgagtgagaaactgccccattttgaaggtgaggaaattgaggttctgggtataactttctttggtcacataatattaaattttacaatttgagccttgagcaatacacaaaaccaccacaaaattagatttatagactcaaaatgaaaacatcagcttactggtttgtagttcataccagtcatacattccaaaacatgttttgagtcttactctgtgcctgaccttgtgcttgataacagggatataatgggaagcaacactccagtggtcagatgctcacagtcttatggaggagcccaaataatatctggggaagttaaagtccatataatgactgataagagtacaatacaggtgccatgggaacacgtgacatcactgaagactgcctggaaggggccgcgcgtgtgttcatgcctatacgataaacatgatacataatgaaaatgcttatctttaggagaaaggagagcctagagtagcaggatcaaggatgaaagctggacttcaaatatgccttgttagtgtaaatgtgactgtggaactgtatgagtattttaagattatggagtaaagtaagttttaaaaagcagtccctaatcatcaaaagtaaaaaactcttgatgtagtcatataaccacactaagaactcttccaggtgacttcaaaacatagggacagtacatctctagtagaatatgccctgagaatgaaaagaatgtaacagtgttagtattttgaataaacatgttattactagactgttgcttttattttggagatgggtgtgtgtgtatgggggg

SEQ ID NO: 188096 - DNA, 1515 bp, Homo Sapiens
  misc_feature (1180)..(1213): n is a, c, g, or t
  misc_feature (1255)..(1263): n is a, c, g, or t
  misc_feature (1339)..(1389): n is a, c, g, or t
ttgggagtgtcttgaggagctgctgatggtgagaccattctaaaaggcctccagtccattttccaggagcaggggatggcggagtcggtgcacacctggcaggaccatggctatttagcaacctacacaaacaagaacggcagctttgccaatttgagaatttacccacatggattggtgttgctggaccttcagagttatgatggtgatgcgcaaggcaaagaagagatcgacagtattttgaacaaagtagaggaaagaatgaaagaattgagtcaggacagtactgggcgggtgaaacgattaccacccatagtgcgaggaggagccatcgacagatactggcccaccgccgacgggcgcctggttgaatatgacatagatgaagtggtatatgacgaagattcaccttatcaaaatataaaaattctacactcgaagcagtttggaaatattctcatccttagtggggatgttaatttggcagagagtgatttggcatatacccgggccatcatgggcagtggcaaagaagattacactggcaaagatgtactcattctgggaggtggagacggaggcatattgtgtgaaatagtcaaactaaaaccaaagatggtcactatggtagagattgaccaaatggtgattgatgggtgtaagaaatacatgcgaaaaacgtgtggcgatgtcttagacaatcttaaaggagactgctatcaggttctaatagaagactgtatcccggtactgaagaggtacgccaaagaagggagagaatttgattatgtgattaatgatttgacagctgttccaatctccacgtctccagaagaagattccacatgggagtttctcagactgattcttgacctctcaatgaaagtgttgaaacaggatgggaaatattttacacaggggaactgtgtcaatctgacagaagcactgtcgctctatgaagaacagctggggcgcctgtattgtcctgtggaattttcaaaggagatcgtctgtgtcccttcatacttggaattgtgggtattttacactgtttggaagaaagctaaaccctgaagatcagtagcccctaatcacatgtgctgcaaatagccttcctgacctccatatgctgtacatgacatcaaaatgagtcaggcaattgattgtgaattccttaaannnnnnnnnnnnnnnnnnnnnnnnnnnnnnnnnnaaaagcaaatggaaaatgtatattttgatgagcttagggtgnnnnnnnnngaaagtcagctgaaggatggttagacagcacagcgaagactgctaaatgcactgaccccccccattagaatgtgannnnnnnnnnnnnnnnnnnnnnnnnnnnnnnnnnnnnnnnnnnnnnnnnnngtagatcttcaatttggatatttggaggagtgaacatcgttgttttgctggagggaagatcttgatggtgtttctttccccaaaaattgacttagatattaaaatttggtgcttataagagagagt

SEQ ID NO: 188097 - DNA, 1837 bp, Homo Sapiens
ttgggtttctgcacgcctacccgctcattcaggaagccagcctcgccagccagggagccttttctcaccctgaccaagttttcccactggcttcttcattgtatggcattcagattgcagatcatcagttgagacaagccaccaagattgcttcagcacctgaaaaactcgggcgagatccacggccacagacctccaggataagccaggagcaggtccctgaggcctcacagctctcccagctgacttcaaatctggcccaggtgaatcggacaaatatgactccctcagaccccctgcagacctcgctgtctccagaacttgtttccactcctgttcctccccctcctcccggggaggagaccaatctggaagcatcttcctccgatgagcagcctgcgtccctcacaatagcccacgtcaagccaagcatcatgaagaggaatgggagctttccaaagtactatgcctgccacctgtgtggacggcgcttcactctccggagcagcttacgtgaacacctccagatccacacaggagtacctttcacatctagccaacagggagaaagtcgcgtccccctgactctctgtagcaatgcagctgacctcgggaaagatgccatggaagtgcctgaagccgggatgataagtgacagtgagctgcagcacatctctgattctcccatcatcgatgggcagcagcagtcggaaaccccacccccctcagacattgctgacattgacaacctggagcaggccgaccaggagagggaggtgaagaggcggaagtacgagtgcacaatatgtggacgcaaatttatccagaaaagccactggagggaacacatgtacatacacaccgggaagcctttcaagtgcagcacttgtgacaaaagcttttgcagggccaaccaggctgcccgccacgtgtgcctcaaccagagcatcgacacttacaccatggtggacaaacagactctggaactctgcacatttgaagaagggagtcagatggacaacatgctggtgcaaacaaacaaaccctacaaatgcaacttgtgtgacaaaacattctccactcccaatgaggttgttaaacattcatgccaaaaccagaactcggatgtttttgccctagacgaagggcgatccattctcctgggcagtggggactcggaagtaacggagcctgaccacccagtgttagcttccatcaaaaaggaacaagaaaccgtcttactagactgaatgtcacttatctttttaaaaaactctcatttttacaaagactatcttccctcccttccctgaattcagaactgtagttctccatggcatgatacaaacaggtccttgttctcttctcctcttccccttttccacatcccagccccacctctgtaaaggctttgtgcattataaacctggaatgtatcgactttctttcaggggatattggaaagataatggtcattatacttataaactcaaattttgagaggttttagattattcagaagcatacttggaactaatgaagggtatataataaaacaactggaatccaatttggtaagctaaaattatgactttccctgggtaaaaagtcttctcagaaaaacaatgtcagaaaataacagcgtgctgcttagaaatacggctgggctctgtactatgcaaaatctagaaagtgtggggaaactttaaacccaagaaaacgttcttagtattcatcctccaggtgtcttacttcagaatgcatcctttgagattatgtccacttaagagaaatcatcagttaagaaatctactttaacaaacaaaaaggagaaaaa

SEQ ID NO: 188098 - DNA, 1846 bp, Homo Sapiens
ttggcgacggagcaccggcggcggcagggcgagagcattaaatgaaagcaaaagagttaataatggcaacacggctccagaagactcttcccctgccaagaaaactcgtagatgccagagacaggagtcgaaaaagatgcctgtggctggaggaaaagctaataaggacaggacagaagacaagcaagatggtatgccaggaaggtcatgggccagcaaaagggtctctgaatctgtgaaggccttgctgttaaagggcaaagctcctgtggacccagagtgtacagccaaggtggggaaggctcatgtgtattgtgaaggaaatgatgtctatgatgtcatgctaaatcagaccaatctccagttcaacaacaacaagtactatctgattcagctattagaagatgatgcccagaggaacttcagtgtttggatgagatggggccgagttgggaaaatgggacagcacagcctggtggcttgttcaggcaatctcaacaaggccaaggaaatctttcagaagaaattccttgacaaaacgaaaaacaattgggaagatcgagaaaagtttgagaaggtgcctggaaaatatgatatgctacagatggctatgccaccaatactcaggatgaagaggaaacaaagaaagaggaatctcttaaatctcccttgaagccagagtcacagctagatcttcgggtacaggagttaataaagttgatctgtaatgttcaggccatggaagaaatgatgatggaaatgaagtataataccaagaaagccccacttgggaagctgacagtggcacaaatcaaggcaggttaccagtctcttaagaagattgaggattgtattcgggctggccagcatggacgagctctcatggaagcatgcaatgaattctacaccaggattccgcatgactttggactccgtactcctccactaatccggacacagaaggaactgtcagaaaaaatacaattactagaggctttgggagacattgaaattgctattaagctggtgaaaacagagctacaaagcccagaacacccattggaccaacactatagaaacctacattgtgccttgcgcccccttgaccatgaaagttacgagttcaaagtgatttcccagtacctacaatctacccatgctcccacacacagcgactataccatgaccttgctggatttgtttgaagtggagaaggatggtgagaaagaagccttcagagaggaccttcataacaggatgcttctatggcatggttccaggatgagtaactgggtgggaatcttgagccatgggcttcgaattgccccacctgaagctcccatcacaggttacatgtttgggaaaggaatctactttgctgacatgtcttccaagagtgccaattactgctttgcctctcgcctaaagaatacaggactgctgctcttatcagaggtagctctaggtcagtgtaatgaactactagaggccaatcctaaggccgaaggattgcttcaaggtaaacatagcaccaaggggctgggcaagatggctcccagttctgcccacttcgtcaccctgaatgggagtacagtgccattaggaccagcaagtgacacaggaattctgaatccagatggttataccctcaactacaatgaatatattgtatataaccccaaccaggtccgtatgcggtaccttttaaaggttcagtttaatttccttcagctgtggtgaatgttgatcttaaataaaccagagatctgatcttcaagcaagaaaataagcagtgttgtacttgtgaattttgtgatattttatgtaataaaaactgtacaggtct

SEQ ID NO: 188099 - DNA, 2720 bp, Homo Sapiens
ttggaaatatatttctgaagtagcactggctctagactaccttcacagacatggaatcatccacagggacttgaaaccggacaatatgcttatttctaatgagggtcatattaaactgacggattttggcctttcaaaagttactttgaatagagatattaatatgatggatatccttacaacaccatcaatggcaaaacctagacaagattattcaagaaccccaggacaagtgttatcgcttatcagctcgttgggatttaacacaccaattgcagaaaaaaatcaagaccctgcaaacatcctttcagcctgtctgtctgaaacatcacagctttctcaaggactcgtatgccctatgtctgtagatcaaaaggacactacgccttattctagcaaattactaaaatcatgtcttgaaacagttgcctccaacccaggaatgcctgtgaagtgtctaacttctaatttactccagtctaggaaaaggctggccacatccagtgccagtagtcaatcccacaccttcatatccagtgtggaatcagaatgccacagcagtcccaaatgggaaaaagattgccaggaaagtgatgaagcattgggcccaacaatgatgagttggaatgcagttgaaaagttatgcgcaaaatctgcaaatgccattgagacgaaaggtttcaataaaaaggatctggagttagctctttctcccattcataacagcagtgcccttcccaccactggacgctcttgtgtaaaccttgctaaaaaatgcttctctggggaagtttcttgggaagcagtagaactggatgtaaataatataaatatggacactgacacaagtcagttaggtttccatcagtcaaatcagtgggctgtggattctggtgggatatctgaagagcaccttgggaaaagaagtttaaaaagaaattttgagttggttgactccagtccttgtaaaaaaattatacagaataaaaaaacttgtgtagagtataagcataacgaaatgacaaattgttatacaaatcaaaatacaggcttaacagttgaagtgcaggaccttaagctatcagtgcacaaaagtcaacaaaatgactgtgctaataaggagaacattgtcaattcttttactgataaacaacaaacaccagaaaaattacctataccaatgatagcaaaaaaccttatgtgtgaactcgatgaagactgtgaaaagaatagtaagagggactacttaagttctagttttctctgatgatgatagagcttctaaaaatatttctatgaactctgattcatcttttcctggaatttctataatggaaagtccattagaaagtcagcccttagattcagatagaagcattaaagaatcctcttttgaagaatcaaatattgaagatccacttattgtaacaccagattgccaagaaaagacctcaccaaaaggtgtcgagaaccctgctgtacaagagagtaaccaaaaaatgttaggtcctcctttggaggtgctgaaaacgttagcctctaaaagaaatgctgttgcttttcgaagttttaacagtcatattaatgcatccaataactcagaaccatccagaatgaacatgacttctttagatgcaatggatatttcgtgtgcctacagtggttcatatcccatggctataacccctactcaaaaaagaagatcctgtatgccacatcagaccccaaatcagatcaagtcgggaactccataccgaactccgaagagtgtgagaagaggggtggcccccgttgatgatgggcgaattctaggaaccccagactaccttgcacctgagctgttactaggcagggcccatggtcctgcggtagactggtgggcacttggagtttgcttgtttgaatttctaacaggaattccccctttcaatgatgaaacaccacaacaagtattccagaatattctgaaaagagatatcccttggccagaaggtgaagaaaagttatctgataatgctcaaagtgcagtagaaatacttttaaccattgatgatacaaagagagctggaatgaaagagctaaaacgtcatcctctcttcagtgatgtggactgggaaaatctgcagcatcagactatgcctttcatcccccagccagatgatgaaacagatacctcctattttgaagccaggaatactgctcagcacctgaccgtatctggatttagtctgtagcacaaaaattttccttttagtctagcctcgtgttatagaatgaacttgcataattatatactccttaatactagattgatctaaggggggaaagatcattatttaacctagttcaatgtgctttttaatgtacgttacagctttcacagagttaaaaggctgaaagggaatatagtcagtaatttatcttaacctcaaaactgtatataaatcttcaaagcttttttcatctatttattttgtttattgcactttatgaaaactgaagcatcaataaaattagaggacactattgagagtgagccactagcttgattttctttctcctctgatttcagttcactgttcagtttagcattaaaataataaaataatcatacagttccatttgattgtaatttacttgcatatgattaccttcaaaagctgtgttcttgagggcaatcatttaaggccatacttgtgacctcagaaatgcagctggaa

SEQ ID NO: 188100 - DNA, 1339 bp, Homo Sapiens
ttgggacaagtgagggtggtaaatgtaggagaaagagccttggccttaaggaaatctttactcctgtaagcaagagccaacctcacaggattaggagctggggtagaactggctatccttggggaagaggcaagccctgcctctggccgtgtccacctttcaggagactttgagtggcaggtttggacttggactagatgactctcaaaggcccttttagttctgagattccagaaatctgctgcatttcacatggtacctggaacccaacagttcatggatatccactgatatccatgatgctgggtgccccagcgcacacgggatggagaggtgagaactaatgcctagcttgaggggtctgcagtccagtagggcaggcagtcaggtccatgtgcactgcaatgccaggtggagaaatcacagagaggtaaaatggaggccagtgccatttcagaggggaggctcaggaaggcttcttgcttacaggaatgaaggctgggggcattttgctggggggagatgaggcagcctctggaatggctcagggattcagccctccctgccgctgcctgctgaagctggtgactacggggtcgccctttgctcacgtctctctggcccactcatgatggagaagtgtggtcagaggggagcaatgggctttgctgcttatgagcacagaggaattcagtccccaggcagccctgcctctgactccaagagggtgaagtccacagaagtgagctcctgccttagggcctcatttgctcttcatccagggaactgagcacagggggcctccaggagaccctagatgtgctcgtactccctcggcctgggatttcaaagctggaaatatagaaaatatctagcccaaagccttcattttaacagatggggaaagtgagcccccaagatgggaaagaaccacacagctaagggagggcctggggagccccaccctagcccttgctgccacaccacattgcctcaacaaccggccccagagtgcccaggcactcctgaggtagcttctggaaatggggacaagtcccctcgaaggaaaggaaatgactagagtagaatgacagctagcagatctcttccctcctgctcccagcgcacacaaacccgccctccccttggtgttggcggtccctgtggccttcactttgttcactacctgtcagcccagcctgggtgcacagtagctgcaactcccccattggtgctacctggctctcctgtctctgcagctctacaggtgaggcccagcaaagggagtagggctcgccatgtttctggtgagccaatttggctgatcttgggtgtctga

SEQ ID NO: 188101 - DNA, 949 bp, Homo Sapiens
  misc_feature (757)..(794): n is a, c, g, or t
tacaaaaaagttgggggggtcggcagtgtgaggagctgctatggtgctgagtttcctggtagagccggccgagctgaggcggtcgcggccatgaaggcgggtgccacgtctatgtgggcttcgtgctgtgggctgctgaatgaagtcatgggaactggagctgtcaggggccagcagtcagcatttgcaggagccaccggtccattcagatttacaccaaaccctgagttttccacctacccaccagcagctacggaagggcccaacatagtttgtaaagcctgtgggctttcattttcagtctttagaaagaagcatgtttgctgtgactgcaagaaggatttttgctccgtttgttcagtcttacaagaaaatctccgtagatgttctacttgtcacttattacaagagacagcatttcagcgccctcagttaatgcgactgaaggtgaaggacctgcggcagtatctcattctgagaaatatacccatagatacttgtcgtgagaaagaagacttggtggatctagtactgtgccatcatggactaggctctgaggacgacatggacacaagcagtctgaattcttcaaggtcccagacttctagcttttttacacgttcgtttttttcaaactatacagccccctctgctactatgtcttcgtttcagggagagcttatggatggagaccaaacatccagatctggagtgccggcacaggtacaaagtgaaatcacttcagcaaacacagaannnnnnnnnnnnnnnnnnnnnnnnnnnnnnnnnnnnnnagaagaaaacgcagaggatcggaaccccgggctctccaaggagagagtgagagcttcactgtctgacttgtcaagccttgatgatgtggaagaatgagcgtgcgccagctgaaggaaattctggctcggaattttgtcaactattctggctgttg

SEQ ID NO: 188102 - DNA, 1994 bp, Homo Sapiens
  misc_feature (1529)..(1538): n is a, c, g, or t
ttgggttccctcaattcttttccttttccttggcctaaagcaggtctgtgctactagacaactggtaaaccgggaagatcgttcaaaagcagagaaagctgatatggaagaaaatgaggagatttcaagtgatgaagaggagacaaatgtaactgctcaagcaatgcagtcaaataatggaagaggtgaagatgaggaggaggaagatgatgactgggatgaagaagtattggaagaaaccgcgcttgaggggttcagtactccacttgaccttgacaatagtgtggatgaatatcagttttttacacaagctctgataactgtgcagagtcgagatgcagcctggtaccagctgctgatggcaccactcagcgaggatcagaggacagcactgcaggaggtgtacacactggcagagcaccgacggacggtggcagaggcaaagaagaagattgaacaacagggaggcttcacctttgaaaacaaaggagtcctctccgcatttaattttgggactgtgcccagcaacaactgaaggaaagaacatcagctgaccaaatgtcatcgctgcattttatttcacaagaggagtgtgagggtcaaggggatgaaatgaggggctgcttttagggccctcctgctgtgccagttaccatctggcattaggcagcacttttatctactctttcccctttgacctttgtcaccctgaaatatatattttaaacagctactgtaagtatgaaatgaaagaaaaacaatcattggacggaaaaggacaacccatatgttccaaaggctgaatgcccaaggttgttttagaggattggatagacttgcacgtctcaggtttttgccatgcagaatcaatggatttatgcggataacagtgccttctgttgtacatgaattatcagaaaaaaatttttggagtgcattgcaattttttttaaagcataaaacatatttctagatacaacataaaccttggttatatgtcaactattctgcattttactctgtgaatttattgttaggcagttactgcaagtcactctggtttcaaaatcttcacggctccctctgctcaccctgctgctggggggcttttttcaggggttgtattataaaatatgcactggctgtggtttttcataagatgttttgtggctttttaaagaagtgtcttactccctcttctctcatttttttctgccttgaaaaggggtggtatttcttttggggtcaacaaatacacatatcagtttcactcctaaccttgtaagttcaggactcattttcttggcagcaagtggcaggggctctttagtcactggagttaacagtaagtctgagtatattctgaataatgtaattatgcaattaattgataatcatacctaaagcacattgaacttctaagagacaggtgctacgtaagcacactgtctttctggatggggacttgtattttaaataacttatcattccagctatgttggactagggtccaaagcattttataatannnnnnnnnnaatctaggaaaaagacccaaacaaatctaacttcttgctttctcacctatttgaattttctcctacctaatttgtttgtgtctttattatagctcagtttgacttctcaaacttttcaagggttggggcagctgcacttttaggtggcctataggaaatattgcatatggagattacagtgtttttctgacctggttcaagaccagaacatgggtcatagggtttttattcagcaaaatgaaaacgtatcttcagaacttaacatattactggatgtgatacagattttgctttctgtgaaattgaaaaattcacaaaaattcacagcttaaatttcccatcagtgactggaggaatttttttcaggtgcttcctatattaccatccctcgtgcatatcaactctttagaattttaggttaagtgatgtctataaaagtaacctggaaaaccatga

SEQ ID NO: 188103 - DNA, 1452 bp, Homo Sapiens
ccccaggagtcaaaacccatcatgatctagcttgctgaagccagggagaacacacccagagaaccttgggagtatctgattagggaaaatcaggagggccattttatagaagaagggtttgtactggatgaatttgaggaagaattaggaagcagtggccccttctggatcggatgctgccaaaaagcagctgggtgaattgttctgtcatctttattgaaggtgggagaaatgaaattgagctaggatgttgttggttggagagcggtcattaaggagagattcatcatccatttgcagacgatggcctgcgagaaatagcatgtaggattcgctgggctcctccttggctcctggaagcgttgtgtggagggaggaatggcgccctctgcctgttcacctccacatcgaatgtactcatccagatgcggcctctgtgatttgctttattgaaaacagtcaggaattttgatgtttttgtggtgggctttatgatgtttttttcaaaacctcaaagatgtttcacaactttttatctgttttcctacagaaatattgctgacactgctgaagccagttgcttcttcagctgaccgggctcacttgctcaaaacacttccagtctggagagctgtgtctatttgtttcaacccaactgacctgccagccggttctgctagagcagacaggcctggccctggttcccagggtggcgtccactcggctgtggcaggaggagctgcctcttctcttgacagtctgaagctcgcatccagacagtcgctcagtctgttcactgcattcaccttagtgcaacttagatctctcctgcaaaagtaaatgttgacaggcaaatttcatacccatgtcagattgaatgtatttaaatgtatgtatttaaggagaaccatgctcttgttctgttcctgttcggttccagacactggtttcttgctttgttttccctggctaacagtctagtgcaaaagattaagattttatctgggggaaagaaaagaattttttaaaaaattaaactaaagatgttttaagctaaagcctgaatttgggatggaagcaggacagacaccgtggacagcgctgtatttacagacacacccagtgcgtgaagaccaacaaagtcacagtcgtatctctagaaagctctaaagaccatgttggaaagagtctccagttactgaacagatgaaaaggagcctgtgagagggctgttaacattagcaaatattttttccttgttttttctttgttaaaaccaaactggttcacctgaatcatgaattgagaagaaataattttcatttctaaattaagtcccttttagtttgatcagacagcttgaatcagcatctcttcttccctgtcagcctgactcttcccttcccctctctcattccccatactccctattttcattccttttttaaaaaa

SEQ ID NO: 188104 - DNA, 1529 bp, Homo Sapiens
  misc_feature (809)..(825): n is a, c, g, or t
catttagtaagcgaatatattataatatgtatagagcgcctttttgtgtaagtcactggtcagaatccttatgggtttagtgcactatgtctactgaaatttccctttgggagttttcagaagatggcaggtgccgcttcttctatgctctaaaacagatgtgagctgcatgctatttatataactgtcacacaggagtaatgagtgaggcaaattctcaatgctggagtttgtacagctgaggtgaaacatttcacactttaaagtaggaagaggttaatataacattactgtcacaatttaacttttctttgtattaccataatagatgtttcctttaaaaacaaagagagagtttatgaggcaataattatacacattgaggatttacttgagcctcattactcaagatcccactacagataaagaaacaatgttgggaactgataaacatctgaacttatgaaaataacagaaaataaaatcatggaaacttatacgactatgataaatgacagataatgaatatttctctcttatactgaaggcactgctaatacacaaatatcctgctaacatttaaactctgaaatcagcagttagtgaaaggagtccatttagtttaataccagcattttaaaaaacaagtaagactactttaagagtcatggcagagtttccaatgagttacatgaaaatcagatataacaagctgctccatataaagattgtggttcctacttttaaaaaagtatgctataacttacttccttaaaaatataagcatatcacaaaaactaaagaataannnnnnnnnnnnnnnnnaacataggccctgctgagaaatcgtcataaattctaaaataatttcaacagttacagcttgaaccacacattcacatatgacatgcaaagagagaatcccagcatcattgaacagttcagcataaagctaaaaatatagaatcagaatgaaataggcagtaaataatgtatgtcacaaactgatgactgtgcctcctatattgtagcacaccttggaacttaaacaacaattagaatttcttcagtcccaagaagcactacataccgaccaactatgaagctctcataaaatgtcaggtaagcaaataaaaagctatacaaaataatacagtttattaattaacatgactaatatttcatattttattttgttagaagattaatttgtaatcattgtaccctgtagattttgaaacaattttactagaaattactaatgctggttcttgagtaacctaaaaaattgtatttactcaaatttagaatgctatttatagttctaagcagttagatgaaatattctgattattctaaagttgctttggtacaaaatttagaataaagcaaaactggcagcaccacaacaaatgtgatcctttcacagcaggtctaaagaccctcagaggcaacaaagcataagttaaaacacacataaataagagccattctcctgacaattttcttacatcattaaaaagagccaa

SEQ ID NO: 188105 - DNA, 844 bp, Homo Sapiens
  misc_feature (212)..(234): n is a, c, g, or t
  misc_feature (585)..(666): n is a, c, g, or t
ttggctatcttattcagccctaccatcttgccagctctgtctttccagctgtctgtcgctaaaacgtggcctatagcttcccttccggaaagcttgctttgaaaaacttaaaaagcccccgtttacatgtaggcaggactgtgataacagtgcaagctctgtgttgacaagagttgtggacaaaaagccaaaataaatattcttcctgattnnnnnnnnnnnnnnnnnnnnnnncaaggccagccccaaccttccaaacctccatcaccaacaacccaaactggatgtcaagcaaaatgcacaattcctacagaagaggcaagacacagtcaccaatgatatctcgccaaagaaaccacgcccacaccaatgccgacacaaaactgtgtttactgaaagccgaaaacagtattaaaaaaagtgtgtaagtaaagtgttatggtagggttcttcagatgtaatattttactggtactatttatttataaataggaattctaattaagtaataacatgaaatgaaacccagcataggagctggccaagagcttttaattttattgatactcaaaaccaagtttgtgnnnnnnnnnnnnnnnnnnnnnnnnnnnnnnnnnnnnnnnnnnnnnnnnnnnnnnnnnnnnnnnnnnnnnnnnnnnnnnnnnnataaacagaccctaataaagagaacagggtaagatgtgaggctgagtgtgtttaagtacgtgagagagtgtgagtgtgtttgtaagtgagtgtccctatgcgattatgtctctttacgttgctaatggggggagggtgaggattaagtactcgtgccttatatttgtgtgccaattaa

SEQ ID NO: 188106 - DNA, 1548 bp, Homo Sapiens
ttggatcaaacacagaccacctgttgggaccatcctaaaatgaccgaactctttcaatcccttgctgacctgaataatgtacgtttttctgcctaccgtacagcaatcaaaatccgaagactacaaaaagcactatgtttggatctcttagagttgagtacaacaaatgaaattttcaaacagcacaagttgaaccaaaatgaccagctcctcagtgttccagatgtcatcaactgtctgacaacaacttatgatggacttgagcaaatgcataaggacctggtcaacgttccactctgtgttgatatgtgtctcaattggttgctcaatgtctatgacacgggtcgaactggaaaaattagagtgcagagtctgaagattggattaatgtctctctccaaaggtctcttggaagaaaaatacagatatctctttaaggaagttgcagggccaacagaaatgtgtgaccagaggcagctgggcctgttacttcatgatgccatccagatcccccggcagctaggtgaagtagcagcttttggaggcagtaatattgagcctagtgttcgcagctgcttccaacagaataacaataaaccagaaataagtggaaagagtttatagattggatgcatttggaaccacagtccatggtttggctcccagttttacatcgagtggcagcagcggagactgcaaaacatcaggccaaatgcaacatctgtaaagaatgtccaattgtcgggttcaggtatagaagccttaagcattttaactatgatgtctgccagagttgtttcttttcgggtcgaacagcaaaaggtcacaaattacattacccaatggtggaatattgtatacctacaacatctggggaagatgtacgagacttcacaaaggtacttaagaacaagttcaggtcgaagaagtactttgccaaacaccctcgacttggttacctgcctgtccagacagttcttgaaggtgacaacttagagactcctatcacactcatcagtatgtggccagagcactatgacccctcacaatctcctcaactgtttcatgatgacacccattcaagaatagaacaatatgccacacgactggcccagatggaaaggactaatgggtcttttctcactgatagcagctccaccacaggaagtgtggaagacgagcacgccctcatccagcagtattgccaaacactcggaggagagtccccagtgagccagccgcagagcccagctcagatcctgaagtcagtagagagggaagaacgtggagaactggagaggatcattgctgacctggaggaagaacaaagaaatctacaggtggagtatgagcagctgaatgaccagcacctccgaaagggctccctgtcggttcaccgccagagtcgattatatctccccatcacacgtctgagattcagaacttatagcagaagcaaaactcctcatgcagcacaagtcggctggagctaggatgcagattttagagatcacataaacagctggagtctcagctccaccgcctcga

SEQ ID NO: 188107 - DNA, 2118 bp, Homo Sapiens
  misc_feature (909)..(922): n is a, c, g, or t
  misc_feature (1584)..(1592): n is a, c, g, or t
ttggccttccagtgtccccaaggttcttccatcttctagactgtaaccctgcctccctgcttcctggtccagagcctccctccagtgactgtggagcctgagaaggcccccgggccccagcatgggccccgagccttggaggagcactggcagttggtggcagtgagaccagcccacccaccaccacccaccacagaaaagcacaaacctctgggaaagacaacgtctctcgggggccaggggtcatcggtttgacccctgacctataagccaagataccccataaacacactcagaaagcagagaaaaaggacaagagtctgtgtttgagagggggtctgccattcctgcttggggactggtggggaagagggccaggacatcttctgagccaggacgtccctgaggctccacctccaagctcagacagggcccaggcttggggaacagagagagcaggtgtacacccaaccaaagtgattgtgcccttggttggggggcgcgggcatataacctgtcagaagcaaacaggagcggcaacttctaactttgctccaagccactctctttttaaacagcaacaatttaaagctatgaagtcacctggagaaaaggaacgttgctcttggacagcaagcaaaccatttctctccgtctgttgtgtttttctcctagtccctctcctgccacctctccaagacttccgtgggacacccacttccctctgtcctagttctctttgtccaatcagatggcaagggcagtgcgtggaaaggccggggaggtgcagaaaccagagcccagggcaatggtgtctgtccagcccctccctctgtccctgtgctccaagctgcccccggctgcagcccaggccatggacatgtgcaccagtatgtacctgcaggcatnnnnnnnnnnnnnncgtgtttctgggcctgccccagacactgcccttggctgccaacctaccctgcctgcactcctccaccatcacaatctcacccaaactcctgctcactcaagcaaaagcagcctctggccttccctccaccgctttgctccatctggcttaccactctccagggcctcctggggagcctgtcctgtgttcactttgtttcaggctggtctgtgccccgtgagccacatggcctagggtgatgccaggttgtcccgtcactggggtcccatctgtaaattctttgcgcccttcccggctgctgcctggggccctttcctgctctcccgtccgctgtgggtggtccccagcactcctctgtgggttttaccggaaaggtggccccagctgttgacttccagtcactgtcccagacggcacaaggttttctgtaggaaagctgccattgccccggccccttttcttcctttgtcccgttgtcgaggttttttcaaatagcgtgttgttcagtatgcaaatcaattattttaagaatcgcttttgtaaatatctttgtgaatattttagtatcgtctttgataatattcaacattttcatgacctggttatagcctttgctggtgtttttaaaatacctggactcaatgacaaagaccgagtcttcnnnnnnnnnaaacaaaaacaaaaaaagcaaccagggctatttgtacagttgaaggggtgaacagaatgggcggctgtgctgggagttggaagaccgggcagcccgctatttagagccatccctcagtcagctggcagggacaagccaacgccaggtagcatgtggccacccttgcccagtgtctgtggcctggcaagtggccacgccctgtgtcagaccatctgggaattaagctccagacagacttacagatgccttccttaggagttcttgcttcttgcgttgatactttgccccagaaaggcctgggattcattctggttcttatcagggtgtgtccacactctgctcacaggtggatccacggctttccagtgcggagagtcgagatgctctctgcagcccaggccccgggcacctcctgcaaccatctctgggctcagcacctgaggcgggtttcctgggtcccctctccagcaagcctccaccagcaagctcggccagagcttcccttccggctggctctgaaccgtgc

SEQ ID NO: 188108 - DNA, 1771 bp, Homo Sapiens
  misc_feature (227)..(235): n is a, c, g, or t
  misc_feature (1392)..(1415): n is a, c, g, or t
ttggccattgccccggccccttttcttcctttgtcccgttgtcgaggttttttcaaatagcgtgttgttcagtatgcaaatcaattattttaagaatcgcttttgtaaatatctttgtgaatattttagtatcgtctttgataatattcaacattttcatgacctggttatagcctttgctggtgtttttaaaatacctggactcaatgacaaagaccgagtcttcnnnnnnnnnaaacaaaaacaaaaaaagcaaccagggctatttgtacagttgaaggggtgaacagaatgggcggctgtgctgggagttggaagaccgggcagcccgctatttagagccatccctcagtcagctggcagggacaagccaacgccaggtagcatgtggccacccttgcccagtgtctgtggcctggcaagtggccacgccctgtgtcagaccatctgggaattaagctccagacagacttacagatgccttccttaggagttcttgcttcttgcgttgatactttgccccagaaaggcctgggattcattctggttcttatcagggtgtgtccacactctgctcacaggtggatccacggctttccagtgcggagagtcgagatgctccctgcagcccaggccccgggcacctcctgcaaccatctctgggctcagcacctgaggcgggtttcctgggtcccctctccagcaagcctccaccagcaagctcggcccagagcttcccttccggctggctctgaaccgtgcgtggtgcctacagcctgcagtctggagacaagctcttccggagtgctctgggagccaggccagggtgtgagggaggtgcagaggcatccggggcgggagcaagccccaggttgtgacaggtgcaggtagacaacgcccataaacagagatggtcctgaactctggagagatccttccctgatcctttcggacgactacttggagccataagtaacctcagcaaaaacgaggcctctgcaagccacttttccatgccaagcatccacccggcccacaggcatgtttctgccgccactccgcaagatggacagggagccagcaggcaggcgggaagggccaagtacaggcaatcacccccatcttcttggtttgaagctttatccatgtatcatgttccgtgtagccattttattttttaagaaactgctaatactttctccctaatggaagccctgatcccccagagagctacaggtctgctcccgacgggcctcgggcctgacccgtccacacagggccgtgtcaacagcagcgactcaagggacgtgtgtacatatgtaaatgagaaatagagacgtgtcaacagatgcattcatttctcttggaatgtgtattgtttttattttgcgnnnnnnnnnnnnnnnnnnnnnnnngcttggaactccatcacgtggaaaaactagatcctgttggttatagcatttgtgagttctccacgtctgtctctctcgctcatgtaatatactctgaccctgagtggaaaggggtttttgttctgtttttattttacctacatgtactatttagcttcagtgtactagtcctgccacctgtgtatttttagggtgctatggaaataatgaaaagaaacggggatttcagaagaaaattgtaaccaaattcatactttgtataatttttgatatcatgatcacaggtgattcaaacgtacacacataaacacacctaccagtgcagcctgaagtaactcccacaaaaaccatcatcg

SEQ ID NO: 188109 - DNA, 867 bp, Homo Sapiens
ttggcccaggagaagggcgaggtgctgggtgatgtcttgcagctggaaaccttgaagcaagaggcagccactcttgctgcaaacaacacacagctccaagccagggtagagatgctggagactgagcgaggccagcaggaagccaagctgcttgctgagcggggccacttcgaagaagaaaagcagcagctgtctagcctgatcactgacctgcagagctccatctccaacctcagccaggccaaggaagagctggagcaggcctcccaggctcatggggcccggttgactgcccaggtggcctctctgacctctgagctcaccacactcaatgccaccatccagcaacaggatcaagaactggctggcctgaagcagcaggccaaagagaagcaggcccagctagcacagaccctccaacagcaagaacaggcctcccagggcctccgccaccaggtggagcagctaagcagtagcctgaagcagaaggagcagcagttgaaggaggtagcggagaagcaggaggcaactaggcaggaccatgcccagcaactggccactgctgcagaggagcgagaggcctccttaagggagcgggatgcggctctcaagcagctggaggcactggagaaggagaaggctgccaagctggagattctgcagcagcaacttcaggtggctaatgaagcccgggacagtgcccagacctcagtgacacaggcccagcgggagaaggcagagctgagccggaaggtggaggaactccaggcctgtgttgagacagcccgccaggaacagcatgaggcccaggcccaggttgcagagctagagttgcagctgcggtctgagcagcaaaaagcaacccaa

SEQ ID NO: 188110 - DNA, 1614 bp, Homo Sapiens
  misc_feature (1024)..(1080): n is a, c, g, or t
ttggttcagtctttcaagtttgactttagaaatataagacaaaagtaattacataaaatactccatatttttcaaaatattcatgtcactaaatatcacatttgatcctcacatttcttcataatagggaaatttatttcttctcattcccactttaaagcttaaaattaaagtttgaacagttagtcataagacctgaactcagattatgatgtggcctcatggtgtacctgggtagctgggcatctcaacgttgctctcacaaatacttgaggaagttcctgtctacgaggcaaaggtgaggggaagatcagcaggtagctgtaattctgtattgatctcaactgatttttgaaggacaaaatagtaaaatagatgtggaaaaaatgggataaaggtttatgatttatggcaaaataatgtttctctttcattacagctaatttcttgagatagaggacagagaagatgactcgttcccatagatttgaagatctgatttataccattataccagcaaagagaatgtatttccttttctaaatccttgttaagcaacgttagtagaacttactgctgacctttttatcttgagtgttatgtgaatttgagtttgctgttttaaattgcatttctatgccatttttagtttaaaatcttgcatggcattaattgttccttgcttttatagttgtattttgtacattttggatttctttatataaggtcatagattcttgagctgttgtggtttttagtgcacttaatattagcttgcttaaggcatacttttaatcaagtagaacaaaaactattatcaccaggatttatacatacagagattgtagtatttagtatatgaaatattttgaatacacatctctgtcagtgtgaaaattcagcggcagtgtgtccatcatattaaaaatatacaagctacagttgtccagatcactgaattggaacttttctcctgcatgtgtatatatgtcaaattgtcagcatgacaaaagtgacagatgtnnnnnnnnnnnnnnnnnnnnnnnnnnnnnnnnnnnnnnnnnnnnnnnnnnnnnnnnntgcagatcactttttaaactcacataggtaggtatctttatagttgtagactatggaatgtcagtgttcagccaaacagtatgatggaacagtgaaagtcaattcagtgatggcaacactgaaggaacagttaccctgctttgcctcgaaagtgtcatcaatttgtaattttagtattaactctgtaaaagtgtctgtaggtacgttttatattatataaggacagaccaaaaatcaacctatcaaagcttcaaaaactttgggaaagggtgggattaagtacaagcacatttggcttacagtaaatgaactgatttttattaactgcttttgcccatataaaatgctgatatttactggaaacctagccagcttcacgattatgactaaagtaccagattataatgccagaatataatgtgcaacaatcgtggatgtctctgacaaagtgtgtctcaaaaataatatacttttacattaaagaaatttaatgtttctctgggagttggggctcttggctttcagagtttggtt

SEQ ID NO: 188111 - DNA, 2484 bp, Homo Sapiens
  misc_feature (120)..(130): n is a, c, g, or t
  misc_feature (669)..(724): n is a, c, g, or t
ttggattttatttaatttgctctgtaagagcagagttacatgtaaattatgctgtgaaaataattctcattaaattaactttgtaaatgtattagtaagccataggtatttaattgtgannnnnnnnnnnccccaggaaaggggcagaaactttgtgaaattgagaggatacatttttttctaagtaagaagaaaaccgatgaacttagaaatctacacaaactgctttacaacaggccaggcactgtgtcctcattaaagaagaatgtgggtcagttcagtggctttccatttgaaaaaggaagtgtccaatataaaaagaaggaagaaatgttgaaaaaatttagaaatgccatgttaaagagcatctgtgaggttcttgatttggagagatcaggtgtaaatagtgaactagtgaagaggatcttgaatttcttaatgcatccaaagccttctggcaaaccattgccgaaatctaaaaaaacttgtagcaaaggcagtaaaaaggaacggaacagttctggaatggcaaggaaggctaagcgaaccaaatgtcctgaaattctgtcagatgaatctagtagtgatgaagatgaaaagaaaaacaaggaagagtcttcagatgatgaagataaagaaagtgaagaggagccaccaaaaaagacagcnnnnnnnnnnnnnnnnnnnnnnnnnnnnnnnnnnnnnnnnnnnnnnnnnnnnnnnngtgccaatgttaagaaagcagatagcagcaccaccaagaagaatcaaaacagttccaaaaaagaaagtgagtctgaggatagttcagatgatgaacctttaattaaaaagttgaagaaaccccctacagatgaagagttaaaggaaacaataaagaaattactggccagtgctaacttggaagaagtcacaatgaaacagatttgcaaaaaggtctatgaaaattatcctacttatgatttaactgaaagaaaagatttcataaaaacaactgtaaaagagctaatttcttgagatagaggacagagaagatgactcgttcccatagatttgaagatctgatttataccattataccagcaaagagaatgtatttccttttctaaatccttgttaagcaacgttagtagaacttactgctgacctttttatcttgagtgttatgtgaatttgagtttgctgttttaaattgcatttctatgccatttttagtttaaaatcttgcatggcattaattgttccttgcttttatagttgtattttgtacattttggatttctttatataaggtcatagattcttgagctgttgtggtttttagtgcacttaatattagcttgcttaaggcatacttttaatcaagtagaacaaaaactattatcaccaggatttatacatacagagattgtagtatttagtatatgaaatattttgaatacacatctctgtcagtgtgaaaattcagcggcagtgtgtccatcatattaaaaatatacaagctacagttgtccagatcactgaattggaacttttctcctgcatgtgtatatatgtcaaattgtcagcatgacaaaagtgacagatgttatttttgtatttttaaaaaacaattggttgtatataaagtttttttatttcttttgtgcagatcactttttaaactcacataggtaggtatctttatagttgtagactatggaatgtcagtgttcagccaaacagtatgatggaacagtgaaagtcaattcagtgatggcaacactgaaggaacagttaccctgctttgcctcgaaagtgtcatcaatttgtaattttagtattaactctgtaaaagtgtctgtaggtacgttttatattatataaggacagaccaaaaatcaacctatcaaagcttcaaaaactttgggaaagggtgggattaagtacaagcacatttggcttacagtaaatgaactgatttttattaactgcttttgcccatataaaatgctgatatttactggaaacctagccagcttcacgattatgactaaagtaccagattataatgccagaatataatgtgcaggcaatcgtggatgtctctgacaaagtgtgtctcaaaaataatatacttttacattaaagaaatttaatgtttctctggagttggggctcttggctttcagagtttggttaatcagtgttgattctagatgatcaacataatggaccactcctgaatgagacttaattttgtctttcaaatttactgtcttaaatcagtttattaaatctgaattttaaaacatgctgtttatgacacaatgacacatttgttgcaccaattaagtgttgaaaaatatctttgcatcatagaacagaaatatataaaaatatatgttgaatgttaacaggtattttcacaggtttgtttcttgatagttactcagaacactagggaaaggtaaatacaagtgaacaaataagcacctaaaatga

SEQ ID NO: 188112 - DNA, 1799 bp, Homo Sapiens
tgcttttctataaaagagcccctttgtacaaaaaagttggcatccacaacactgtctgcatggccgccgtgttcgtggaccgagctggcgagtggaagcttgggggcctggactacatgtattcggcccagggcaacggtgggggacctccccgcaaggggatccccgagcttgagcagtatgaccccccggagttggctgacagcagtggcagagtggtcagagagaagtggtcagcagacatgtggcgcttgggctgcctcatttgggaagtcttcaatgggcccctacctcgggcagcagccctacgcaaccctgggaagatccccaaaacgctggtgccccattactgtgagctggtgggagcaaaccccaaggtgcgtcccaacccagcccgcttcctgcagaactgccgggcacctggtggcttcatgagcaaccgctttgtagaaaccaacctcttcctggaggagattcagatcaaagagccagccgagaagcaaaaattcttccaggagctgagcaagagcctggacgcattccctgaggatttctgtcggcacaaggtgctgccccagctgctgaccgccttcgagttcggcaatgctggggccgttgtcctcacgcccctcttcaaggtgggcaagttcctgagcgctgaggagtatcagcagaagatcatccctgtggtggtcaagatgttctcatccactgaccgggccatgcgcatccgcctcctgcagcagatggagcagttcatccagtaccttgacgagccaacagtcaacacccagatcttcccccacgtcgtacatggcttcctggacaccaaccctgccatccgggagcagacggtcaagtccatgctgctcctggccccaaagctgaacgaggccaacctcaatgtggagctgatgaagcactttgcacggctacaggccaaggatgaacagggccccatccgctgcaacaccacagtctgcctgggcaaaatcggctcctacctcagtgctagcaccagacacagggtccttacctctgccttcagccgagccactagggacccgtttgcaccgtcccgggttgcgggtgtcctgggctttgctgccacccacaacctctactcaatgaacgactgtgcccagaagatcctgcctgtgctctgcggtctcactgtagatcctgagaaatccgtgcgagaccaggccttcaaggccattcggagcttcctgtccaaattggagtctgtgtcggaggacccgacccagctggaggaagtggagaaggatgtccatgcagcctccagccctggcatgggaggagccgcagctagctgggcaggctgggccgtgaccggggtctcctcactcacctccaagctgatccgttcgcacccaaccactgccccaacagaaaccaacattccccaaagacccacgcctgaaggagttcctgccccagcccccacccctgttcctgccacccctacaacctcaggccactgggagacgcaggaggaggacaaggacacagcagaggacagcagcactgctgacagatgggacgacgaagactggggcagcctggagcaggaggccgagtctgtgctggcccagcaggacgactggagcaccgggggccaagtgagccgtgctagtcaggtcagcaactccgaccacaaatcctccaaatccccagagtccgactggagcagctgggaagctgagggctcctggtgaacagggctggcaggagccaagcttccaaggagccacctcctggacggtacacggctggcc

SEQ ID NO: 188113 - DNA, 1243 bp, Homo Sapiens
  misc_feature (265)..(408): n is a, c, g, or t
ttgggttttaaaacacctctgctttctgatgttgccttaatattctgctattgcagcaattaaaaattgtcttcatgtacatttggaactaacacgtgatgtgatatattcctaaactatgaaacctttttcctagtagtcagctagatcatttgttctgggagtataaagccacccacgtaagttaataagcaaaatcctgactattatgttgttagagaaaaatgctttgctttgtctggaagaaagataaaatagtgaattnnnnnnnnnnnnnnnnnnnnnnnnnnnnnnnnnnnnnnnnnnnnnnnnnnnnnnnnnnnnnnnnnnnnnnnnnnnnnnnnnnnnnnnnnnnnnnnnnnnnnnnnnnnnnnnnnnnnnnnnnnnnnnnnnnnnnnnnnnnnnnnnccacgaaagcacacacaaaataaatcagtgggatttggtaatgtgttttagagtaagaaatttcaggttgttggtgactatcccaacagtcatgttttaaatgtacagtttggggcaagtcatgtaaatactgttggtggtcttccccacacgccccaattttcaggtagtactaagagtatgtgccaggaaactcttgctattgaattgagatgattaaaatggtgacttaatccgtagttattttgcacccactgaaaggaaagtgctttccagaataatatgaagtatctaaaagtgtcaccttttcttgcctgatcaacaatttgggcttcctgtttgtacaaggggccatttggcatacctttcacagcttttatcaggccaagttaaaggctgactacattttttcatcatgaggaaagcagttgaaatgaggcatgagttactgtgcattgggattttagaacaattttcttgtgacagctctttttgtgaagttaggttcttaaaagtgcccatgatggtcacttaaaatgtgcagtaatagcactgccaggatcaagcatgaaaggcttttaaattagatcatcccacagacaatacgtttgataatagttttttcttttaacctctttaagtattgattctgcttgagaatattgaagtacttgccagaagttgtggatttcagttttaacaaatgctattaaagtggagaagcacactctggtcttggaattccatttgaggatttagaagtgtcatgtttataactattcagttgtgtttgttgctggcttgttgtaaagcaataaaattttttttggtctct

SEQ ID NO: 188114 - DNA, 1641 bp, Homo Sapiens
  misc_feature (218)..(258): n is a, c, g, or t
ttggccgggatccggtacacagcgtcgcgcgctccccccagggtgccatggcctcccggctcctgcaccggctgcggcacgccttggccggcgacggccccggggaggcggcggccagtccagaggccgagcagtttccggagagctcagagctggaggacgacgacgccgagggcctgtcctcccgactcagcggcaccctcagcttcaccagcgcnnnnnnnnnnnnnnnnnnnnnnnnnnnnnnnnnnnnnnnnnctggccctgaccagctgcccctcggggatgggacgtcaggagaagacgcagaacggagccccccacctgatgggcagtggggcagtcagctcctggcgcggcagctgcaggatttctggaagaagtcccggaacaccttggcaccccagcggctgctcttcgaagtgaccagcgctaacgttgtcaaggacccgccctccaagtacgtgctctacaccctcaccgtgatcggcccaggaccgccagattgccagccagcccagatctctcgccgttactcggactttgagcggctgcaccgaaacctgcagcggcaattccggggcccaatggctgccatctccttcctccgtaagcggctgcgccggaattttactgcagagaccattgtctcgccgtagccgggcctttgagcagtttttgggtcacctgcaggcagtgcctgagctgcgtcatgctccggatctgcaggacttcttcgtgctgccggagctgcggcgggcacagagcctcacctgtactggcctctatcgtgaggctctggcactctgggccaatgcctggcagctgcaagcccagctgggcaccccctctggcccagaccgccccctgctgaccctggctgggctggccgtgtgccaccaggagctggaagaccctggagaggcccgggcatgctgtgagaaggccctgcagctgcttggggacaagagcctccaccctttgctggcaccctttctggaggcccatgtccggctctcctggcgcctgggcctggacaaacgtcaatcagaggctcggctccaagccctgcaggaggcaggccttacccccacaccaccccccagtctcaaagaattgctcatcaaggaggtgctggactaacccttgcctagatttaaggccactgtgaggagaggggttgccccagaaggcaggggaaggacctgatgagaacagaatagctgggaggctgcagagggtgctgggagcccctagaagttccaaaagagaatgtgaagcagatcaaggaaacttctgttgagctaggctcagggtgagctttggctggggttgcccttgtgtagtacagggaagtctgacacagcctctccagcctataaacagccggggggctgtggcacaggttggggcaatgttcccttgttggtgggcccccaagctggcaaggcctcttggctgaaaccagggactctgcccctggagtcctggagtttaagggatgaaagcaaagctgcaggtctggcccaggggaattaaaagccagccactccagtggtatcagtctctttattggaatgtgagggccaaaagggaactgtactcctgtctcaagaatggggatagatgggaaggttcttg

SEQ ID NO: 188115 - DNA, 889 bp, Homo Sapiens
  misc_feature (769)..(778): n is a, c, g, or t
acaaaaaagttgggcatggggctccactagggggtatgttttctgggcagccacccggtccccctcaggccccgccgggccttccgggccaagcttcgcttcttcaggcagctccaggcgctcctagaccttccagcagtactttggtggacgagttggagtcatctttcgaggcttgctttgcatctctggtgagtcaggactatgtcaatggcaccgatcaggaagaaattcgaaccggtgttgatcagtgtatccagaagtttctggatattgcaagacagacagaatgttttttcttacaaaaaagattgcagttatctgtccagaaaccagagcaagttatcaaagaggatgtgtcagaactaaggaatgaattacagcggaaagatgcactagtccagaagcacttgacaaagctgaggcattggcagcaggtgctggaggacatcaacgtgcagcacaaaaagcccgccgacatccctcagggctccttggcctacctggagcaggcatctgccaacatccctgcacctctgaagccaacgtgagcaaagggcagaggcagttggcctatgagtgggctgatgcgtgaggttggccacacattccttcctgtggacttgacattttggaagaactctttgccagataatgagttcattttagttttatgctcccattgaaaaattttccactatttttataagctgttaatttcttgagtactttataacatgtctgtagcttggataaaccaagtaagtannnnnnnnnngtctttagcgaaagtttagactgtgaatatgatgacacagattcttttttatggtgggctttgcttgttttaaatttttgcatgacttttcatctttttatgtgtgtttcc

SEQ ID NO: 188116 - DNA, 986 bp, Homo Sapiens
cccacgttggggctggtgatctccacaatgccactgggtatctggatgtgccagtgaagctgagaggccggctgcccgtccacatcacagtgcagtgcccagcacaaaaccaggccgcagctcggcaccatcctggctgggttggtagctgagctgcactgagggcgccgagcatggcagtggcggcaggcggctcagcggcgtacccttgagcacatggggtgaggtgcaggcggtgttgtcttgctccgggatggacacagccgtggtcagggcccatgtcttgagccacacgatgccgcaggtgcagtcgaaggggttctcgttgatctgcaggtgggacagcgcggtgagcggggtgaaggtgccctcggccaatgtgtgcaagcggttgtggttgagttgcagcgagcgcagagcacggaggctgcggaaggcgtcgcgggggatgaaggtcagctcgttgctgtccatcttgagcaattggagggcactgaggttgtgcaggtcgctccaggcaaagtcagagatgagattgtggctgaggtccaggctcttgagatggctcagagaggccagggctccggcggccaccgtgcggatctcattgtgtgccagccacagcgactgcagcaggggcacctccctgaaggcaccctccggcaagcctggcagccggttggctgacaggctcagtgtagtcacattggccgggaagccaggcggcacggattctaggtcgcggtaggcacagtcggcgatctggaagccatacttttccccacagtcgcagggctcagggcaggcctgagccaggcccaggagaagcgcccaccagagcagatgcagctcctgcatggtgcctcccgaggtcacgcagccaggcaggatgaagacgggatggaagaggaccccagctcctcctccgagtggagagttctccctgcctcggcctgttcctagctgactttatgacttgaaaccaa

SEQ ID NO: 188117 - DNA, 1029 bp, Homo Sapiens
actttgtacaaaaaagttggcctcatttgcctttttcaagaaaatagtgagataatgaattcactgattgaaagttggtgccgtaacagtgaagttaaaagatatctagaaggtgaaagagatgctataagatatccaagagaatctaacaaattaataaaccttccagaggattacagcagcctcattaatcaagcatccaatttctcgtgcccgaaatcaggtggtgataagagcagagccccaactctgtgccttgtgtgcggatctctgctgtgctcccagagttactgctgccagactgaactggaaggggaggatgtaggagcctgcacagctcacacctactcctgtggctctggagtgggcatcttcctgagagtacgggaatgtcaggtgctatttttagctggcaaaaccaaaggctgtttttattctcctccttaccttgatgactatggggagaccgaccagggactcagacggggaaatcctttacatttatgcaaagagcgattcaagaagattcagaagctctggcaccaacacagtgtcacagaggaaattggacatgcacaggaagccaatcagacactggttggcattgactggcaacatttataattattgcaccaccaaaaaacacaaacttggatttttttaacccagttggctttttaagaaagaaagaagttctgctgaatttggaaataaattctttatttaaactttccttcccagttttatagtttctggttctgaggactgatgaaaatcatcttccatcagcagattttcttgcactgtttgctgtgcccctcaaatataatgtcttgggttttaagatcgagcaaggagcttctcttcctaaattggatcccagcccctttgtgggggtctgactgcatagtcccagccattatgtgatatttcacgttattgatgatagtgaaccgtgggtccgaagctgactcaacggaggcagggaacaaagtctctgtggtctgttgggtcatacttcctggttcc

SEQ ID NO: 188118 - DNA, 920 bp, Homo Sapiens
tgagcaatgcttttccattaaagcccactttgtacaaaaaagttggggagtaggcagcggcgccgcgtccgctctcgcccgctctcgcccgctcgccagccggctctcctcccgccgcaggacccgcgcgccgcgctcgggggccatgcagcgcctggccatggacctgcggatgttgtcccgggagctctccctctacctggaacaccaagtccgggtggggttcttcggctcgggggtgggcttatcccttatcctgggcttcagcgtcgcttatgccttctactacctgagcagcattgccaagaaaccccagttagtgaccgggggtgagagtttcagccgcttccttcaagaccactgtcccgtggttacagaaacgtactacccgacggtctggtgctgggagggtcgaggacagaccctgcttagacctttcatcacttcgaagcccccggtgcagtacaggaatgaacttattaaaactgcagatggaggacagatttcactggactggtttgataatgataacagtacgtgttatatggatgccagcaccagacctactatcttattgttgcctggcctcacgggaacaagcaaggagtcatatatccttcatatgatccatcttagtgaagaattaggatacagatgtgtggtttttaacaacagaggagtggcgggggagaatctcttgacgccaaggacttattgttgtgctaacactgaagacttggagacagttattcaccatgtacacagcctgtacccttctgctcctttcctggcagcagggtttcaatgggaggaatgctgcttctaaattacttgggcaaattgggtccaaacgcctttgatggcagctgcactttttccgttggttggaacaccttcgcttgctcagagtcattggaaaa

SEQ ID NO: 188119 - DNA, 1258 bp, Homo Sapiens
gttcagcttgctcatttccctgtagaagacatccctcaagttggaaatgtttggaagatggtcacatagcagccaatacgactattataaagaataggcagctcctctagtagttcttggttcagatcttcaaacacagtctgggctttgttgaactcttcctctgccttggcagtcttggcctcatctttcttcttggcattctgcactgcctccaggtggtgtcgggcactgtcatagtccacgagtttccgaccccgcttggcaattctctccttaatttcactgaactgggcaacatagatttccatggtccttacagcctggtcagccagtttctcctcgtagtcttcccaaaggagatcattattctgtaggatagagtcagaggctggtgaaggctccacttcccaacaacaactgcctaccagggaaatacccaaattctccctgcaaaaaccttttttgtagcaccgtatttagaataccatgttggattctggggactagtcagaggaagaaaagagacagcccctaccccaaggaactgctctatgggagtctgaacatacattcagagattaagaacagggcacaaggtcaaagccttggactccagagcttagatgggaaagtttaagagtgtataactgcatgaagtttgttttaaaaaacaaccaatctttaggaggtaaaacttcccataatgttttaaagaggagaagagggtcaaaattagagggatccacagattagggaaaacttgtttttaccttaacagttgtagcttcttcctaccacccagtgactgaggctacacaaatgcacagtgtgaactggctcctttgttttcctattttcttggatagagaagctaagctgaggttgagatgcaaacaggagtaagtgccaataagttgtaaaactcaagccactcttacccatacgatggccttcagctcctcatgaccgtcccactcgctgctgtagatctcctgcagggtttctgacactctttttgaactttcatgcatcactttgactgcactaaggaagttcttcaggtccttgtacagcttgtggccttctgcctgttgttggtagaagttgctagcgctttgttcaaatcgttcatctttggtttctacagctttccccaatttctgcagcaccttctcctgggccctgctaaacttcttctgcacctgcttggcgaagaggccggccgcgccgcctgccttgccctctgccatcccaa

SEQ ID NO: 188120 - DNA, 1124 bp, Homo Sapiens
ttggctctgccgactacaacagattggagccatggctttggaacagaaccagtcaacagattattattatgaggaaaatgaaatgaatggcacttatgactacagtcaatatgaactgatctgtatcaaagaagatgtcagagaatttgcataagttttcctccctgtattcctcacaatagttttcgtcattggacttgcaggcaattccatggtagtggcaatttatgcctattacaagaaacagagaaccaaaacagatgtgtacatcctgaatttggctgtagcagatttactccttctattcactctgcctttttgggctgttaatgcagttcatgggtgggttttagggaaaataatgtgcaaaataacttcagccttgtacacactaaactttgtctctggaatgcagtttctggcttgtatcagcatagacagatatgtggcagtaactaaagtccccagccaatcaggagtgggaaaaccatgctggatcatctgtttctgtgtctggatggctgccatcttgctgagcataccccagctggttttttatacagtaaatgacaatgctaggtgcattcccattttcccccgctacctaggaacatcaatgaaagcattgattcaaatgctagagatctgcattggatttgtagtaccctttcttattatgggggtgtgctactttatcacagcaaggacactcatgaagatgccaaacattaaaatatctcgacccctaaaagttctgctcacagtcgttatagttttcattgtcactcaactgccttataacattgtcaagttctgccgagccatagacatcatctactccctgatcaccagctgcaacatgagcaaacgcatggacatcgccatccaagtcacagaaagcatcgcactctttcacagctgcctcaacccaatcctttatgtttttatgggagcatctttcaaaaactacgttatgaaagtggccaagaaatatgggtcctggagaagacagagacaaagtgtggaggagtttccttttgattctgagggtcctacagagccaccagtacttttagcatttaaaggtaaactgctctgccttttgcttggatacatatgaatga

SEQ ID NO: 188121 - DNA, 1022 bp, Homo Sapiens
tggggacccactctcagtccagggcatgttccttgcaaaaagggaagctgaagatagaaccaagcttggagaattttgtttgcaacgcagtcaggctctcctggatcctctctcacagtcctggcattcagggggtgccatccccatcctcgtggcatgaacagaacgggaaatgtccgcagcacggctgcagccacggcttccacaggatgttgctcgtggaaaactgctggggcacaggactcagggtctgccgatgctccgacaccgcggcacctacccttgctatcacggcgtggtacaggggctcggagtcgggggtcaggggccgtgcctcggaggggtccctggagaggtcaaagagcaaagggggtctgtgatgggtcacgccctccccggagcatgggcagacgcctcggccgtagcaggcccccgctccctcggggtggaactgcggggtcgtgtaatgaaccttccagacgcttccactgtccttctggtgccagcgtgctgcgtgaagatgctgcccacagtaatgaaacaggaactcatgtgccgagcgtgcctcagctccctgcagcaagggtaccaggctgtggccatcaatcaccctgtcctggggcacctcgccacccaccagctggaccacagtagggaacacgtccatcaggctcgtgggctctccaatcactcggccggccgggagcacccccggccagtggaagatcccgggcacgcggatcccaccttcccatcctcccatgcccttcccacctttacagaaaatggaaagtttcaggaccaagaaaacaaagcagcatccactagttcaatgcgcttcttcctttctgcaggagacacctcttgccaggaagtcataagaagagaccacacttactcggaggccgtggttacaatgtgatcccaaagtgtaagacatagctaatcactgtgataccacaggactgtttacaatgcaaaccaacaacaaaattcgaagccccccaaccgactgatgccaa

SEQ ID NO: 188122 - DNA, 917 bp, Homo Sapiens
ctcaatgaagtcgtagataagtttagaggtctcggcgtcggtgagctgggcctcgctgattcctgccctggagaacagactccgcagatctgggtcgaggttgttcacgtcaaatccattctgggggtcccaccccacgtggctgacatgcttgaatccactgggtgcaccaatatcagctttgctgatcttcttcttccctgagcgtttcttatcagctgggctaggtccaggtgctgggagcccacggtatcgtgaactcgtgatgtcagggttctggatgtccactgtcgccagccccagggagagcggacccactggagggcctccttggtctccacctggatgcaggggcaggggtgggagccctcctcttctctcttcattggctggtgttggtggtgggggtagctggcgtctgtctccactttgcctctgattccttttttgtatcttctcctgcacgagggcccggaaggcctgggcctcgtcctcgtctgcaaagttcagccccgcttggcagtcatctccagcgaaggtgtggaagaagggggtgggggtggagtagacaagctgtgagtacagctcctgttcccagagcagccgaccagcctgaaggccgtaaaggcggatgaagtaggacttctgggggttatccttcacgaagcacacagccccacaatgctccttggtccagtgctcagctccagggggcagcgccaggtacagctgaacaactgcagtggccagcgtcaagcattttcgtccaagcatctcaaagagtcgctggttctcgtggtcctggaggagggtggagggtatgttctgctgaaccgctggtgctcctcggcccccgggccttcctcccattgggcccccactcatggtgctttctgcccttgtcttctctggcccaa

SEQ ID NO: 188123 - DNA, 1539 bp, Homo Sapiens
  misc_feature (425)..(502): n is a, c, g, or t
ttgcaccattatacttccattccagacaaggcattcctgctgtttatcagctttctgacaaagtgaccctttcacttcccatttgctcctatgtgtatctctctccatttggatatttcatgaagagggatatctaattcaaggcagaaaatgagcatttccatattatccagtcaaaaaacatctaacgtcaatctgaaccaaacttcaactcttcaaatacatgcaatgtttcacaaagatatatggcacatcatagtttactttcagctttggcataaaaaaactcattaataacaaagtctgaattaaatactgtcttaaataattacagatttgatggcaataccttaagacaaatgtcaaagcttgcttcatctaaaaagaaaggaaataaaaatactactgtatatgccagtgttacnnnnnnnnnnnnnnnnnnnnnnnnnnnnnnnnnnnnnnnnnnnnnnnnnnnnnnnnnnnnnnnnnnnnnnnnnnnnnngggctattaattccaaaacaaaatcaagatgccattctagagatatctaagatgagtaagaataccttgtgtagagagctgagcagcttgagaaatcagagacgttatgttgaaagcagatggtccagcagtaagaaacttatgaattatagactgcagtgaggcttgtgtcacagctgcttcatttattttagatatgtccacattagaattattaagctgcagcgtggcttgcaaagcaggaagcaattgtctaagaagatttgggtcctgaagtaagggaggtattggcgactgtggaacaggagaaacagggaccgctgaagcagatgttggaggtgcagatgtggggttcagtccagaggcagaagacgtggaaggagttgtgcaagaatgtgatacgggtttgtctcctgatgtagattcttttctttctgttttctgtgcagggacagaagatgtgggtgtaggcagttttgataaagtagatgctccattagcatcaaatgatttctttggctggtgatcagactgtagcgtaaatggactagaaggaacagtgcttggggtagcagttggatgaaccactggtttgatggggtgctgtactggcgtagaactactgtgagtctctgctcttggcagtctgtagtctctgtcattgtgtctgcttgtttgagacaaaatattctgtgggagcaaactactggcatcactggaatgcttgtcttccattccactggcaaacccactagtggctgttgcttgcatcacctctcttctgtaatccctatcttttgggaagctgttgactgccatcttgtttgcttctttttgtctctgttctctttcaagccactcttttggtttttcccattgtgaaacttctgttcgacaattgtagtagtactttttcccagaagagctaatatgctcagaccagtcatctgcagaatcataaggtgcatctgaagttttgcttgggttattgcttggattagaaaggaatgtgaatttgccaacttttttgtacaaag

SEQ ID NO: 188124 - DNA, 1880 bp, Homo Sapiens
  misc_feature (411)..(425): n is a, c, g, or t
ttggcttggagaaccagatgcatatagcggagcagcggaggagaaccctgctgaaagatttccatgacacctaagttgggatgtggatgtgccggggtgaggaagatgtggctgcaaggtctcccggctgccatactgcatgctgcaggctctgcctttcatgaccccaggcaacagccagggccccactcctgagagacactggcaacacctcttagttgatttctgttttcttctcttttcactttttgtttctaccagggtagaggccatgttgaactggcctcttttcaggacttttatttccccctggatggttgttgggagggagggaaagtgttttctgaatggctattaatagtattagatcattacaacttatgtaactttcaaaggttgtacaattatacnnnnnnnnnnnnnnnggcaaactataggataacacagagccctttttgaaaataaattggcattggagtgttttaccctctagctgttttacttagaatgtaacatatgctgcctacccacctcaaaatgtctgtactgcaagagggccctgggcctctgctttccatattcacgtttggccagagttgtagtcccaaagaagagcatgggtggcagatggtagggaattgaactggcctgtgcaatgggcatggagcacaaggggtcacagcatgcctcctgccttaccgtggcagtacggagacagtccagaacatggtcttcttgccacggggtgttgttgtctctggtggtgctgcatgtctgtggctcacctttattcttgaaactgaggtttacctggatctggctactgaggctagagcccacagcaaaatggggttgggcctgtggccccccaaactagggggtgtgggttcatcacagtgttgccttttgtctcctaaagatatggatctacttttgaagggaattgttcctcccaaataaatttgctttaccttggtcctttcttttgtgccagtattcaagtggtatagctctgagcagggtcacatttggccaaacctgacactgtcttgctgcattctcctttggcaaacatcagggtcagaattcaggatagcccttcctagggcactggactttctggcatgggggctgtgtttgcacaagttattttcatgttacctggagagtgtccagaggctgctctgaggctgaggtgtgttcccccttgcctggttccagctgtcagagggataccatcctagggtctgggaatccaaggccacgagactccttggtttgtggtccgagatcctgtactaaggagggtctggccagaggaacagaccagcttttgcacaatgaagcgcaagggaacaagtggtttgcctggtgtcctacctgtcctgaacctggtcctgtgggccattgaaaagttagatctgtgatctctggggtttttgtggctttgttcaatgcttccactctagggcaggcagagcagtctatactctcccaagcctgcttgacctccaagtagagctgatacagagatctgtgaatattgtgatagaaattctttggtattcatacatttcagctgcaagtcagcaatttcccaggtaccatgtaagctataaaacagtcattcttaaagacagaggatagctgtgactcatgggatcatgaggtccatggctggttgcaggttccctttttccttcctcaagttttgtctcttcctgtgttgtccccagcaagggagagactgtgggggtggattgggagaacagattatgagtatagcaaatgaacccagaatggaacagtggggagctaactgtgaatgagagagtacctgcctgcaggacctggaaggtcaggtgtgaatgctgtattgg

SEQ ID NO: 188125 - DNA, 1944 bp, Homo Sapiens
  misc_feature (622)..(646): n is a, c, g, or t
  misc_feature (1823)..(1833): n is a, c, g, or t
ttgggtcctctaaacacacttgggcacggaaatgcagtactgtaaggaagagggacctccagcttccacaaacaccatcttcagctgtatgaaagggacggttgtggtgaagtttgtcaggcacggtaagcatgctgagtggcggggatcagaactctcctatctgaacctactgaggagcaaagcagcaattacatgggatcctgtggctctcccgttgcagaggccacaggaagataggatggaacgtgactggtctcctaaccaaggtgcactgagaagcaatcaacgggtcggtcgtggccagtcctggggaggtctgagtggtggtctttgggataacctttggccttatggatttggactcgaaattagaagagcctaccatttcagatgcaatcacttttggacatgcttttgcagacagtccttaatgctgaaaacacagagaatgggtaattcaagaggcctttcttttaaaatagacttttgtgacccactaattgtaaggtattgcaaggtcactttgcgtgtgtcataaagttgacttccttattggttgaaggtcacagaagtagtggtttgctttgatggaaatagctacagctgtgtcccttcctgnnnnnnnnnnnnnnnnnnnnnnnnnctcggcacgtggtatctccaccatttcttctgcacaaagatgtcttctgttcatcctgaacatttttaaaaaatgcagaattttatgtgactgcttttttgcctcacaattatgctgtgaattttacaaaaatttattttcttttttgataatttattgtaccaaagctgtttttatagcacatagatgtctgtaaccaataatgtagcagttctgcactttgacacaaggtgtaactagaccatttttaaatgtcagttgaaaattatggctgtactattgcttaaacaaaactggaactgttgttgaatccatagccaatacatttacagcaatctgtgtactgaacatagtagattgacatctaattcaagattacaacatctgttacattctaagtgtgttcaggcttctgaaggtaaagggacactggatccagaagctatggaaccagcagttgattcttgtattcctgattaacctacttgtaaacttgaaagcaagaccttgattgcaccaacaggtccagagtatgagtgcaagcaaagcagaactctcatgcgtgacctgagcagacaggctggtatttaacaggtgcctcgtgttgagattacgctgccttaatgtaacacagtctggcagttgctaaatttgtgttcccattttaaattgaccaattttggggtgtgacacttttgagcggttgaattgggagaatgaagataagtaatttacctgtccaggatcaaaagaagcctagaaaagaagcagtaatctacctctgccgataacctgtttaagatgactcagcagaacaccgcgtttcattctattggtcaattccatgtggctgactaggtcaattttttttctgaacaaaagcaggtttttatatgtaaacagtgagaaaagaaaggctaaacactatgtaaatgtgaatggaaacttggaaatactcgtttttataaactacaaaaactttttgttgtttatcaggaaatccatatttattttgtaattaactgtcaagcctgtggatgatttttttgaacttggtagttcataaaggtttacagtgaataaaaggatatcatcttgagtatagcaatatcaaaaggaattcagtagttactgctgtttaggaatataaggttaagatatcatatgggtcagtcannnnnnnnnnnctgtgctggttgccacatcttagcaagcaccaaaaaactaaagcagtttttaaaccgatatttacgtaaagaaaatcataaaatccaatgcttctgcatacctgtgttatg

SEQ ID NO: 188126 - DNA, 1164 bp, Homo Sapiens
  misc_feature (289)..(313): n is a, c, g, or t
  misc_feature (964)..(1025): n is a, c, g, or t
tttaagcaatagtacagccataattttcaactgacatttaaaaatggtctagttacaccttgtgtcaaagtgcagaactgctacattattggttacagacatctatgtgctataaaaacagctttggtacaataaattatcaaaaaagaaaataaatttttgtaaaattcacagcataattgtgaggcaaaaaagcagtcacataaaattctgcattttttaaaaatgttcaggatgaacagaagacatctttgtgcagaagaaatggtggagataccacgtgccgagnnnnnnnnnnnnnnnnnnnnnnnnncaggaagggacacagctgtagctatttccatcaaagcaaaccactacttctgtgaccttcaaccaataaggaagtcaactttatgacacacgcaaagtgaccttgcaataccttacaattagtgggtcacaaaagtctattttaaaagaaaggcctcttgaattacccattctctgtgttttcagcattaaggactgtctgcaaaagcatgtccaaaagtgattgcatctgaaatggtaggctcttctaatttcgagtccaaatccataaggccaaaggttatcccaaagaccaccactcagacctccccaggactggccacgaccgacccgttgattgcttctcagtgcaccttggttaggagaccagtcacgttccatcctatcttcctgtggcctctgcaacgggagagccacaggatcccatgtaattgctgctttgctcctcagtaggttcagataggagagttctgatccccgccactcagcatgcttaccgtgcctgacaaacttcaccacaaccgtccctttcatacagctgaagatggtgtttgtggaagctggaggtccctcttccttacagtactgcatttccgtgcccaagtgtgtttagaggacttaaaccaacccaaatttcccaccctcccacccnnnnnnnnnnnnnnnnnnnnnnnnnnnnnnnnnnnnnnnnnnnnnnnnnnnnnnnnnnnnnncaccctcatggggccctttatgcaaattatgtgcagtgccttttactttaaaattagttggcaaatgaccaagaccaacatctgaatattaacttttgctgaatagaaagacaaaaaaaccccactgtgactgggccaa

SEQ ID NO: 188127 - DNA, 817 bp, Homo Sapiens
ttggcagctgccgggcggtcctgccgagctgtgagggcaacggaggggaaataaaagggaacggctccgaatctgccccagcggccgctgcgagacctcggcgccgacatcgcgacagcgaagcgctttgcacgccaggaaggtcccctctatgtgctgctgagccggtcctggacgcgacgagcccgccctcggtcttcggagcagaaatcgcaaaaacggaaggactggaaatggcagaccatatgatggccatgaaccacgggcgcttccccgacggcaccaatgggctgcaccatcaccctgcccaccgcatgggcatggggcagttcccgagcccccatcaccaccagcagcagcagccccagcacgccttcaacgccctaatgggcgagcacatacactacggcgcgggcaacatgaatgccacgagcggcatcaggcatgcgatggggccggggactgtgaacggagggcaccccccgagcgcgctggcccccgcggccaggtttaacaactcccagttcatgggtcccccggtggccagccagggaggctccctgccggccagcatgcagctgcagaagctcaacaaccagtatttcaaccatcacccctacccccacaaccactacatgccggatttgcaccctgctgcaggccaccagatgaacgggacaaaccagcacttccgagattgcaaccccaagcacagcggcggcagcagcacccccggcggctcgggcggcagcagcacccccggcggctctggcagcagctcgagcggcggcgcgggcagcagcaacagcggcggcgg

SEQ ID NO: 188128 - DNA, 1598 bp, Homo Sapiens
ttggctaacctttcttttcactctgtatttcagaattaattaataccagtagaaactattcaataatgaagttcaatgagtttaacaaaggtggaaaatgtttctgtgatgaaaagcatgaaataattcattctgaagaggaaccttctgaatataataaaaatgggaacagcttctggctgaatgaagacctcatttggcatcagaaaattaaaaattgggaacaatcttttgaatacaatgaatgtgggaaagctttccctgagaattcactcttccttgtacataagagaggttacacaggacagaaaacctgcaaatatactgaacatgggaaaacctgtgatatgtcatttttcatcactcatcagcaaacacatccaagagaaaaccactatggtaatgaatgtggagaaaatatctttgaggaatccattctccttgaacatcagagtgtttacccattcagccagaagttaaatctcactccaattcagagaacccactcaattaacaatattattgaatataatgagtgtggaacatttttcagtgaaaaattagtccttcatttacaacagagaacacatacaggagaaaaaccttatgaatgtcatgaatgtggaaaaaccttcacccagaagtcagcccacacaagacatcagagaacacacagggggaaaaccctatgaatgtcatgaatgtgggaagaccttctataagaattcagacctcattaaacatcaaagaattcatacaggggagagaccttatggagtcatgaatgtgggaaatccttcagtgaaaagtcaacccttactcaacatcaaagaacgcacacaggggagaaaccatatgaatgtcatgaatgtgggaaaaccttctcatttaagtcagtccttactgtgcatcagaaaacacacacaggggagaagccctatgaatgctatgcatgtgggaaagcctttctcagaaaatcagacctcattaaacatcaaagaatacacacaggtgaaaaaccttatgaatgtaatgaatgtgggaagtcattctctgagaagtcaacccttactaaacatctaagaactcacacaggtgagaaaccttatgaatgtattcagtgtggaaaatttttctgctactactccggtttcacagaacatctgagaagacacacaggggagaaaccttttggatgtaatgaatgtgggaaaaccttccgtcagaagtcggccctaattgttcaccagagaactcatataagacagaaaccctatggatgtaatcaatgtggaaaatcattctgtgtgaagtcaaaactcattgcacatcatagaacacacacaggggagaaaccctatgaatgtaatgtttgtggaaaatcattctatgttaagtcaaaactaactgtacatcagagaatacacttggggagaaaccctataaatgtagtaaacgagggaaattactctgggtgaagtcagaactttgtagaacacagaacataaagggtgagagaaatctgttaatataatgataatgagaacacctttgccctgaagtcagttctcacagtatagaagagaacttaaagaggg

SEQ ID NO: 188129 - DNA, 1015 bp, Homo Sapiens
ttggcagctgttattgagttgtttgaatttataagagtggaagatatcaagtctcttactgcccatatagttgaaaacttttataaagcacttgaatcgattgaatatgttcagacattcaaaggattgaagactaaatatgagcaagaaaaagacagacaaaatcagaaactgaacagtgtaccatctatattgcgtagtaacagatttcgcagagatgcaaaagccttggaagaggatgaagaaatgtggtttaatgaagatgaagaagaggaaggaaaagcagttgtggcaccagtggaaaaacctaagccagaagatgattttccagataattatgaaaagtttatggagactaaaaaagcaaaagaaagtgaagacaaggaaaaccttcccaaaaggacatctcctggtggcttcaaatttactttctcccactctgccagtgctgctaatggaacaaacagtaaatctgtagtggctcagataccaccagcaacttctaatggatcctcttccaaaaccacaaacttgcctacgtcagtaacagccaccaagggaagtttggttggcttagtggattatccagatgatgaagaggaagatgaagaagaagaatcgtcccccaggaaaagacctcgtcttggctcataaaatatttattaggggaccctcaacatgtggtcttacaatgctgcaactgttcagtgagctgaaaatctgaatcagaaagctttctcaattgaacttataaaatatacaaggagtagcaaaagacagtatatcagctaagagagtttagttctaataaaaatcaagcttcccaggaacttgattgcttgctagtaattaaggggtttgccttttaggctgtcaaaacaaacattagtaaccagaacctgggagacagcttctcagcaggaaaagtcacaggtttggggacggtttacggaggggaaaagttgatataataatgcaggttgctcctcggggtgtcgatctagaaacaatttta

SEQ ID NO: 188130 - DNA, 1086 bp, Homo Sapiens
tacctcaagccagacattttaagccttttgtttggatctactgtgagaagtccttgggatcaaatctttagccctcttgggatacattcttccaggcttctccttcaaaggagaaatctccctttttaattttcttcatgatttccaccgcgctggtacacgtcaaacttcggtcatgagattggaagggaacctgtcctgacaacattgtgtacaaaatgacgcccaagctccacaggtcacaggactcatcgtagccgttctgattcaagagctctggggcggcataatgaagggtgaagcatggagtcttcaggggctgattatccggtggctttagccgtgcaaatccaaaatcaattattttaatttccaaattgtcattttcatcggtgaacaataaattctcaggtttcagatccctgtgcaccactccaacatcatgcatgtggcttacagctgaaacaagcttcctcatgatgtagctggcttccgtctcactgaagtgcttctttttcttaatgcgctcaaacagttctcctccattcagaagttccatcactagaaacgtgtgaagctgatcatgaaaaacttcatgcaacttcacaatattggggtgtccttcacagagtttcagagctgttatttccttttgagtattggcttccatccttttgctgattattttgactgcaaaagcttggttactttttttatgcacacactttcgacaaattgaaaaactaccttctcccaggggtttgtccttcaaatctaggtcatagtgttgatagaatggagagtccttcatcattgcactcctggcaacatttgtcactccaggacgttcaactcccatgtgaaactgaagagggtctatgacagctgcattacgcttgaataggatggaaggagcaacaaaggaatagccctgaaacagcttctcagaactctggggcagggctgcgggagaataagtgggatccatttctgtgaactcttctgcaaagttactcacatctaattcatctcgaatgactggcttaaatggtgcaggcacttttttggcggctaaatcatccccaa

SEQ ID NO: 188131 - DNA, 961 bp, Homo Sapiens
ccaaccccctatccctggggctcaggacattggcagctgaagccctaaggagctggtgctcagacccctgaggctagtggtgtgagtcggagagggagggaggaggcacagggaaggaacagagggttctagctcagggaggcatctctgccaggggcgaggctgctgcttccctggggagaggggccctggcagactccctttggtccgtggtgaggcaggcccagggccctttctccagagagggaaggaggtgtgggcccaaggggaggtgggagctgggggctgctgccgggggtgggctgggttctctggcacaaggagccagggtcactgaggctgtcagaagtggactgcgaagtccactggattgggaaggaaccaagcctcaatggggactcaagggccacggcccacctcccttccaggtcccctttggcctggggctgcccctgggtggaaggctcttcctaaggcccagagagactcacttgggaaggaggggaccaggggggccagacagtctccaactgggcaaagagagcctggcagttacagccctggggttcaggctgaggaggtgctgctcttccaatgtgggcctctgcccctctgctcccctggctgtggccaagccagaggatgatgggggcctaattccctgtctggagcagaactacatttagaaaattctaaacaccctgccccagtcggggaaacagaaacaaatggtcaagtaaggtgccaaaaacaaaacaaaacaaacacctggacataaataatgagggcggggcagacagggtgtgtgagggctgagaggggcccctacctgggggcggagggagcccctgggagccatctcagaaccacaggcgccccctgagcaccgttagcaggagcgctgggtggtcagacccactcctgcagcgagcgcttgcagtaaagcaggacacgtggccaa

SEQ ID NO: 188132 - DNA, 2041 bp, Homo Sapiens
ttggggcatattaatctttgaaggagctaacaaaataggcttattcttttggcctaaaattaccaaaatggattttaaaaagagcaaattgacactcgtggtggtcgaggatgatgatcagggacgtgagcaagagcacacgtttgtgttccggttagacagtgccaggacctgcaaacacctttggaagtgtgcagttgagcaccacgcattcttccgactgcggacgccaggaaacagcaaatccaatagatccgactttatcaggctgggctctcgcttcagattcagtgggcggacagaatatcaagctacacatggctccaggttacgaagaaccagcacctttgagaggaagcctagtaaacgttatccatcccggagacattcaacgttcaaagcaagcaacccagtgatagcagcccagctctgctctaaaacaaatccagaagtccataattaccagcctcaatatcatcctaatatccatcccagccagccccggtggcatcctcactctccaaatgtcaggccatcctttcaggatgacaggtcgcattggaaagcatcggccagtggagatgacagccattttgattatgtccacgaccagaaccagaagaacttaggagggatgcaaagtatgatgtatcgagataaactcatgactgcactttgagagactgaagcatctctcttccattcaccttcatagtttcattgcattccatgaaaagtgtcttggcctcagatggatggatgtgtttggacgagtgtctttaaggagtagtcctgaaaggtgtttttggtgtccatgtaaatatttgaagataaaaccactatagcttgtcataatttactgttgactgcattctcattaaaatgaaggtaaaggctcaggaatcatattgatgttctgattttaaaattggagtcaaagtctatgtttatcattttactatgttcctgatgttctttgttatttaattaatgggagcaaataaaaccagaagagcttgggaagattgctcagcatatattcctgtcgtagaagttgagattgctagggtccagtttccctagtgtggcctggacgagtcatttccccttcattgacctcattttccccatctgaaaagagagggttggactaagtgatctccaaggtcctttccaactctaaaattctgcaatttgttaacatttcattttgtttaggttgaggacatacattcaaactaattttatcacaaggaaaactgcaatacccacttccttgacagagttactcctttcagaagctaaataaagtatataacttattagatgttatatagatacagggggactttgaatttcacatcttaaagcagttgagctactttgaatttaagcagtcgtactaatcttaaattgcatagcatttgttttgatcgaatttgctgctcaagtatgggaataatttttaatgtcttaatgattggtgctgctaacttgcgtgatttcagaagacataattgtgaatacacactgtcagaattgggggattggtttttaccctagacttcactcttaaaaagcaacgtgcaatcaagatcatttatggctcaaatgaaagcatataaggttttcttgaagttgtgccaaagcattctgtagagtaggatgagatggttgttgccctagtctgttggtagaaccagaaatcaatatgttgtcttttaggttaaagcttgtaccaaaatatttatttcccccatttcaagccctgagtcaaacatttttttctcttaataatagacctgaaatgttttattagtatttctgtgaaatcagttgattcttgtgccatttttgtatatgtaattgtaattttgcccatgttaggccctctaaaaaatgtttgacatcctttgagatattttattactaaaatctgatcttttttggctactgcaaaaaacactacagcaagaaggtatcagctgcataccttgcaagtggagctgactacctataaactctccctaaggcatttgtt

SEQ ID NO: 188133 - DNA, 1168 bp, Homo Sapiens
ttggattttatttgataaataatggtaattattctcctttgaaaaattagttttgtgttgctccaaaaagctagctatatatctcagctttcttatttcttttatatgttgagggattttaaagggagaggaaaagcaatttgaaaatttttcattaagtgttttattttaacattattgtttcaccttatcagcttataggaactaaattagagaatcacctctttttgtccggttatctcttaactatgttttcatttgctgaaacatattgtacccttttaaattttttacagagttttaacgtcttttccactgcatcctttataaaaataagtacaaattccagagaggttttcctacacaaatacaaaataattggggaagggctactcaccttttttatgaaacagaatatgtaacaagcagaggacaaatagactgacctggttaaacgtaggttctggatgttgatgggtagcacctgcagtaaacttgaccatgctctgaaaaaagaaatttctgggtattgatggtttataaagccagctttgtgctattggttcagtatattttatcaaatctttgacttcatcaacccagtaatgacatagtttaaattttaaaatgagagttctgttttgctgtatttctcctgctagcctagctttgtattttatcatcagcttcagtatatacttgtatatatatacctggattcaaatggttcttcatacaacttaatgatcagaaagaatgctgctgtaaacaccccactcaagattgctgctggaatttctacccaaagctgtctgagagtttatctttacctcagtgcaggcttaaataatggtgctaatactggtagatatatactgtgaagcctggttcacattcatgctagaaaatgattttgggaaatcttttataggagaggttacatgatttttctctttcacatatctagaaggacttgcctcaaagaagaatgttgcagcaaacaggatatactctagctggtgcccaaaggttcttgcaaaaccatgaatcttgcttttagcagtaaagggccagacactttggagcattgaaaggccttagcccctgctcccaactacgtgccatgctgggtagtgtgtatcctgtacatctgtgtgccaggctgggg

SEQ ID NO: 188134 - DNA, 962 bp, Homo Sapiens
ttggctacgtctgtgcggctgcgtggggctcggccgcgcggactgaaggagactgaaggccctcggatgcccagaacctgtaggccgcaccgtggacttgttcttaatcgagggggtgctggggggaccctgatgtggcaccaaatgaaatgaacaaagctccacagtccacaggccccccacccgccccatcccccggactcccacagccagcgtttcccccggggcagacagcgccggtggtgttcagtacgccacaagcgacacaaatgaacacgccttctcagccccgccagcacttctaccctagccgggcccagcccccgagcagtgcagcctcccgagtgcagagtgcagcccctgcccgccctggcccagctgcccatgtctaccctgctggatcccaagtaatgatgatcccttcccagatctcctacccagcctcccagggggcctactacatccctggacaggggcgttccacatacgttgtcccgacacagcagtaccctgtgcagccaggagccccaggcttctatccaggtgcaagccctacagaatttgggacctacgctggcgcctactatccagcccaaggggtgcagcagtttcccactggcgtggcccccgccccagttttgatgaaccagccaccccagattgctcccaagagggagcgtaagacgatccgaattcgagatccaaaccaaggaggaaaggatatcacagaggagatcatgtctggggcccgcactgcctccacacccacccctccccagacgggaggcggtctggagcctcaagctaatggggagacgccccaggttgctgtcattgtccggccagatgaccggtcacagggagcaatcattgctgaccggccagggctgcctggcccagagcatagcccttcagaatcccagccttcgtcgccttctccgaccccatcaccatccccagtc

SEQ ID NO: 188135 - DNA, 1180 bp, Homo Sapiens
agcaatgcttttctataatagccaactttgtacaaaaaagttggcacttttgttgaacattccaactccagaatgatccccaatcaccctaatctcagaatgctggaatgatgtctgttggaaaacccaggactccacacacaaaactcctgggattttgtttcccatctctttctaggtgtttgcaatgtacaaataatacagctgtgctaatctcacatttagccatgatagatgatggttctagagtgtacttccatttgtaagtcctcctgataagtgctttcttgtttatcactatgtaaatctgaaatattttgtacttcatttgtttttatccattctgaattttcaaagcataaaaatgtcaaagaaaaattgagataaacattttgttcaccattaaatgtttgcatctgcagtctatgatgagaaacaatgaaattatgactaaaatttaacaaatagtattttcttatagaagcaatgtattaaatgattagatacacaggacagttcacagcaaattgtttacttacatggcataattgaaatactgttatttgtaaagagttctatactgcctaccttagctaaccagaattgttcatagacttgtgataatatggtgttatgggaaaacacattttgtgcgcatgatgaagagagcaccgtgaatctagtcttgactgcccctggtggaacatttgaaagcccttgggactccaggagagatgtttttgcagcatgtatgctaaatttgtgagttagcaagaccctgctgtgattactatgttgtacagatcttcaaagtatattgcctaatatgagtcatgttatttctagattgaatttaaagtaagtatggattatggaagtctagtaaatatacttttccctatttttgtcctttttcagtcttttggtaagcatttattaagtacctgctgtatgtcaaggcttactactgctttccaatccttggtgatatgaagacagataagcacgctgcttgctattaggaatctgagctgagtggaaggccaactattaaacctacattgtaataaacaatggtggatgctatggactcattcagtctgttcataaaacatggactgatgggtctgctccaggccacatttgtttcttaacagtaacgtggctaggcatccattta

SEQ ID NO: 188136 - DNA, 1669 bp, Homo Sapiens
ttggtgcagtagtatactagagtttaggaaaatgaaaattttagaaaatatgttttgtcaccctgttggtcagaaagatgtctttctggttttaacgcatgcaggcatgtaaatatttgtctggagtcacagtattaatgaatgagatcttaagcatctggtgacatcagaactctgtgtcagccacttttatttgtatattgaaccctagctagtgccccaagctgcactattgggaatggattgtggctgaacagcaaatcaaaacaccagaaatatttttatatgttaacgtcatattatgttaatgttgctgaaaacaaaacctaacaaaccttgatgtaccagtccaataccatgtagcgctgagtgataaagttaaaatgtgctgtgcttcccacccttgtcagagggaagggtggctatgtgttattttcactgtctttttgaaagttacagtatgtgttttcactttcgtgcagataactggaagtaaagcggcaaacagtgcttattacatgctaaagttaccttctctttgttttttgcatatctggaattacacctttaaagactgatatgaatcagtacggtcactatacattttatgatttttctgtcatcttaaaattgtatgatcgtaacattatttattaccacaaaacagcaaaatcttcaatgtctaagaaaactagcttaaaatgtttaaatatagttctgattgggtattaattacttgattaagaaaaaattaacattatagatactctggcattacgcttctataccttttaggtcttccttgcaatactggaacataattcttttgtgtagctcactattagccagctaagttcatctttttaataccataaaaaggttatatgtacagttcctattttagcttgcttacaaagggagcattatttttatttaaagtattgctagtaaatgatttgtagaaacttggttttctaagcatagttcttccataaccaccttttgttgtttgagcacaagggattcttttcctagttctatgtgtttgtttccctatatgcagtctttaaaggattacaacacttaaaattgaatggacttgtgtcaagctttttgcatcatacattttttgaaagatttttaaaaaagcctacaacttacatatgtagtagaatcagccattgctctgctcctggcatagagtcacctgttatgtggattaaatagttttaaaatacatatttgaagacctttgagaatgctttagtgtttgatttgaaataaaaggaaattttagcaaggattaaagaaaaaagctatcagctgtatgttaagagagactcttactaacatgttgtaaatattacaattcatgaaatgttattgtaagtctgtaacttaattttttccctgttttagttatacaggttggtttggaaatttgtgttttggcataaacaagtaaaatgtgcccattttatggtttccatgcttttgtaatcctaaaaatattaatgtctagttgttctatattataaccacatttgcgctctatgcaagcccttggaacagacatactcatcttcatgtaggacctatgaaaattgtcctatttttatctatatattaaagttttctaagaatggataaaggttattacgaattttgt

SEQ ID NO: 188137 - DNA, 1001 bp, Homo Sapiens
ttggctagacgtttcgggcagagctcggccgctgcggaggacaaggaactctccctctcccactagtctgacttcttccaaaatgagcggcctggatgggggcaacaagctccctctcgcccaaaccggcggcctggctgctcccgaccatgcctcaggagatccggacctagaccagtgccaagggctccgtgaagaaaccgaggcgacacaggtgatggcgaacacaggtgggggcagcctggagaccgttgcggaggggggtgcatcccaggatcctgtcgactgtggccccgcgctccgcgtcccagttgccgggagtcgcggcggtgcagcgaccaaagccgggcaggaggatgctccaccttctacgaaaggtctggaagcagcctctgccgccgaggctgctgacagcagccagaaaaatggctgtcagcttggagagccccgtggccctgctgggcagaaggctctagaagcctgtggcgcagggggcttggggtctcagatgataccggggaagaaggccaaggaagtgacgactaaaaaacgcgccatctcggcagcagtggaaaaggagggagaagcaggggcggcgatggaggaaaagaaggtagtgcagaaggaaaaaaaggtggcaggaggggtgaaagaggagacacggcccagggccccgaagatcaataactgcatggactcactggaggccatcgatcaagagttgtcaaacgtaaatgcccaggctgacagggccttccttcagcttgagcgcaagtttggccgcatgcgaaggctccatatgcagcgcagaagtttcattatccagaatatcccaggtttctgggttactgcctttcgaaaccacccccagctgtcacctatgatcagtggccaagatgaagacatgctgaggtacatgatcatttgggaggtggaaggagctttaacaccccagagcagcctgcaaattcaagttcatctttcaggcaacccctacttcc

SEQ ID NO: 188138 - DNA, 1276 bp, Homo Sapiens
ggcagtaggatatgaatcagcatcgaggagtgttcatccggagtcgtgatttcgtgaacgtagcactggggcttcaccagcactagtgaatggagtgatgaaaaactcatagaaggattctggctttaggttgtccacaatcaatgcgttttcttccgggttgtcaattttgtatttgcaacattctgaaccatctgaaagaactgccttttcaaatcgtgggtggcactgcctcgccttggatttcagatagacatggtacccttgtataaaaccaggttgagattcagtagagtaatctttccaactcagagtgaaggagtgggatgtcaatgtatccaccagcacgtgagggttgtctgaaggagcaagttcctgagagtatcctgtttttttctctaataaacaagcaatcctttttgtagataacccataaattctgaagtcatatcgaactcctggcctaaaagcatctgtgctaatgactgtgcttgtggtattgggacctacattcttccactggaaatcaccgagcacatcctgggtatggtcacaccagtccacaacatagcctataacatctccaggttggggtttccaagacagagagaatccaccctctgtgcctgcaattctttcttcctcaacctctttgtttttggggtctgcagagatgactattacagaagcaggagaagcacccacactgttgttggctatgacgcagatttggtaggaacacctgtcaaggattagttttgtgctgttggctggtgctggaatggaatggagctctgaactggatggtttgtctaggttttctacaactacattatagaacaggatctttccattggcatgcagttttgataatggcttccagaataaggtcacagtatgatttcctggctccaagctcacaattctccagacatcaggggcctctgagggagcagcttcaagtgtggtgaagttctgaccactccattcactccatttccagaagtggctggcatcagcacaccgtactcgcgccatgtactctgtggcaggttccagttcacttaagaagtactcaccgttcaccttgatggaaacattgtattgcatcatttttccttcaccatggagttcaatctgacacaaatatgtgaaattattccttatggagtgcaccttccaggtcatgatggcatttgtggcatttacattttcaaagttgacactaaaaggattcattaaataaactcgatgagtcaggttaaaaaggatccaa

SEQ ID NO: 188139 - DNA, 941 bp, Homo Sapiens
ggtgggatctggggaggtcctgtgggacaagacgccgactgtgggatccagtcagcacaagtgccaggcacagggcttggctgaattgagatgcatcaaactgtctgggaggagcagctgaaccgaaactagctacgtgacgatatgaggcaaaagacaaggaagcaggactgtgagcgcgggcagtcgggggaagataggaaccaacggccggagccaaaataggaaaaaagctagaagtagatgtttcccatggactgactttcttaaatagtggttcagttgctgttggtttacatgactctgtccaacttaaatccaatagcttttccacacctccacgttccaaatttgatgtgaaagctggtagtacacctaagccatcctcttcaaaatcttcagaaacttctggctgagataattccatttttcttttggaaaatggaattttcctatgttttcgtttggataaacgtaattctggccactcagaggatgctaaaagagactggttcctgacggcttcttggggttccccctgccagctcatgtagggcaggaagtctacatcttctttggcaataagttcagaaacttttggaatatcaggaaaaggtgactcattctcatcccttttctcaactgccacaaagcttgtaaattgtgttatgagagagttttctttactgagtttaataatcagagatttcaaggtttgttttttcatctcatgactggtttcattttcgtgaagaatgccatcttcataatctctgattagagctcgggctgccagcttgtggatcatagttccagttgtcttctgaagctcagtagtcgacaccattgtacaaaattctttctcttgaattagtgcacacagagttgcctgtgtgcagtgaggaatgaatccatagacaaggagtcgatcattgcgccaa

SEQ ID NO: 188140 - DNA, 1737 bp, Homo Sapiens
ttggagatgaccctgtgttgtcagtactgtttgatgcggggactctgcgggctggggagttccggcgcgagagcttctcactgagccctcagggtgaggggcgcctggaagttgaatttcgcctgcagagtctggctgaccgtggcgagtggctcgtcagcaatggcgttctggtggcccgggagctctcctgcttgcacgttcaactggaggagacaggagaccagaagtcctcagagcacagagttcagcttgtggttcctgggtcctgtgagggtccgcaggaggcctctgtgggcactggcaccttccgcttccactgcccagcctgctgggagcaggagctgagtattcgcctgcaggatgcccccgaggagcaactaaaggcgccactgagtgccctgccctctggtcaagtggtgaggcttgtcttccccacgtcccaggagcccctgatgagagtggagctgaaaaaagaagcaggactgagggagctggccgtgcgactgggcttcgggccctgtgcagaggagcaggccttcctgagcaggaggaagcaggtggtggccgcggccttgaggcaggccctgcagctggatggagacctgcaagaggatgagatcccagtggtagctattatggccactggtggtgggatccgggcaatgacttccctgtatgggcagctggctggcctgaaggagctgggcctcttggattgcgtctcctacatcaccggggcctcgggctccacctgggccttggccaacctttatgaggacccagagtggtctcagaaggacctggcagggcccactgagttgctgaagacccaggtgaccaagaacaagctgggtgtgctggcccccagccagctgcagcggtaccggcaggagctggccgagcgtgcccgcttgggctacccaagctgcttcaccaacctgtgggccctcatcaacgaggcgctgctgcatgatgagccccatgatcacaagctctcagatcaacgggaggccctgagtcatggccagaaccctctgcccatctactgtgccctcaacaccaaagggcagagcctgaccacttttgaatttggggagtggtgcgagttctctccctacgaggtcggcttccccaagtacggggccttcatcccctctgagctctttggctccgagttctttatggggcagctgatgaagaggcttcctgagtcccgcatctgcttcttagaaggtatctggagcaacctgtatgcagccaacctccaggacagcttatactgggcctcagagcccagccagttctgggaccgctgggtcaggaaccaggccaacctggacaaggagcaggtcccccttctgaagatagaagaaccaccctcaacagccggcaggatagctgagtttttcaccgatcttctgacgtggcgtccactggcccaggccacacataatttcctgcgtggcctccatttccacaaagactactttcagcatcctcacttctccacatggaaagctaccactctggatgggctccccaaccagctgacaccctcggagccccacctgtgcctgctggatgttggctacctcatcaataccagctgcctgcccctcctgcagcccactcgggacgtggacctcatcctgtcattggactacaacctccacggagccttccagcagttgcagctcctgggccggttctgccaaggagcagggatcccgttcc

SEQ ID NO: 188141 - DNA, 2006 bp, Homo Sapiens
ttggaagttgtgcagcttgagcaaatgccgaaagagggtattatgggtgggtggtgtgggcttgcaaatacaagcttggaggtgagacatggccagacatgactcctgcttccccttaggaagtaaatcttacttatggttgtgaactgcttggagtccaggatgcccagatgtgaggggcagatgaagggaatgttgctggaaaggtgccttttaaggctgctgagaatttctggactgtgtcctgatggacgcagcaccatcaaagcccagaatttctgaaaacggtgacaaggttaacataaggacaacaaatactccaccctgtcatggtatgtgaggtgtgggtgtggcggtttctgtgtacgtttgctcatacacgcacatccaaaagcctgtgcctcattcctggccatgggtgaggacttggtctgtcacggctgatgaggactcccacaaccggccaagttatgtcttattatacacccccagaaagagagaaagctgccttctggaggactgattccacatgctatattcagctgagttgatttctgtgtctatttcaacccataacctgaagaatgatcaccttattccttattcattaattttcttgattaatagggaaacttgggaatagctataaagtaaaacttgggtggaacctggggccctggcatcacacaagtgtgattaggatggtcaaggtcatcaggagtacagcctattatattcccacatcctgagaaaggtcatttctcccacacacgacaaagtcacagacatcctgcacctgccactaggcatcctcatcctactgacatgcccatttctccagttttcttaatctgagactcccttcccttgttttttaaagataccgtgcttctccacatcctcatccttcaaggagcatattttgctcttaggatggctttgggattcaagaatagaataataaatccaaacttggtcattcccattttgaagagatgcaagagggcccagtgaggacatccgcctccctgaaagtggtgctagacagagctgaggtcattgtatctgtgtatccacataggatttctcttaattcagcttgaattgatggggagggaggtaagagtagggtcagagttactcatcccttttcaaagaattgtgggtggaagtttgtaaaggccattcatttgattttcaaaatcaaagcgacagctctacttccacttggccttagatctctgctataccctgccatagccttgatgccactgggcacaagccacctgccaaatacaggagtggcctctcccagcctggcatgataggggggtctgtgccctcagatgtgttgacagctgctcttctgaattgccacacctgtgctacacttggaattctgtgctctgactctgcagggtaggaccacgtgccatctcacacagaggtcaaccgatgagcccactcactcgtacatgccttcttccacagtgggaagcatgatctggcaggggccgccctgtaggctggggatgggctgctgtgtgaatgttgacgttcgtttcatggagaaaggggaggtgaaagattgaagagcaggttcctgtcaatgttctgagttcgagctggaggtgtagattgaatagtctacatggtctgtgagtgtgtgagatgaacccttccatcctttgacacctggttgtatgtgtaggctaagaaggaaggaccctcctgtcagtgtgcaaagctgtaatctcatggactaaaggagagggggccacggggatggacaggagaagtcatgcagaatctaagcaggaatgcagatagaacacatctaggctcttttccccaggagagtgatgatggagcatatagatctggctcaaattcagcctccatcacttaccagtcagaaccctggcgatatcactttaactttctgaacctcagagtcttcacctataagacggggaaaataataccaccctttcagattgttgaga

SEQ ID NO: 188142 - DNA, 1996 bp, Homo Sapiens
ttggcagttatttcaagtaccattggaagaggaaggacaacgtggtggacctatccttgcaccagaggagattaagactatttttggtagcatcccagatatctttgatgtacacactaagataaaggatgatcttgaagaccttatagttaattgggatgagagcaaaagcattggtgacatttttctgaaatattcaaaagatttggtaaaaacctaccctccctttgtaaacttctttgaaatgagcaaggaaacaattattaaatgtgaaaaacagaaaccaagatttcatgcttttctcaagataaaccaagcaaaaccagaatgtggacggcagagccttgttgaacttcttatccgaccagtacagaggttacccagtgttgcattacttttaaatgatcttaagaagcatacagctgatgaaaatccagacaaaagcactttagaaaaagctattggatcactgaaggaagtaatgacgcatattaatgaggataagagaaaaacagaagctcaaaagcaaatttttgatgttgtttatgaagtagatggatgcccagctaatcttttatcttctcaccgaagcttagtacagcgggttgaaacaatttctctaggtgagcacccctgtgacagaggagaacaagtaactctcttcctcttcaatgattgcctagagatagcaagaaaacggcacaaggttattggcacttttaggagtcctcatggccaaacccgacccccagcttctcttaagcatattcacctaatgcctctttctcagattaagaaggtattggacataagagagacagaagattgccataatgcttttgccttgcttgtgaggccaccaacagagcaggcaaatgtgctactcagtttccagatgacatcagatgaacttccaaaagaaaactggctaaagatgctgtgtcgacatgtagctaacaccatttgtaaagcagatgctgagaatcttatttatactgctgatccagaatcctttgaagtaaatacaaaagatatggagtacattgagtagagcatcaagagcaataaaaaagacttcaaaaaaggttacaagagcattctctttctccaaaactccaaaaagagctcttcgaagggctcttatgacatcccacggctcagtggagggaagaagtccttccagcaatgataagcatgtaatgagtcgtctttctagcacatcatcattagcaggtatcccttctccctcccttgtcagccttccttccttctttgaaaggagaagtcatacgttaagtagatctacaactcatttgatatgaagcgttaccaaaatcttaaattatagaaatgtatagacacctcatactcaaataagaaactgacttaaatggtacttgtaattagcacttggtgaaagctggaaggaagataaataacactaaactatgctatttgatttttcttcttgaaagagtaaggtttacctgttacattttcaagttaattcatgtaaaaaatgatagtgattttgatgtaatttatctcttgtttgaatctgtcattcaaaggccaataatttaagttgctatcagctgatattagtagctttgcaaccctgatagagtaaataaattttatgggcgggtgccaaatactgctgtgaatctatttgtatagtatccatgaatgaatttatggaaatagatatttgtgcagctcaatttatgcagagattaaatgacatcataatactggatgaaaacttgcatagaattctgattaaatagtgggtctgtttcacatgtgcagtttgaagtatttaaataaccactcctttcacagtttattttcttctcaagcgttttcaagatctagcatgtggattttaaaagatttgccctcattaacagaataacatttaaaaggagattgtttcaaaatatttttgcaaattgagataaggacagaaagatgagaaacattgtatattttg

SEQ ID NO: 188143 - DNA, 1177 bp, Homo Sapiens
ttggatccctctttcatggtgggggggctcctgcttttccagggacaatgtcctggttcgacatggctcagccgctgaccacactgaccacagcctccaggctcatgctggccccactgacctggacgtggccatgttccatcgagatgctggtggagttggggcctggggcagggaggagggaggcagaggatctctccccatccccttttcttctaccccatactgggagcagtggctgactggggtgggacgatctcccccagggtccctgcctcaggaggcacctacctctccagccctggttctcccagtccactcctgattcgtccttccctctgataagtcccagcccttctgctgctacctccacttcaagccccggttcctgtccccaaccctaacccccttgccgtacccacctctagaccctcaactccaaattcccttatctccaagtcccttacctctgaaagtacttctgactttcccaactccaggcgcagactccgactctgacagtgacctgtccttggaggaggagaggagtctctccattccatcttcagaaagcgaggacaatggccggacgcgggggcgcttccaacggccactctgccgagcagcccagagtgagaggctcctcacccaccccaaagatgtggatggcaatgacctcctgtcctactggccagccctgggggagtgcgaggcagccccctgtgctctgcagacttggggctctgaaaggcgcctggggctggacaccagcaaggatgcagctaacaacaaccagccagacccggccctgaccagtggggatgagacttctctgggccgggcccagcgccagaggaaaggcatcctgaagaaccggttgcaatacccactggtgccacagacccgaggtgcccctgagctgtcctggtgccgtgcagccaccttgggccaccgtgctgtgccagctgcctcttacggtcgcatctatgctggcgggggcacgggcagcctttcacagccagccagccgctactcttctagagaacagctggacctgctcctccggcggcaactgagccgtgagcgactagaggaagcccctgcccctgttctacgtcccctgagccggccagggtcccaggaatgcatggatgctgcaccaggccgactggagccc

SEQ ID NO: 188144 - DNA, 935 bp, Homo Sapiens
ttggccttcaaatggaaaatgcgaccttgactttatgggataaacatctttcagacagtcagttttctagtcaggtttctctggtttcagagctgtatatacctgtcaactgaggaataaagggaaaaacccaagttcattcccacccaaagtcagaatccctcattggccttaaggtagcagtcataagacagagaattggacctagagtcccttctgtggggaataaggatacctagagaacattccacatgccaagaggatgcaggatttctacacaaccccttcccttcttggaagtcaagtgtaggtactgcagggcctgtgctcagctgtgaaccccgtatcctgggccccactgccgggaccgggtctgacatgccagtgccttcctgggctgagcacagattagagactctcccccttgtcagtcagcaccttaggaaaccatgatgggcacagagcatcacatgagctgtttctctccttaaagaagatccctggaaaggatgcttttcctctcctttgcctgcgcaggaattctaacaggagtgggtgaggatggcagagggacacagtgcctgtctcgcctccatcagggagagcagccatgccagggatgactagctctttgagcctgtcctcagaggatggcgaggcagccgggcagtggaggccttcatggtaacaaatgaaagctcagtatagaggaacagacactgtttacgtccctcccactgctaaccttatatatctctatagacaaatgtgataatgacatgatttcccacctgccctccaagaaaatggtgactcactctcaagtcagctactgtagagagggttctaattggttctgcaatttgctcttaaactctagcaggaactctcctcttaccacatcagcatgtaagtgataataactctgggttttg

SEQ ID NO: 188145 - DNA, 860 bp, Homo Sapiens
actttgtacaaaaaagttggggggaagtgacgcggtttcctcggcgccttttccggcagcggcggcggcagaactgggaggaggggttggaggccggagggagcccgcgctcggggcggcggctggaggcagcgcaccgagttcccgcgaggatccatgacctgacggggccccggagccgcgctgcctctcgggtgtcctgggtcggtggggagcccagtgctcgcaggccggcgggcgggccggagggctgcagtctccctcgcggtgagaggaaggcggaggagcgggaaccgcggcggcgctcgcgcggcgcctgcggggggaagggcagttccgggcccggccgcgcctcagcagggcggcggctcccagcgcagtctcagggcccgggtggcggcggcgactggagaaatcaagttgtgcggtcggtgatgcccgagtgagcggggggcctgggcctctgcccttaggaggcaactcccacgcaggccgcaaaggcgctctcgcggccgagaggcttcgtttcggtttcgcggcggcggcggcgttgttggctgaggggacccgggacacctgaatgcccccggccccggctcctccgacgcgatggggaaggtgctatccaaaatcttcgggaacaaggaaatgcggatcctcatgttgggcctggacgcggccggcaagacaacaatcctgtacaagttgaagctgggccagtcggtgaccaccattcccactgtgggtttcaacgtggagacggtgacttacaaaaatgtcaagttcaacgtatgggatgtgggcggccaggacaagatccggccgctctggcggccttactacactgggggacccaaggt

SEQ ID NO: 188146 - DNA, 1399 bp, Homo Sapiens
ctttttctataatgccaactttgtacaaaaaagttggatgggtttgttttgagcttggttctagttaatcttatggcttggatggacttatttattacacaaggagctaccataaagcgatttgtggttctcataagcactttagggacatataattctctattaattatttcctggctacctgtgttgggctttttacagctaccttacttagatagcttttatgaatatagcttaaaattgttgagatattccaatacaaccacactggcttcatgggtaagggcagactggatgttttactcttcacacccagccctgtttctcagtacataccttggtcatggtttactaattgattactttgagaagaagagaaggcgcaacaacaacaatgatgaagtcaatgccaataacttagaatggttatcaagtctgtgggactggtacaccagctacctcttccacccgattgcttcttttcagaactttcctgtagaatctgattgggacgaagaccctgacttattcttggagcgcttagctttccctgacctttggcttcaccctctgataccaactgattatattaaaaacttaccaatgtggcgatttaaatgtcttggagtccagtctgaagaggaaatgtcggaggggtctcaagatactgaaaatgactcggaaagtgagaacacagacactttgagtagtgagaaggaagtatttgaagataagcaaagcgtacttcacaattctccaggaacagcaagtcactgtgatgctgaggcttgttcatgtgccaataaatattgtcagaccagcccatgtgaaaggaaggggaggtcatatggatcatataacactaatgaagatatggaacctgattggttaacttggcctgctgatatgctgcactgtactgaatgtgttgtttgcctagagaattttgaaaatggatgtttgctaatggggttgccttgtggtcatgtgtttcatcagaattgcattgtgatgtggttggctgggggccgacattgttgccctgtttgccggtggccttcttataaaaaaaagcagccatatgcacaacaccagcccttgtcaaatgatgtcccatcttaaccatgtgcaatttgtcctttataagctttgagtatcttacagcttgcctttttaatgttagtcacaatgtttttgtggtttgaagtttagtttaatgttagtgcagtgacgggaaatacacattatgctaatgttgatgacagaaatttatttggttgccttgtgtgttaattgaatgcatacctaattgtaaaatttttttatttacaacattggaaattcagaagtttaatgtttttttgtaagcacaaaagaagtattatagaaatttatccta

SEQ ID NO: 188147 - DNA, 675 bp, Homo Sapiens
ccaactttgtacaaaaaagttggggaaggggagcctcatatgagatcatataacactaatgaagatatggaacctgattggttaacttggcctgctgatatgctgcactgtactgaatgtgttgtttgcctagagaattttgaaaatggatgtttgctaatggggttgccttgtggtcatgtgtttcatcagaattgcattgtgatgtggttggctgggggccgacattgttgccctgtttgccggtggccttcttataaaaaaaagccatatgcacaacaccagcccttgtcaaatgatgtcccatcttaaccatgtgcaatttgtcctttataagctttgagtatcttacagcttgcctttttaatgttagtcacaatgtttttgtggtttgaagtttagtttaatgttagtgcagtgacgggaaatacacattatgctaatgttgatgacagaatttatttggttgccttgtgtgttaattgaatgcatacctaaattgtaaaatttttttatttacaacattggaaattcaaaagttaatgtttttttgtaagcacaaaacaagtattatagaaatttatcctagcaagactttacaagataggatccaattctaatggaaactgagcagagtttcttatccctaaatgtttcctccctttttacaatctc

SEQ ID NO: 188148 - DNA, 919 bp, Homo Sapiens
  misc_feature (367)..(429): n is a, c, g, or t
ttggctttatgatggaaaatatttccagttgtcaagatttagatatagcaaagtaagaattaaatttggatacaatttctcaaccttggaactatggacattttgtaccagataattctgttgtgagtgggtgtcctggggattataagaggtttagcactgtccttgacctctacccacttatgccagtagtgttcccctctccaaatatctttagacattgccaaatgtctcttggagatgtgaaaggcagggaggggaggttgtcccctgctgagaaccattggtttaaggttaatctggctctgctttcatagactactctgttacccaggctggagtgcggtgatgagtgatcatagctcannnnnnnnnnnnnnnnnnnnnnnnnnnnnnnnnnnnnnnnnnnnnnnnnnnnnnnnnnnnnnntgaaccaccacacccagcccagtcaatttgtttttagaatgttcccaagaatatagttatgttgctaaataagatactaaaataatcccatactatatttcttgacagaaaaactattaaaatgtatacatgataaaaatttcttttatgaagcaaaatatgttttgttttgctcatgaacgtgaggtattttggaaaaatggtaaagaagtgcagagtcaagtcatagcgactaataatgggttattttcttaaattgtatgcttatgttaattctcacagtctttttgtttgggtctgtgacagatcttacaaaagatcttttagacctatgattcttaacaaaattaaagaattaagtcggaaccaatttcccacaatgtctcatctaagaaaggactcacagcccagcagccaaggagatgacgccaatggacaggagtgggctccctgaccttcaaggaagatttgagctatctgggaaaaaaca

SEQ ID NO: 188149 - DNA, 1407 bp, Homo Sapiens
  misc_feature (1024)..(1074): n is a, c, g, or t
ttgatgagcaatgcttgctataaaaaccaactttgtacaaaaaagttggctggttgagaccaccatggttccaagtccagaagccaaactgacagaagttgacaattatcatttttactcatctataccctcaatggaaaaagaagtaggtaactgtagtccacattttcttaatgcttttgaggattccttcagcagcatcctctccacagaagaccccaaccagttgacagtgaactcattaaattcagatgccacagtcaacacagattttggtgatgaattttattctgctttcatagctgagcccagtatcagcaacagcatgccctcacctgctactttaagccattcactctctgaacttctaaatgggcccattgatgtttctgatctatcactttgcaaagctttcaaccaaaaccaccctgaaagcacagcagaattcaatgattctgactccggcatttcactaaacacaagtcccagtgtggcatcaccagaacactcagtggaatcttccagctatggagacacactacttggcctcagtgattctgaagtggaagagctagatagtgcccctggaagtgtcaaacagaatggtcctaaaacaccagtacattcttctggggatatggtacaacccttgtcaccatctcaggggcagagcactcacgtgcatgatgcccaatgtgagaacacaccagagaaagaattgcctgtaagtcctggtcatcggaaaaccccattcacaaaagacaaacattcaagccgcttggaggctcatctcacaagagatgaacttagggcaaaagctctccatatcccattccctgtagaaaaaatcattaacctccctgttgttgacttcaacgaaatgatgtccaaagagcagttcaatgaagctcaacttgcattaattcgggatatacgtaggaggggtaagaataaagtggctgctcgaattgcagaaaaagaaaactggaaaatatagtagaactagagcaagatttagatcatnnnnnnnnnnnnnnnnnnnnnnnnnnnnnnnnnnnnnnnnnnnnnnnnnnnagccttcacctactgaaaaaacaactcagcaccttatatctcgaagttttcagcatgctacgtgatgaagatggaaaaccttattctcctagtgaatactccctgcagcaaacaagagatggcaatgttttccttgttcccaaaagtaagaagccagatgttaagaaaaactagattcaggaggatttgaccttttctgagctagtttttttgtactattatactaaaagctcctactgtgatgtgaaatgctcatactttataagtaattctatgcaaaatcatagccaaaactagtatagaaaataatacgaaaactttaaaaagcattgg

SEQ ID NO: 188150 - DNA, 1552 bp, Homo Sapiens
ttggcaagttgcagtgaaggcctcacagatgggcgccgtgagtcaatcatgtgaggacagttgtggagactctgtcttggcggacacactcagttctcatgatgtaccaggatcaccgactgcctcattagtcacaggagggagagaaggaagaggctgttcggatgtggatcccgggatccagggtgtggtaaccgacttggccgtctctgatgcaggggagaaggtggaatgtagaaattttccaggttcttcacaatcagagattatacaagccatacagaatttaacccgtctcttatacagccttcaggccgccttgaccattcaggacagccacattgagatccacaggctggttctccagcagcaggagggcctgtctctcggccactctatcctccgaggcggccccttgcaggaccagaagtctcgcgacgcggacaggcagcatgaggagctggccaatgtgcaccagcttcagcaccagctccagcaggagcagcggcgctggctgcgcaggtgtgagcagcagcagcgggcgcaggcgaccagggagagctggctgcaggagcgggagcgggagtgccagtcgcaggaggagctgctgctgcggagccggggcgagctggacctccagctccaggagtaccagcacagcctggagcggctgagggagggccagcgcctggtggagagggagcaggcgaggatgccggcccagcagagcctgctgggccactggaagcacggccggcagaggagcctgcccgcggtgctccttccgggtggccccgaggtaatggaacttaatcgatctgagagtttatgtcatgaaaactcattcttcatcaatgaagctttagtacaaatgtcatttaacactttcaacaaactgaatccatcagttatccatcaggatgccacttaccctacaactcaatctcattctgacttggtgaggactagtgaacatcaagtagacctcaaggtggacccttctcagccttcgaatgtcagtcacaaactgtggacagccgctggttccggccatcagatacttcctttccatgaaagcagcaaggattcttgtaaaaatgatttggacacctcccacactgagtccccaaccccccatgactcaaattcacaccgccctcaactgcaggcgtttataacagaagcaaagctaaatctaccgacaaggacaatgaccagacaagatggggaaactggagatggagccaaagaaaatattgtttacctctaattgtgttgtcatttttccaaacaaaacaaaacactggcacttttgggagaaactttttgtctccattccttatgtatgtgtgattgtctgtgtccaaattgctttaagaataatatttaatatttcctggaagctcattttttggcatgagtctaattaaattattgaaagccaccctgtttgtatattctttaacttatcaaatctaatttcagatttctggagagaaactaactttgataagcaggatcattttaaaagttgttttgacgctagagtaaa

SEQ ID NO: 188151 - DNA, 1239 bp, Homo Sapiens
  misc_feature (665)..(826): n is a, c, g, or t
ttgggttttataagtgaagattttattttaaaaaccagtgggaaagagtggggggtttctttttatgtctgggtcattcaggcagtacatctgaattaagctgaatgtagacaaataaagaaaaacaaaactgcgcccgtcttaggcctgggtgtctgacccaccagcagtgcaatgggcaggtttccccactctattcctgctcttgggaaagcagcgtgggccatcaggatggtccctggtccttagagagggtccagttcaggcttctagacattttactcatgctcagcgaaggctggttcctggtcccctgggctgtgtagacccggtgtcccaccaggctccaggctcccaccatctacagaggggcttacagcgcccattctggtcttggggaacccatcacaaaataggctttttctgctccccgattctggtgtagttctaagtacacagtgatgtcctctgtaggggcgtgcctgtggtggaacataacgcagttacaaaagaaagggcaggtgaggcctgggtaaccccagccatggaccgtcagtggctggagggagcttcgtgtctgtgctggagctgcagcctgctcgccatctggaggctcagtggagtggggagttggggttctcataccagcagatttccctagagcnnnnnnnnnnnnnnnnnnnnnnnnnnnnnnnnnnnnnnnnnnnnnnnnnnnnnnnnnnnnnnnnnnnnnnnnnnnnnnnnnnnnnnnnnnnnnnnnnnnnnnnnnnnnnnnnnnnnnnnnnnnnnnnnnnnnnnnnnnnnnnnnnnnnnnnnnnnnnnnnnncctgccctatcaaaatatcaggtgtatggaggtggagtcccaacgctagagcagcccttctcagctccaccctgcccggggagggaggaggagctctggtttcagagcagtgccgggattgcctttccccaggatctgtgtcggccatccaggaagaactgtactggccaagcctgggaccacacgtctgcagagatcctgctctgctggcctgagccccaggccttggcctcctgtgcttgggtaaccatggccactggggaaaagcaaggaccgtgtttgactttcttggagaggtgaaaagaggtgaaagaacaagttgtgtgctagaaaacttttgaggaattcttatttgtgttagagcagagggagggtcccagataccaagtggcgcctcccatgaaaggctggga

SEQ ID NO: 188152 - DNA, 1254 bp, Homo Sapiens
caaagcaggaacccgtcttcttagcagacaaatcatggtacacacctgagaatagaattctgaccaagaagaggtaatatccagaatatctgagcagaacaaaacaaaggcttacatgcacagtttgaggcccttctcctccagggtgctgtgagcccatatggcacctttgcaaattaggaaaggcaccccttcttcttgggagaagtagccccacaccagggcacgcacacagcttagtgagcagaacacaagctgaattccagcctccattagctgcaggtgcccttgtgcagtgaacaacctgcacaactgtacatccagaagatcaatgtctccctcaatagtactgaagacctcctctcctcagaactggaagacttgggcttgttcagatttgtgagtctactctagactcctcctatttccttgggtagccctgaggtcttctttgtccagggaagccgtctttcctttgggccttacttcactgttagcaccaatgttgtcttttctcacatatgcaaaagttataatttagtttctagcgtctggttaacagattccctgtgcctgctatcggagctgccacaccggctgctttagatcctctccataagtgccgcagcagggagagaagggaagacgtgcacaggcagctgtgatcctgctgggttccagagcatgcccttctggcctagctggaagctggaggaagataggaaatgtgtacccagctttgacggttccccactctaatcgttatctgttactctaaaagtcacttagctggcaaagccactgtcctggcttcttctgtatcccactaggtatgaaaaaggactggggataagggggaagaggtatgttgtttccaaggaaaccaaggggtctggggtcccctacggctgactctcatggtagggtggccaccatattttccggccccactgcaaacttgcccccgatgtccctcagtgccgatgttgggggtggaatgcggtctgtcggtggggtcttttgaaagaagagctgacaaaggcacaggctgccagcagcaacatgctgactggctattcggctcatccgtggctgacacccagctggtcccaggccgccagtggtggcagtggctctgtacctcaggaccaatcctggggcctccaagtgggaccaagtcagttttgaggcctagccagaagtttggttcattttgcgacatgtttgaggggtccttagagaaacccaacccaa

SEQ ID NO: 188153 - DNA, 1437 bp, Homo Sapiens
agggagaaggcattggaaactaactgtagctctggatttcagtttcagcggatgttctctccagctttcaacagaccttgcactcaactttgctgaatcccattccaaaatgtcggccagcgctctgcaccttactatctcatgacttcttcagaaatgattttctggaagttgtgaatttcttgaaaagtttaacattgaagagtgaagaggagaaaacggaattctttaaatcatgcgcagggagaaactccttgcttgctctcaccagccctgttccagtcacgggtgatccccgtgcttctccagttgtttgaagttcatgaagagcatgtgcggatggtgctgctgtctcacatcgaggcctacgtggagcacttcactcaggagcagctgaagaaagtcatcttgccacaggttttgctgggcctgcgtgatactagcgattccattgtggcaattactctgcatagcctagcagtgctggtctctctgcttggaccagaggtggttgtgggaggagaacgaaccaagatcttcaaacgcactgccccaagttttactaaaaatactgacctttctctagaaggcgatccattttctcagcctattaaatttcccataaatggactctcagatgtaaaaaatacttcggaggacagtgaaaacttcccatcaagttctaaaaagtctgaggagtggcctgactggagtgaacctgaggagcctgaaaatcaaactgtcaacatacagatttggcctagagaaccttgtgatgatgtcaagtcccagtgcactaccttggatgtggaagagtcatcttgggatgactgcgagcccagcagcttagatactaaagtaaacccaggaggtggaatcactgctacaaaacctgttacctcaggggagcagaagcctattcctgctttgctttcactcactgaagagtctatgccttggaaatcaagcttaccccgaaagattaaccttgtacaaaggggggatgacgcagaccaaatcgagccgccaaaagtatcatcacaagaaaggccccttaaggttccatcagaacttggtttaggagaggaattcaccattcaagtaaaaaagaagccagtaaaagatcctgagatggattggtttgctgatatgatcccagaaattaagccttctgctgcttttcttatattacctgaactgaggacagaaatggtcccaaaaaaggatgatgtctccccagtgatgcagttttcctcaaaatttgctgcagcagaaattactgagggagaggctgaaggctgggaagaagtaggggagctgacctggggaagataataactggtgacatagatgtgagtttaactttacgaaaaaggatttcccttttttttaaaaaaatcaatacctcaaaagcaggcttttgggacagaaaacccc

SEQ ID NO: 188154 - DNA, 2026 bp, Homo Sapiens
actttgtacaaaaaagttggctgaaggtaccctagagaatacaggaaattcttcagagccaatgctggaaagaaaatctatgagtttacgcttcagagaattgtgcaaaaatacttcttggaaatgaaaaataagatgccttccttatctccaatagacaagaattggccctcaagaccttacttattcttggattctactcacaaggagctaaaaaggattttccacttgtggaggtgtaaaaaatacagggaccaattcacagaccagcagaaacttatttatgaagagaaactagaagccagtgaactcttcaaagacaagaaggctttatacccatctagtgttgggcaaccattccaaggggcttacctggaaatcaacaagaaccccaagtataagaaactcaaagatgccattgaagaaaagatcatcattgctgaagtcgtgaacaaaattaaccgtgctaatgggaagagtacatctcggattttcctcttaacaaacaataatctccttcttgctgaccaaaagtctggacaaatcaagtcagaggttccactggtggatgtgaccaaggtatcaatgagctcacaaaatgatggcttcttcgccgtccacctcaaagagggctcagaagcagctagtaaaggagactttctcttcagcagtgatcacctgattgaaatggccaccaagctctatcgcacaactctcagccaaaccaaacagaagctcaatattgagatttccgatgagttcctggtacagttcagacaggacaaagtatgtgtgaagtttattcagggaaaccagaaaaatgggagtgtcccaacatgtaaacgaaaaaacaaccgtctccttgaagttgctgtcccttaactggcgcctcctctctactttcatggacttgttcctttgtaatagtgcaatttggttttgttttatttggggttcattgtatgtttgggaatcaccaaaggcttttagagttctttggcaaaataaaaatatttgactaatcaatttttattattggaatagttttaacctttcaaatacatgttctgtcctggagcaggattgtagaaactaacagtgtctattttcatgtctgatgtgttcttcctttagtcatcatgttaggtctgtgtaccctaaatcagcatattactcataaatcattaattaatataagcataggaaatggtcttaaaagatactgcattcattcatcagatatttattccatgcctactctatgctaggcactgtgctagatggtatgaaaacttattaggaacctttttgtttttgagaccattgcattctggctggtttgtgctggtttaacgacatctaagaaggtttagaaatggtgagaccaaaacaataactgttaatgatggacagcattattaggaaccctgtagtatgatatttaacaatataggcttcaagaagggctggtcctaagagggggcagaaatgaatgaccaggttaaatccctctacatgtggtttctgtttgaaaaaaagaaaactgacatttgaacaggacttttaatttgtttaaaactctggtaattacttgtaacagtagaaaatagaagtcattcttattttagaaaaagtgacagaagcagtccagtaagattatatgtttctgtttctggtaaataccatatatgatcctcgaaatgataatatctccagaatattgttttcacccaaatttgagtagatattttaaacacctaacaaagtaaagggctaaaagccattcagatagcagtaaaacattctgtatgatgtgcaataaaacatccaagatcttttttgaaagttttatttataatatacatttttgtatgagaaacgtgattggtacagggtgcctattttagtcatggatcaaaatttgtgtaacttgcagggctttctttctttttcttcaaatttacagggttcattttggaaactacattttaaactttggaatcaaattgtttcttatttgggagga

SEQ ID NO: 188155 - DNA, 972 bp, Homo Sapiens
ttgggaaagatacaaaatgctttgtaaacaaacatggcctcattggaaaggaccagccagggctggtgtggaggtcctatttaatgaattagaaattcccgtggaagaatactcctttggtagatcaaagatattcatccgaaacccaagaacattattcaaattagaagacctgaggaagcaacgcctggaggacttggccactctcattcagaagatatatcgggggtggaaatgccgcacacacttcctgctaatgaaaaaaagccaaattgtgattgccgcctggtacaggagatatgcgcaacaaaagaggtaccagcagacaaagagttccgccttagtaattcagtcttatatccggggttggaaggctcgaaaaattctgcgggaactgaagcatcaaaagcgctgtaaggaagcagtcacgaccattgctgcatattggcatgggacccaggtacgtagagaatacaggaaattcttcagagccaatgctggaaagaaaatctatgagtttacgcttcagagaattgtgcaaaaatacttcttggaaatgaaaaataagatgccttccttatctccaatagacaagaattggccctcaagaccttacttattcttggattctactcacaaggagctaaaaaggattttccacttgtggaggtgtaaaaaatacagggaccaattcacagaccagcagaaacttatttatgaagagaaactagaagccagtgaactcttcaaagacaagaaggctttatacccatctagtgttgggcaaccattccaaggggcttacctggaaatcaacaagaaccccaagtataagaaactcaaagatgccattgaagaaaaatcatcattgctgaagtcgtgaacaaaattaaccgtgctaatgggaagagtacatctcggattttcctcttaacaaacaataatctccttcttgctgaccaaaagtctgga

SEQ ID NO: 188156 - DNA, 1194 bp, Homo Sapiens
ttggccgagatatgagggagctttcgctgcgggagggtgacgtggtgaggatctacagccgcatcggcggagaccagggctggtggaagggcgagaccaacggacggattggctggtttccttcaacgtacgtagaagaggagggcatccagtgacggcaggaacgtggacaagactcgcagattttcttgggagagtcactccagccctgaagtctgtctctagctcctctgtgactcagaggggaaataccaacctcccagtcttccactgcccacagggatagggagggtgttgagaatcctaaactcgaaccgtttcactgtcagcctgccctcggcgacccatcactgggtatgctattgtacatagaggaaacctgggctagccccacccagagcgcagaggagggggcaccgacagcgctgcgagccaggctctgggtagtggctgaggccagaggcccatcgcctgcccctgtccaactgagatggccttcaggagcctaggtttgaacagcagatgctgtcccaggaagggctagggacatcggaggggacctgcccccacaccctctgctcagcccctggactcagccttgcctgtcttttcctgctgctcccagggggaggtgtcagacctcgggaggcagacgggaccagagccaggctgttcactgtgggcccacttgccccactgtgctagggcgcgggaggagagagcactgtggtcgccctctgcagccactctggctcccaagacttccctgactcccccactcccctccttgccaggggcacacccggaccccacacggcaggcccctctcttgggaggggcctttggaatgatgaaattccaaccctgctgcccggtcagcggtaccgtttcctgccctctctctgagaggccctttctggagtcctgggaaggtgtctgcctggccgcgctgccagatcagtacatcttttgtaaaaaccctgaaatgggcagggaagaaaacggatttcccctctctagatccctgccaggtccctctccaggaggcccctctgctctcctgaagggtggtccctgagggtctgcccagccttggcacgagaggttggttccagcccctggcaggcttcctttccagggtccctgcagcctacaaactgggcctcggcgactcaaaataagtgctcttggggg

SEQ ID NO: 188157 - DNA, 1243 bp, Homo Sapiens
actttgtacaaaaaagttggggtccgtggaccaggtcaaggcgcagctccgcaccgcgctggcctctggaggcgtcctggacgctagcggcgattaccgcgtctacaggggcctgctgaagaccaccatggaccccaacgatgtgatcctggccacgcacgccagcgtggacaacctgctgcacctgtcgggtctgctggagcgctgggagggcccgctgtccgtgtcggtgttcgcggccaccaaggaggaggcgcagctggccacggtgctggcctacgcgctgagcagccactgccccgacatgcgcgccagggtcgccatgcacctcgtgtgcccctcgcgttacgaggcagccgtgcccgacccccgggagccgggggagtttgccctgctgcggtcctgccaggaggtctttgacaagctagccagggtggcccagcccgggattaattatgcgctgggcaccaatgtctcctaccccaataacctgctgaggaatctggctcgtgagggggccaactatgccctggtgatcgatgtggacatggtgcccagcgaggggctgtggagaggcctgcgggaaatgctggatcagagcaaccagtggggaggcaccgcgctggtggtgcctgccttcgaaatccgaagagcccgccgcatgcccatgaacaaaaacgagctggtgcagctctaccaggttggcgaggtgcggcccttctattatgggttgtgcaccccctgccaggcacccaccaactattcccgctgggtcaacctgccggaagagagcttgctgcggcccgcctacgtggtaccttggcaggacccctgggagccattctacgtggcaggaggcaaggtgcccaccttcgacgagcgctttcggcagtacggcttcaaccgaatcagccaggcctgcgagctgcatgtggcggggtttgattttgaggtcctgaacgaaggtttcttggttcataagggcttcaaagaagcgttgaagttccatccccaaaaggaggctgaaaatcagcacaataagatcctatatcgccagttcaaacaggagttgaaggccaagtaccccaactctccccgacgctgctgagcccttccctcccctaatctgagaagtcagcctcttggctcctcaggccaccatttaggcctgactggggtaagaaatgtcgctccactttacagaggtagctgtggtgttgaaacactggacttggatatgggg

SEQ ID NO: 188158 - DNA, 777 bp, Homo Sapiens
ttggcgcggcaaacatggcggtggactcggcgatggagctgttatttttagatacttttaaacacccgagcgctgagcaaagttctcatatagatgtggttcgttttccatgtgtggtttatatcaatgaagtccgagtcatacccccaggagtaagagcccatagcagtctgccagacaatagagcatatggagagacatctccccatacatttcaattagacttattcttcaacaatgtaagcaaaccaagtgcccctgttttcgataggttgggaagcctggaatatgatgagaatacttccatcatctttagacctaactcaaaggtgaatactgatggtctggtgctaagaggctggtataactgtctgacactggcaatatatggatcagtggatagagtgataagtcatgacagagactctccaccaccaccacctcccccgccaccacctccccagccacaaccaagtttgaaaaggaatccaaaacatgctgatggggagaaagaagatcagtttaatggaagccctcctagaccacagccaaggggaccaagaactcctccaggaccccctccacctgatgatgatgaagatgatcctgtgcctctgccagtgtctggtgacaaggaagaggatgctcctcatagagaagattactttgagcccatttctcctgatcggaattctgttccccaggaaggcaatattctgatgaagagaagtagagaggacaacacaagaagagagaagatgaagatgatgtggatgt

SEQ ID NO: 188159 - DNA, 1347 bp, Homo Sapiens
ttggcattccttcaaatgagagtcccctttacttggtaaatcacggcgagagtggaccagtcagatgcaacaggtgcaaggcctacatgtgcccatttatgcagttcatcgaaggaggaaggagatatcagtgtggattttgcaactgtgtgaatgatgttccaccattctatttccaacatctggaccacattggaagaagactggaccactatgagaaaccagagttatctctaggatcttatgaatatgttgccactttggattattgcagaaagagtaagcctcccaacccaccagcctttatcttcatgattgatgtttcatatagtaacataaagaatggacttgtcaagctcatatgtgaagaactgaagaccatgctggaaaaaattccaaaggaagagcaagaagagacgtctgcaattcgagtgggttttatcacatataacaaagttctccatttctttaatgtgaagagtaatctggcccagcctcagatgatggtggtgactgatgttggagaagtctttgttcctttgttggatggtttccttgtcaactatcaagaatcccaatctgtgattcataatttgttggaccagattccagacatgtttgcagactctaatgaaaatgagactgtctttgctcctgtcatccaggctggcatggaagcactaaaggcagcagactgtcctgggaagctgttcatcttccattcttccttgccaactgctgaagcaccagggaagctcaaaaacagagatgacaaaaaactggttaatacagacaaagagaagatacttttccagccccaaacaaatgtctatgactcattggccaaggactgcgtggctcacggctgctctgtgacactcttcctctttcctagtcagtatgtggacgtggcctcgctggggctggttcctcagctcactggaggaaccctttacaaatacaacaatttccagatgcacttggatagacaacaatttttgaacgacctcagaaatgatattgaaaagaaaataggctttgatgctattatgagggttcgtaccagcacaggtttcagagccactgatttctttggtggaatcttgatgaacaacaccaccgatgtagaaatggctgccatcgattgtgacaaggcagtgaccgtggagttcaagcacgatgacaaactcagtgaagacagtggagccttaatccagtgtgctgtgctttacacgacaatcagtggtcaaagaagacttcggattcacaatcttggcttaaactgcagctctcagctagctgatctttataagagctgtgagacagatgctcttatcaacttctttg

SEQ ID NO: 188160 - DNA, 1981 bp, Homo Sapiens
tttgtacaaaaaagttgggatacttttccaccctcccaaacaaatgtctatgactcattggccaaggactgcgtggctcacggctgctctgtgacactcttcctctttcctagtcagtatgtggacgtggcctcgctggggctggtgcctcagctcactggaggaaccctttacaaatacaacaatttccagatgcacttggatagacaacaatttttgaacgacctcagaaatgatattgaaaagaaaataggctttgatgctattatgagggttcgtaccagcacaggtttcagagccactgatttctttggtggaatcttgatgaacaacaccaccgatgtagaaatggctgccatcgattgtgacaaggcagtgaccgtggagttcaagcacgatgacaaactcagtgaagacagtggagccttaatccagtgtgctgtgctttacacgacaatcagtggtcaaagaagacttcggattcacaatcttggcttaaactgcagctctcagctagctgatctttataagagctgtgagacagatgctcttatcaacttctttgccaagtcagcttttaaagcagttctccaccagcctttgaaggtcatccgggaaattctagttaatcagactgcccatatgttggcatgttaccggaagaattgtgcaagtccttctgcagcaagccagcttattctaccagattccatgaaagtattgccagtgtacatgaattgcttgttgaaaaactgtgtactactcagcagaccagagatctcaactgatgaacgagcataccagagacagctggtcatgaccatgggtgtggctgactctcagcttttcttctacccacaacttctgcccatacacacgttagatgtcaagagtacaatgttacctgctgccgttcgttgctctgagtcccgtctttcagaagaaggaatattcttactggctaatggtctacacatgttcctgtggttgggagtaagcagcccaccagaactgatccaaggaatatttaatgtgccatcttttgcacatatcaacacagatatgacattgctgcctgaagtgggaaacccatactctcaacaactcagaatgataatgggtattatccaacaaaagaggccatattcaatgaagctcacaattgtaaagcagcgagaacaaccagaaatggttttccgacagttcctggtagaagacaaaggactttacggaggctcttcttatgtggatttcctttgttgtgttcacaaggagatctgtcagctgcttaattaattgaaacttctctgtcattgatgttgcatttccaaggagataatctccttcttggtgcctaattttctagatgataataggctagttttgatttcttgctcattttcagaataactttccaggaagagatggcatttagaacttcagctttggtgctcaggtataaagccaattaaggtacaattgtaccataaagggaacaatctgtttctgattgcacagtttctaatttttaaaactgatgtggtttgcatttcataaaaggcaaagtttacagaaccataaacattctcaattttctttatgctagacatataaattatttttcaaactgtatagatttggggtaaaaagttgtctcagttcctctcccaattgcaatgagaaaaaaaagcttaatttttacattatacttaattttctaaaaccatgtaactccattgaacacatttttcaacttaaggtctgcatagcagacttttaataaccttgggatttatctggtagaacaatatgtgttctacatttttttcataattatatattgtgtatgttaaaactattttccagttgttttgtctgtaaaactgtctttatcaatatgcttaatggttctttgtacaattttgaaagtttctacctgtatataatggatgttaaccagtatcaataaatcacttcgtat

SEQ ID NO: 188161 - DNA, 861 bp, Homo Sapiens
actttgtacaaaaaagttggcggaggtgaaggacgtccttccccaggagccgactggccaatcacaggcaggaagatgaaggttctgtgggctgcgttgctggtcacattcctggcaggatgccaggccaaggtggagcaagcggtggagacagagccggagcccgagctgcgccagcagaccgagtggcagagcggccagcgctgggaactggcactgggtcgcttttgggattacctgcgctgggtgcagacactgtctgagcaggtgcaggaggagctgctcagctcccaggtcacccaggaactgagggcgctgatggacgagaccatgaaggagttgaaggcctacaaatcggaactggaggaacaactgaccccggtggcggaggagacgcgggcacggctgtccaaggagctgcaggcggcgcaggcccggctgggcgcggacatggaggacgtgtgcggccgcctggtgcagtaccgcggcgaggtgcaggccatgctcggccagagcaccgaggagctgcgggtgcgcctcgcctcccacctgcgcaagctgcgtaagcggctcctccgcgatgccgatgacctgcagaagcgcctggcagtgtaccaggccggggcccgcgagggcgccgagcgcggcctcagcgccatccgcgagcgcctggggcccctggtggaacagggccgcgtgcgggccgccactgtgggctccctggccggccagccgctacaggagcgggcccaggcctggggcgagcggctgcgcgcgcggatggaggagatgggcagccggacccgcgaccgcctggacgaggtgaaggagcagtggcggaggtgcgcgccagctggagga

SEQ ID NO: 188162 - DNA, 918 bp, Homo Sapiens
ttgggtgttaacaatgcatccacagagcttggctgaagaggaaataaaaacagaacaggaggtggtagagggcatggatatctctactcgctccaaagatcctggctctgcagagagaacagcccagaaaagaaagttccccagccctccacattcttccaatggccactcgccgcaggacacatcaacaagccccattaaaaagaaaaagaaacctggcttactgaacagtaacaataaggagcaggatggacggaatgatttctactgctgggtttgtcaccgggaaggccaagtcctttgctgtgagctctgtccccgggtttatcacgctaagtgtctgagactgacatcggaaccagagggggactggttttgtcctgaatgtgagaaaattacagtagcagaatgcatcgagacccagagtaaagccatgacaatgctcaccattgaacagttatcctacctgctcaagtttgccattcagaaaatgaaacagccagggacagatgcattccagaagcccgttccattggaacagcaccctgactatgcggaatacatcttccatccaatggacctttgtacattggaaaagaatgcgaaaaagaaaatgtatggctgcacagaagccttcctggctgatgcaaagtggattttgcacaactgcatcatttataatgggggaaatcacaaattgacgcaaatagcgaaagtagtcatcaaaatctgtgaacatgagatgaatgaaatcgaagtatgtccagaatgttatctagctgcttgccaaaacgagataactggttttgtgagccttgtacaatccacatcctttggtctgggccaaactgaagggtttccattctggcctgcaaaagctctaaggataaagacgggcaggtcgatgcccgattcttt

SEQ ID NO: 188163 - DNA, 857 bp, Homo Sapiens
ttggcgcaacatcgactgcagcaccccgctctgcgatgcctgcgcctcgggcagcatcgagtgtgtgaagctcttgctgtcctacggggccaaggtcaaccctcccctgtacacagcgtcccccctgcacgaggcctgcatgagcgggagttccgaatgtgtgaggcttcttattgacgtcggggccaatctggaagcgcacgattgccattttgggacccctctgcacgttgcctgtgcccgggagcatctggactgtgtcaaagtgctgctcaatgcaggggccaacgtgaatgcggcaaagcttcatgagactgcccttcaccacgcggccaaggtcaagaatgttgacctcatcgagatgcttatcgagtttggcggcaacatctacgcccgggacaaccgcgggaagaagccgtctgactacacgtggagcagcagcgctcccgccaagtgcttcgagtactacgaaaagacacctctgactctgtcacagctctgcagggtgaacttgaggaaggccactggcgtccgagggctggagaagattgccaagttaaacatcccgccccggctcattgattacctctcctacaactgaattgcaggtggggtccggaccgtgactgcccccgttgtgcccagcattgcccgggtgagggctctgcctgttcctctgaagcagcgtgattgctgtagatagaacaacgctccttcgagtcccttcctgcgatcctgtttaggcttctctcctggatcctggataatgtttccagggtgttgggaagcctgcgtctcagtcacagttgtgggtgtggccctgcgctgttctacagaacctaccctctcaatgggca

SEQ ID NO: 188164 - DNA, 1542 bp, Homo Sapiens
ttggattgaccccattaaaaagaaagaccttcatcacagcaatggagaagagaaagcacaaagcatggagaccctccctccagggaaagtacggtggccagactttaaccaggaagcttatgttggagggacgatggtccgctccgggcaggacccttacgcccgcaacaagttcaaccaggtggagagtgataagcttcgaatggacagagccatccctgacacccggcatgaccagtgtcagcggaagcagtggcgggtggatctgccggccaccagcgtggtgatcacgtttcacaatgaagccaggtcggccctactcaggaccgtggtcagcgtgcttaagaaaagcccgccccatctcataaaagaaatcatcttggtggatgactacagcaatgatcctgaggacggggctctcttggggaaaattgagaaagtgcgagttcttagaaatgatcgacgagaaggcctcatgcgctcacgggttcggggggccgatgctgcccaagccaaggtcctgaccttcctggacagtcactgcgagtgtaatgagcactggctggagcccctcctggaaagggtggcggaggacaggactcgggttgtgtcacccatcatcgatgtcattaatatggacaactttcagtatgtgggggcatctgctgacttgaagggcggttttgattggaacttggtattcaagtgggattacatgacgcctgagcagagaaggtcccggcaggggaacccagtcgcccctataaaaacccccatgattgctggtgggctgtttgtgatggataagttctattttgaagaactggggaagtacgacatgatgatggatgtgtggggaggagagaacctagagatctcgttccgcgtgtggcagtgtggtggcagcctggagatcatcccgtgcagccgtgtgggacacgtgttccggaagcagcacccctacacgttcccgggtggcagtggcactgtctttgcccgaaacacccgccgggcagcagaggtctggatggatgaatacaaaaatttctattatgcagcagtgccttctgctagaaacgttccttatggaaatattcagagcagattggagcttaggaagaaactcagctgcaagcctttcaaatggtaccttgaaaatgtctatccagagttaagggttccagaccatcaggatatagcttttggggccttgcagcagggaactaactgcctcgacactttgggacactttgctgatggtgtggttggagtttatgaatgtcacaatgctgggggaaaccaggaatgggccttgacgaaggagaagtcggtgaagcacatggatttgtgccttactgtggtggaccgggcaccgggctctcttataaagctgcatggctgccgagaaaatgacagcagacagaaatgggaacagatcgagggcaactcccagctgaggcacgtgggcagcaacctgtgcctggacagtcgcacggccaagagcgggggcctaagcgtggaggtgtgtggtccggccctttc

SEQ ID NO: 188165 - DNA, 1137 bp, Homo Sapiens
ttggcccgggagcttggcgcggcccggcctggatgcgctgggcggagggtgcaggggagggcacggcgccgcttgcttggcctgcgcacccggacctagaagccgggacgagccggggcagagccaggcgcgcggaagtctgaaggtgccctccagacacggccccgatgactgaactacagcaagatgtggaagacacaaagcctgcgaaagtgctcgggaagagggagagcaaacttggctcagcccactcagaggctgagaatgggtggaggagaaaaagaaagcctgcaggtcgccaacagcccaatcccctaccccatctgtggaggcggactccccagaccagaagaaaatcattagcctatggtcaaaatccagttttgatggtgcctctttagcaagtgataagaacgactgtaaaacagaaagcaaaaatgaccctaagactgaaagaaaaaaagtcttcatcttccagccagtacaaggccaatatgcactttcacaagttgtttcttagtgtcccaacggaggaaccactgaagcaaagctttacctgtgctctacagaaagaaatactataccaaggaaagctctttgtatcagaaaactggatttgttttcattccaaagtctttggaaaagacacaaagatctctattccagctttctcggtaaccctaataaagaaaaccaaaactgctcttctagtgccaaacgccctgatcatagcaacagtcacagacaggtacatatttgtctccttactctccagagattcaacttacaaactactaaaatctgtgtgtggacacttagaaaatacaagtgttggtaacagtcccaatccatcttctgctgaaaacagtttccgagcagaccgcccttcatctctgcctctggatttcaatgatgaattctcagatctggatggagtggttcaacaaagaaggcaagacatggaaggatatagcagttctggttctcaaactcctgaatctgagaactctcgagatttccatgcgacagaatcccaaacagttctgaatgtctccaaggagaagcaaagccaactcgggcagatgcccatgtgaacagagtacctgaagaaaagccagagtctccctgtacagggtc

SEQ ID NO: 188166 - DNA, 1465 bp, Homo Sapiens
  misc_feature (433)..(442): n is a, c, g, or t
tggtaaatagttagcaaaccaccagttattttattttagtcagcaaaggataaaaacatacaaatttcatgctgaaagggattttagcattattgaatgctgaatacagacatcgtgcttgaaaactactaacatagtccactacagtcttaaaaattcagtgtttttcatcctgtattaaatcactattacaccttttggcttaaaaattaggtttggtttcaaaataagtttaatttagtacttcagtcacatgcctcacagattcttgaccagggctgggtaagaatcagtccaattaactattagttacagcaacaaaacaaaacataaacataatgttaaattcaccttgcttgatattcttgccaaaaaggaattgagaaattaagacacacaggtgatttcaaccagaacataacaggagaactgnnnnnnnnnngacaaaatgtagatgttacttgtttgaagcaaacctgtccacttagagccatttattgcctttttgagactcatggctaattcttgaaaggaccacattgagtttgtcagtatatgatgtatcctttagtttgaaagtcgttaagaggggtgtaagggagaggcaggagggcgggaaggactaaaaaggcacagggtggagtgtttgctgacgccatcgtggtaattatccaagagagtgtgttcgctgggcccttcctgagacctccagagatgggtctgttttcttcaggcaaaagcagcaaaatcttcctcagagagtcaaggtcaacttttattgcacaagaaccaaaattatttccctccccactttcctgagctggagacctccacatgcaatgtctggattctcatctgcttgcacctctgaccagcagggtgcactcaaacaaaacgcctcaggaagcaccttcttcaaagggaaacatgaggtattccgatggcccaagcaatctggtcgatcagtcaccattctcaagcaacttctgtaagttattttgtatcttttctaatttcactatgttagctgtaagctcttgacagagaacctccacattgaattgtacttgtgacctcaggccagatggtgctgcctgttcagtattatgggtgtccacaatggaggttagtaaccccagctgctcctccagagtattaattctgtatctcatgtagaaggtcgagatgattagtgcacagacaacaattgcatagaatataagaatatggtgaagcatcggacatttctgagacttgactttatgtaagattccaacagtttctgacagaccctgtacagggagactcttggcttttccttcaggtactctgttcacatgggcatctgcccgagttggctttgcttctcccttggagacattcagaactgtttgggattctgtcgcatggaaatctcgagagttctcagattcaggagtttgccaacttttttgtacaaagttgg

SEQ ID NO: 188167 - DNA, 1049 bp, Homo Sapiens
  misc_feature (140)..(160): n is a, c, g, or t
ttgggaaaaatcataaaatattgagctgatgcctgtatatagaaattaagcgtttctcgaaagctgttctatgttttgctgttattttagtctttattctcttcctttaggtggagaaacaaagtaccaatttgaagggnnnnnnnnnnnnnnnnnnnnnggtttctgtcagtagaaataaccatatgtgctaaccaaatttctgtgaagaatgttttcatggttatcattatatctaactataacctcccccatagttatgaagagtaacctgaaatgccactattgtggaaataggataattgtaattgtgaaaaaataattttaaggaaatcttacaagtattacattaaaaagatactatgactgccacctgccatttaccttctaataaccctgccatgtggtttgcagaaagagatggatatagtagcctcagaagaaatattttatgtgggttttttgtttttcgttactagatttcatggatgaggggatatggttgaccttttactttttaatggagcagccagtttttgttaattactcacttgtaaattgtgagattctgaattccttacctgctattcttgtacttgtctcaggccaaatctatgctgtggttcttatgagacttgtatgaagatgccctgatttgtacagattgaccacgggaatactactgccatgtaatctgtatagttccagataatttgtcatgaacattgacagaatgacaattttttgtatttgctttttctccctttaagagcacattcttctgtaaggagaaaggcagcattctggctaaaatgtgtaaaaggtaatttactacacttataaaatagtgtgacttttgtgaaaattttgaattagctttcatatgaagtgccttaagtagactcttcatttacttttctggtaatggtttaaatatcatttgttatgcatttttaagatacagttcagaatgacacattgtagtggcaaaaataaccaaatgtctggctgtttgctttttgaccatatcaataaacttttacaatcta

SEQ ID NO: 188168 - DNA, 1043 bp, Homo Sapiens
  misc_feature (249)..(545): n is a, c, g, or t
  misc_feature (715)..(735): n is a, c, g, or t
gtatctctaaatacaggattataatttctgcttgagtatggtgttaactaccttgtatttagaaagatttcagattcattccatctccttagttttcttttaaggtgacccatctgtgataaaaatatagcttagtgctaaaatcagtgtaacttatacatggcctaaaatgtttctacaaattagagtttgtcacttattccatttgtacctaagagaaaaataggctcagttagaaaaggactcccnnnnnnnnnnnnnnnnnnnnnnnnnnnnnnnnnnnnnnnnnnnnnnnnnnnnnnnnnnnnnnnnnnnnnnnnnnnnnnnnnnnnnnnnnnnnnnnnnnnnnnnnnnnnnnnnnnnnnnnnnnnnnnnnnnnnnnnnnnnnnnnnnnnnnnnnnnnnnnnnnnnnnnnnnnnnnnnnnnnnnnnnnnnnnnnnnnnnnnnnnnnnnnnnnnnnnnnnnnnnnnnnnnnnnnnnnnnnnnnnnnnnnnnnnnnnnnnnnnnnnnnnnnnnnnnnnnnnnnnnnnnnnnnnnnnnnnnnngtaagaaagaaaaggactcccttagaatgggaaagaaaaatcataaaatattgagctgatgcctgtatatagaaattaagcgtttctcgaaagctgttctatgttttgctgttattttagtctttattctcttcctttaggtggagaaacaaagtaccaatttgaagggnnnnnnnnnnnnnnnnnnnnnggtttctgtcagtagaaataaccatatgtgctaaccaaatttctgtgaagaatgttttcatggttatcattatatctaactataacctcccccatagttatgaagagtaacctgaaatgccactattgtggaaataggataattgttattgtgaaaaaataattttaaggaaatcttaccagttattacattaaaaagatactatgactgccacctgcccattaccttctaataccctgccatgtggtttgcagaaacaaaatgggatatagtaagcctcggagaaatacttttatggtgggtttttt

SEQ ID NO: 188169 - DNA, 1652 bp, Homo Sapiens
tacaaaaaagttgggacccagaagggagcgaaggtttttgctgcgccaacgcagtgaccgaaggctccgctcacgcccggcctgatcctgcctgaagatggtgccactggtggctgtggtatcagggccccgtgcccagctctttgcctgcctgctcaggctgggcactcagcaggtcggcccccttcagctgcacaccggggccagccatgcggccaggaaccattatgaggtgctggtgctgggtgggggcagtggcggaatcaccatggctgcccgcatgaagaggaaagtgggtgcagagaatgtggccattgttgagcccagtgagagacatttctaccagccaatctggacactggtgggtgctggtgccaaacaattgtcctcatctggtcgtcccacggcaagtgtgattccatctggtgtagaatggatcaaagctagagtgactgagttgaacccagacaagaactgcattcacacagatgacgacgagaagatctcctaccgatatcttattattgctctcggaatccagctggactatgagaagattaaaggcctacctgaaggtttcgctcatcccaaaatagggtcgaattattcagttaagactgtagagaagacatggaaagctctgcaggacttcaaagagggcaatgccatcttcaccttcccaaatactccagtgaagtgtgctggagcccctcagaagatcatgtacttatcagaagcctacttcaggaagacagggaagcgatccaaggccaatatcattttcaacacttctcttggagccattttcggggttaagaagtatgcagatgccctgcaggagatcatccaggagcggaacctcactgttaactacaagaaaaacctcattgaagtccgagccgataaacaagaggctgtatttgagaacctggacaaaccaggagagacccaagtgatttcatatgaaatgcttcatgtcacacctccaatgagcccaccagatgtcctcaagaccagtcctgtggctgatgctgctggttgggtggatgtggataaagaaactctgcaacacaggaggtacccaaatgtgtttgggattggggactgcaccaaccttcctacgtcaaagaccgctgctgcagtagctgcccagtcaggaatacttgataggacaatttctgtaattatgaagaatcaaacaccaacaaagaagtatgatggctacacatcatgtccactggtgaccggctacaaccgtgtgattcttgctgagtttgactacaaagcagagccgctagaaaccttcccctttgatcaaagcaaagagcgcctttccatgtatctcatgaaagctgacctgatgcctttcctgtattggaatatgatgctaaggggttactggggaggaccagcgtttctgcgcaagttgtttcatctaggtatgagttaaggatggctcagcacttgctcatcttggatggcttctgggccaaaactgcagtcactgaatgaccaagagcagcacgaaggacttggaacctatccttgtaaagagttttttttatgggtaatggtgaccaaatgcctcccttttcagtacccttgaacagcaaccatgtgggctaatcatgatgggcttgattctttgggaa

SEQ ID NO: 188170 - DNA, 1312 bp, Homo Sapiens
  misc_feature (966)..(1024): n is a, c, g, or t
ttggatcctaccataaaagagaaaaaaattcggaaagtgatcagagcacttattcaaaatacagtgatagaagttcagaaagctcaccaaggtcaaggagcagatcttctaggagtagatcttattccagatcatatacaagatcacgtagtctagctagttcacattcaaggtctaggtctccatcatctagatctcattcacgaaataaatacagtgatcattcacagtgtagtagatcatcttcatatacttctattagcagtgatgatggaaggcgagctaagaggagacttagatccagtgggaaaaaaaatagcgtttcacataaaaagcatagcagcagctctgaaaagacacttcacagtaaatatgtcaaaggtagagacaggtcttcatgtgtgagaaagtatagcgagagcagatcatctttagattattcttcagacagtgagcagtcaagtgttcaggccacacagtcagcccaggaaaaagagaagcagggccaaatggaaagaacacataataaacaagaaaaaaacagaggtgaagaaaaatccaagtctgaacgggaatgccctcattcaaaaaaaagaactttgaaagagaatctttctgatcaccttagaaatggcagtaagcccaaaaggaagaattatgctggtagtaaatgggactctgagtcaaattcagaacgagatgtcactaaaaacagtaaaaatgactcccatccatcctctgacaaggaagaaggtgaggccacatccgattctgaatcagaggttagtgaaattcacatcaaagtcaaacccacaaccaagtcgtccacaaatacttcactgcctgatgataatggtgcttggaaatcaagcaaacagcgcacatcaacttctgactctgaggggtcctgttccaattcggaaaacaataggggaaagccacaaaagcacaaacatgggtcaaagnnnnnnnnnnnnnnnnnnnnnnnnnnnnnnnnnnnnnnnnnnnnnnnnnnnnnnnnnnncaaaaagcataaggctccaaaacgaaagcaagcatttcactggcagcctccactagaatttggtgaagaggaggaggaggagattgatgacaagcaagttactcaggaatcaaaagagaaaaaagtttctgaaaacaatgaaaccataaaagataatattctaaaaactgagaaatccagtgaagaggacctttcaggtaaacatgatacagtgactgtttcatcagatcttgatcagtttactaaagatgatagtaaactcagtatttctcccacagctttaaatac

SEQ ID NO: 188171 - DNA, 883 bp, Homo Sapiens
agcagagggagttagtggactggtaccaaaaccatttggtatagctttcggtgaaggaaaagtgttctccgttcctttgccaacaggggtagctggcaaagaaagtgatgcttggacggcggagtccatcttttcacagtctagagttggagagctaggagccgactttctagttacttcctgttgtctttcccgaactgctagttcttgccttaaatctcttgcttcatcctttaacctctgtacagagaccaacaaagattccttttcatcaagttcactttctaaaaatgcatttcgttcaatggcctggtttagcctttgttcaaagtcttccagtgaaactattgttgcccttttggctcgctccaggtcgtcgttggcctgctccagctctctcacatacttatgcaactgctccttaatggcccgagtctgacttaaatcatcttctaacactgagacctgcttatagctctgtgcatattgatgctctagcttctcctttaatgcctccacttcatatttcagtctttggttatcagcctgcaagtctctatttctttgttcagcctgtactaattgtgcctccaactctgcttctaattctctgcttccttcctggaattcaactagctcatcccgagcttcctggaagctttgcttatacttcaaggaaagttccttccaataagcagtttcctcctttaaacttgaaaaatctggtatatcttcaccatccatgatcaagaaagcctccaatgtgtcaaaagcgcatgttcgccgccgctcaaccgacgtctcccctccgctggcccggccaggcccgcccagccgctcggctcagctcccctacgcagccccgagctccactcagcgccaa

SEQ ID NO: 188172 - DNA, 1359 bp, Homo Sapiens
ttggcgagagagcacagttgagatgtagatccctggttgtcactagaagtgagggacaatctaatggaggagtgcccaggaccagatcatataaggcctgggagtttactgggagacgggaaagtagtgattgtgttactttgccacgggcaactaggggcagtggtgatgtgggcgtctagctcgtgatcaggagggggctgtagtttatgagatgagtagttacaactactcgtgacgtggcgctacatggccccggtggcttgagtcacgggcaggaagtagggacctggaaccgggtaccagatacagcccaagaggcggcgtgctctcgctctgcgcaagcgcagcactcgcgaaccaagatgcttcggttgggggcaggtcaagcggcccaggaagggcggggcttggaggcctcgttctgcgcatgcgccgaaggggcgtggcggtcgcacctgcgcgagtttggggaaggaggaggggcgaggtgacgcaggcgtaataatagagaaggtgccagaaagatccaaaacaagtggctgcggccgtcgcccaggagtcatcggacgccagaatctggccgggttctgagcttgttccgcctccctcccccgggaatggcgctatccgggtcgaccccggccccgtgctgggaggaggatgagtgcctggactactacgggatgctgtcgcttcaccgtatgttcgaggtggtgggcgggcaactgaccgagtgcgagctggagctcctggcctttctgctggatgaggctcctggcgccgccggaggcttagcccgggcccgcagcggcctagagctcctgctggagctggagcgccgcgggcagtgcgacgagagcaacctgcggctgctggggcaactcctgcgcgtgctggcccgccacgacctgctgccgcacctggcgcgcaagcggcgccggccagtgtctccagaacgctatagctatggcacctccagctcttcaaagaggacagagggtagctgccgtcgccgtcggcagtcaagcagttctgcaaattctcagcagggtcagtgggagacaggctcccccccaaccaagcggcagcggcggagtcggggccggcccagtggtggtgccagacggcggcggagaggggccccagccgcaccccagcagcagtcagagcccgccagaccttcctctgaaggcaaagtgacctgtgacatccggctccgggttcgagcagagtactgcgagcatgggccagccttggagcagggtcgtggcatcccggcggccccaagcgctggcgcggcagctggacgtgtttggggcaggccaccgcaattgctgcgctcaagggacctgggct

SEQ ID NO: 188173 - DNA, 1400 bp, Homo Sapiens
ttggctccgtgtctgcagctagtgtgtcaactcagcgtttctcctctcgtccctggaagagctaaagatggctgaatttctagatgaccaggaaactcgactgtgtgacaactgcaaaaaagaaattcctgtgtttaactttaccatccatgagatccactgtcaaaggaacattggtatgtgtcctacctgtaaggaaccatttcccaaatctgacatggagactcacatggctgcagaacactgtcaggtgacctgcaaatgtaacaagaagttggagaagaggctgttaaagaagcatgaggagactgagtgccctttgcggcttgctgtctgccagcactgtgatttagaactttccattctcaaactgaaggaacatgaagattattgtggtgcccggacggaactatgtggcaactgtggtcgcaatgtccttgtgaaagatctgaagactcaccctgaagtttgtgggagagagggggaggaaaagagaaatgaggttgccatacctcctaatgcatatgatgaatcttggggtcaggatggaatctggattgcatcccaactcctcagacaaattgaggctctggacccacccatgaggctgccgcgaaggcccctgagagcctttgaatcagatgttttccacaatagaactaccaaccaaaggaacattacagcccaggtttcaattcagaataatctgtttgaagaacaagagaggcaggaaaggaatagaggccaacagccccccaaagagggtggtgaagagagtgcaaacttggacttcatgttggccctaagtctgcaaaatgaaggccaagcctccagtgtggcagagcaggacttctggagggccgtatgtgaggccgaccagtctcatggcggtcccaggtctctcagtgacataaagggtgcagctgacgagatcatgttgccttgtgaattttgtgaggagctctacccagaggaactgctgattgaccatcagacaagctgtaacccttcacgtgccttaccttcactcaatactggcagctcttcccccagaggggtggaggaacctgatgtcatcttccagaacttcttgcaacaggctgcaagtaaccagttagactctttgatgggcctgagcaattcacaccctgtggaggagagcatcattatcccatgtgaattctgtggggtacagctggaagaggaggtgctgttccatcaccaggaccagtgtgaccaacgcccagccactgcaaccaaccatgtgacagaggggattcctagactggatttctcagcctcaagagacctcaccagagctgcccaggaggcgtgtcagacaccagggagacctgtcttctggttacctggatgatactaagcaggaaacagctaatggg

SEQ ID NO: 188174 - DNA, 2224 bp, Homo Sapiens
ttggaaaagagctccgggccaggggctgccgtcgccgccgtcggggagtcagcccgccagcccgccagctcgtcagcccgccagccagcgcttcgcgggccctgtcggtcccggacacagaatttccaggtgttgtggtgcgaccaattggtgaatttcgtagttccatagattaccaatatcagcttctgcggtgcaatgttgaccttttaaaaattatccagctgggccttacattcacaaatgagaagggagagtatccttctggaatcaatacttggcagttcaatttcaaatttaaccttacagaggacatgtactcccaggattccatagatctccttgctaactcaggactacagtttcagaagcatgaagaggaagggattgacacactgcactttgcagagctgcttatgacatcaggagtggttctctgtgacaatgtcaaatggctttcatttcatagtggctatgattttggctatatggtaaagttgcttacagattctcgtttgccagaagaggaacatgaattctttcatattctgaaccttttcttcccatccatttatgatgtgaaatacctgatgaagagctgcaaaaatcttaagggaggtcttcaggaagttgctgatcagttggatttgcagaggattggaaggcagcaccaggcaggctcagactcactgctgacaggaatggctttctttaggatgaaagagttgttttttgaggacagcattgatgatgccaagtactgtgggcggctctatggcttaggcacaggagtggcccagaagcagaatgaggatgtggactctgcccaggagaagatgagcatcctggcgattatcaacaacatgcagcagtgatggcgccaggctctgcagggtgggcctgatcccagagtggtgcttactgtgctgactgtgtacttatcttccccaagagaaaatgcttcttttgagcacactgtacctaccatctgcattgagcagaaagacttttgttttactgaagacaaaagatgtttttattttagacccagaagagaggagtttgctctgaatttgtaaataagtcttccccattcctcatactcgagcctctcctctctggttgcctcctgccaccagcatccatggctcatttgacacctttttaaatatcaggacaagtctgaaacaaagtagtaaaatgtatataactcttacctgttgtcattctttttcttttaaatttgttgctaatctctgataatgaagattcttactctgattctcagctgagctgtgagggcttccagggaaaatggaacaaaatggtgttcttaggtaatgggttgtagatactgagtcttcctttccttttctgacccttctcgaggacatttgctttcctcacacttttgtagtctctctttacatattactatatggaaatgaattgctctgtgctgaaatttgaagaccagataatgaaactgaaaagcaaacaattttactgaatctgtctacccttcattcatgagaactccagaatgagtgttgaccactgaagcatcttttaagtctgtgttccattgtgccattcaggtttgctgtcacatatgcatcatctgaaatcatttgaaatttttgtacaataaaatatcctggatttgatcctgaaggaaactagtaagatcagatttttgggtcatgtctgttgtattttcagtaatgtgatttcagatggtcatctggattctcccacttctctactccattatttctctacttttccttccagcaaacctgaaacgtgagggagatggattaatgtgagtaacaggaatgtgtctttaaaaagctagagtggttacatttaatcaggcagtaagataatttgggttcttgagttgttttggagtaatatcccacaactggggtaggaagctcaggacttttttctttaaagctagtcatttcaaaagcacattgtatttttttgaatgactacagtatggacaatttcaaaaaccaaaacccactttggattggtggaagtaaaaactggtaactcactcaagtgaatgaatggtcttgcttttaaaagcttatgggaaactcaatttgaaatgattagaaaatgtcaagtattataagctggtatttaagatgcttgaaatactatttatgtttttaattttgtaaaataaagatttctttttaaccactgg

SEQ ID NO: 188175 - DNA, 1993 bp, Homo Sapiens
ttggccagcatgtccgtttacgtcaccggcagcaccatagtgctagagcccgggtccccttccccgctcccggacgcggccctgcctgacggcgacctcagcgaaggggaattgacgcccgcccgccgcgagccgcgggccgcgcgccacgccgctcctctcccagcgcgggcggcgctgctggagaaggcgggccaggtgcggcggctgcagcgggcccggcagcgggcagagcgccacgcgctgagcgccaaggcggtgcagcggcagaaccgagcccgcgagagccgtccgcgccggtccaagaaccagagcagcttcatctaccagccgtgccagcgccagttcaactactgagcgtccaccggccgcgccacgaaccccttgccgatcccgatccctgtcgggctcctccgactcctcgggctggacaccgaaacctcccttcttaaagcgtgtgaggttgggtgatagccgttccttccccgacaccctcaatttccccatctctgatcctctaatctgcctctgaacccattcacccttcaccctcactcctggtccccatacccagcatctaatcatccatgccccctactcctggcccctccatcctttcttctctggtccccatccctgtctctccctttcacccttgccctccagtcctctacctctggcctgcccctatttctgaaagcttcttccagtccctgatctggctcattccccaccttcaactcccaccttacatgtctcacactatcccatggttggcattacactcactcctgttcccttattcttcattcccagtaattccctaccaaatggtggggaccctgagcccagctctgaccaggtagagcctgtgcagcctgggctgctgtcattgccctccagtaagggctcagggttttgcttttagtctccccttccttctgccttgggggcggtactctgtggagctgcttaggcctggaaaggtacagtatgtagaagaggactgtgagacgtgagttagagggagaagatggagggaatctagggaacgaggcagcctattggagatgcggacaggacagacacgttgagaagctgcagggagcagggcaccaagggagtgtgcactgtgcttgcttagagaggccaaaccctgctcccaggctgaagcctggagtctgcccccacttcccttttctataatccacccttctgcaggccctgaaatctgaagggcttagttagtaccttgccactctacccccaacacgtcacccgagtagaagctgggcaaggccctaccatcctggccgtctgttcacaagcccaaggtgctagaactagcttaggagacatgcaggccacagggcttctaggcagggaaagggcacacaccctaggtcagcgtgcagagcagtgatgctggaggacacaccatggggtgaagccatcccaaggctgacagctcagtcttcaccttgcctctggccttgtatttcacaccctgctcagtatggctagccagcagtcctgagtaggagtccaggactcccactgtctcaatctgcaaattgttcctatccaggttcagggccttcagggggcctcttttcattttctcccacaggcctctctttctttctaggttgctggggagaaatgggtaccctatgatccccctccccttctcctccagtaaatacctggaagagggaacctgaatccctgggggagacagaaggggcaggggccaccagcctccccttcttgtggtgagactgaattttgggctcagacaccagcaacagcctcttgggatgccctgagttgcttcccatttcctctttctagccgtccttttctagtgtgtgctcactcttcctaggaacttttaagacttcttggtacctatgaacatagggtcctcccctcacccccactctaggtttccaggcctcccagccaagctgaagcttggagaaaactctgc

SEQ ID NO: 188176 - DNA, 1470 bp, Homo Sapiens
ttggcaaagacaaagagaaaagagacaaagcaagagagagtgagaattcaaggccacgccggagctgtaccttggaaggaggagccaaaaattatgctgagagtgatcacagtgaagacgaggacaatgacaacaatagtgccaccgcagaggagtccacgaagaagaataagaagaaaccaccgaaaaaaaagtctcgttatgaaaggacagataccggtgagataacatcctacatcactgaagatgatgtggtctacagaccaggagactgtgtgtatatcgagagtcggaggccaaacacaccgtatttcatctgtagcattcaagacttcaaactggtccacaactcccaggcctgttgcagatctccaactcctgctttgtgtgaccccccagcatgctctctgccggtggcatcacagccaccacagcatctttctgaagccgggagagggcctgtagggagtaagagggaccatctcctcatgaacgtcaaatggtactaccgtcaatctgaggttccagattctgtgtatcagcatttggttcaggatcgacataatgaaaatgactctggaagagaacttgtcattacagacccagttatcaagaaccgagagctcttcatttctgattacgttgacacttaccatgctgctgcccttagagggaagtgtaacatctcccatttttctgacatatttgctgctagagagtttaaagcccgagtggattcatttttctacatattaggatataaccctgagacaaggaggctgaacagtacccagggggagattcgtgtcggtcctagtcatcaggccaaacttccagatctgcaaccatttccttctccagatggtgatacagtgacccaacatgaggaactggtctggatgcctggagttaacgactgtgacctccttatgtacttgagggcagcaaggagcatggcggcatttgcaggaatgtgtgatggaggctctacagaggacggctgtgtcgcagcctctcgggatgacaccactctgaatgcactgaacacactgcatgaaagcggttacgatgctggcaaagctctgcagcgcctggtgaagaagcctgtgcccaagctcatcgagaagtgctggaccgaggacgaagtgggggagctgatcaccttctattactattggaagaagacccccgaagcagccagctcccgagcccatcgtaggcaccgcaggcaggccgtgttcaggaggattaagactcgcaccgcgtccacacccgtcaacacaccctccagacccccgtccagtgaattcttggacctaagttcagccagtgaagatgacttcgacagtgaggacagtgagcaggagctgaaggggtacgcctgccgccactgcttcaccaccacctccaaagattggcaccacggatgccgggagacatcctgctttgcaccgactgtcgcatccactt

SEQ ID NO: 188177 - DNA, 1146 bp, Homo Sapiens
  misc_feature (801)..(844): n is a, c, g, or t
atataatgtgattctttccaactttggaaataatagttctgtatattatagttgtcttgaaagctatataggcttgtcaatgcctattgttttaatttgactctctctttatcattatgcatgtagagctaaatctgcttcgtaatgttgatgctaacaacactgagaatagcactactgtgaagaattctagtttgttgagtggattcagaggaggttctagctacaaccatgaaacagagactatctttgcattaccaaggatgcagcttgactttaaatccattcatgttcaagaaccacaggagccttcattacaggatgccagcctgaagccaaaagtagaatgtagtgtggtgacagagttcactgaccacatttgtgtgactatggatgctgagctcatcatgtttcttcatgatttagtatcagcttatcttaaagaaaaagaaaaagccatctttccacctcggattttatctactcgaccaggacaaaaaagtccaattattatacatgacgacaattcctctgataaagatagagaagatagcatcacttatactactgtggactggagagattttatgtgcaatacatggcatctagaacctactcttagattaatttcttggactggaagaaagattgatccagtaggtgttgattatattcttcaaaaattgggctttcatcatgctaggactactattcctaaatggcttcaaagaggagtcatggatccactggacaaggttctgtcagttcttatcaaaaagctcggtactgcactacaggatnnnnnnnnnnnnnnnnnnnnnnnnnnnnnnnnnnnnnnnnnnnntaatttgatctgtgaacaaattatgattgtgtctgttttattacactggagtgtttttttagtataataatttgaaatataactttaaaataattctaaatttgtggctataattaaaagtttgtaagttaacctgttctagttccatcattctgtgtacagtgaagtattgcatgataatgtaaattttgtgaaaaactagattaaaatatataactgcttgttatggtttataattatataatgtgcaatacaattcctgcatctttaaaatgtctgcagaataactgtgaatttttttg

SEQ ID NO: 188178 - DNA, 1359 bp, Homo Sapiens
acaaattgatgagcaatgcttcccttttaatgccaactttgtacaaaaaagttggaccaaatattgctttttggactgaagctcagaaaatctgggaagatggctccagtgatcattctacatatattgtacaaacactagattttcacctgggtcataatactatggttaccaaaccatgtggtgctttggaaagtcctatggcaacaataaccaagataacaaggcgtcgccatgaaaatccaccccatggagtagcaagtgtgaaagaatggttcaattatgttacagctacaaggaatgaagagctaaatctgcttcgtaatgttgatgctaacaacactgagaatagcactactgtgaagaattctagtttgttgagtggattcagaggaggttctagctacaaccatgaaacagagactatctttgcattaccaaggatgcagcttgactttaaatccattcatgttcaagaaccacaggagccttcattacaggatgccagcctgaagccaaaagtagaatgtagtgtggtgacagagttcactgaccacatttgtgtgactatggatgctgagctcatcatgtttcttcatgatttagtatcagcttatcttaaagaaaaagaaaaagccatctttccacctcggattttatctactcgaccaggacaaaaaagtccaattattatacatgacgacaattcctctgataaagatagagaagatagcatcacttatactactgtggactggagagattttatgtgcaatacatggcatctagaacctactcttatattaatttcttggactggaagaaagattgatccagtaagtgttgattatattcttcaaaaattgggctttcatcatgctaggactactattcctaaatggcttcaaagaggagtcatggatccactggacaaggttctgtcagttcttatcaaaaagctcggtactgcactacaggatgaaaaggaaaagaaaggcaaagacaaagaagaacactaaaaaagtaatttgatctgtgaacaaattatgattgtgtctgttttattacactggagtgtttttttagtataataatttgaaatataactttaaaataattctaaatttgtggctataattaaaagtttgtaagttaacctgttctagttccatcattctgtgtacagtgaagtattgcatgataatgtaaattttgtgaaaaactagattaaaatatataactgcttgttatggtttataattatataatgtgcaatacaattcctgcatctttaaaatgtctgcacaataactgtgaatttttttgttattggattggccgtaacttttagaaaaaaat

SEQ ID NO: 188179 - DNA, 887 bp, Homo Sapiens
ttgggtctttctttgtgccttgatgttgagagcgcctctcttttgagcaaacaagcattctatatgcaaccagagtagaggggacctgctcagcaggtgtgaccagggttctctgaatctgttattgtttttgcttctggaaagttcatttggggtttacaacaactaggatgtgttgggtgagatgtttcagatctggagaaatgagcaggtgtcgggaaatgtgtgacttaaccgtggtgagggctggaaatccaaactcaccaccatgatctgtgaaataaagcccttagcggtgtgaagcatccggtcctttgaacagaagggcctggaaggcccctggggctgagaaagggtccgcccggtggcctggaggcaggcgccgggagcgcagtagcacgtggactgggcaggatgttgcactagcttggggtagatgctgggggctgcggccacggtcagagggccccactgtgaggcgtgggtgtgagccaggctgcaggaggaactgggcctccgcttcccagcaacgcagccaggcctgagaattctgtgcgcccggcgggctttgggaatgaggggttcccttgaacatgcgtaggctggaaccccgtctgagaggtctccctgaatttcagtgacacatagtgcagcccggcagtgtcccacttccgtggagagagccgctggaatggtgtggacccatcccgcgggtgaccggtgcctgttctcccctgaccgagcctgtgagcacatcgccccctgctggcgacagcggggaaatgagggctgaaaatatcctccccacaagggcaatccccgggacctgccgagcagccaaggccctgtcctttcttgaatggtggcgagctgaatctggtcggttt

SEQ ID NO: 188180 - DNA, 966 bp, Homo Sapiens
ttggcgcgcggcgaggatggcggcgcggggccgggggctgctgctgctgacgctgtcggtgctgttggcggcgggcccctccgccgctgcggccaagctcaacatccccaaagtgctgctgcccttcacgcgggccacgcgcgttaacttcacgctggaggcctcggagggctgctaccgctggttgtccacccggccggaggtggccagcatcgagccgctgggcctggacgagcagcagtgctcccagaaggcagtggtgcaggcccgcctgacccagcctgcccgcctcaccagcatcatcttcgcagaggacatcaccacaggccaggtcctgcgctgtgatgccattgtggacctcatccatgacatccagatcgtctccaccacccgcgagctctacctggaggactcccccctggagctgaagatccaggccctggactccgaagggaacaccttcagcactctggctggactggtcttcgagtggacgattgtgaaggactccgaggcggacaggttctcagactcccacaatgcgctgcgaatcctcactttcttggagtctacgtacatccctccttcttacatctcagagatggagaaggctgccaagcaaggggacaccatcctggtgtctgggatgaagaccgggagctccaagctcaaggctcgcatccaggaggctgtctacaagaatgtacgccctgcagaagtcaggctgctgattttggaaaacatccttctgaacccggcctatgacgtctacctgatggtgggaacctccattcactacaaggtgcagaagatcaggcaagggaaaattacagaactctccatgccttccgatcagtacgagttgcagcttcagaacagcatcccgggccccgaagagacccagcccggccggtggctgtcttggcccagacacgtcgatggtcactgcactgcagctgggacaga

SEQ ID NO: 188181 - DNA, 1126 bp, Homo Sapiens
ttgggttgccttggccgtcgcatccccgagggagtcgtgtcggcgccaccccggcccccgagcccgcagattgcccaccgaagctcgtgtgtgcacccccgatcccgccagccactcgcccctggcctcgcgggccgtgtctccggcatcatgtgtggtatatttgcttacttaaactaccatgttcctcgaacgagacgagaaatcctggagaccctaatcaaaggccttcagagactggagtacagaggatatgattctgctggtgtgggatttgatggaggcaatgataaagattgggaagccaatgcctgcaaaatccagcttattaagaagaaaggaaaagttaaggcactggatgaagaagttcacaagcaacaagatatggatttggatatagaatttgatgtacaccttggaatagctcatacccgttgggcaacacatggagaacccagtcctgtcaatagccacccccagcgctctgataaaaataatgaatttatcgttattcacaatggaatcatcaccaactacaaagacttgaaaaagtttttggaaagcaaaggctatgacttcgaatctgaaacagacacagagacaattgccaagctcgttaagtatatgtatgacaatcgggaaagtcaagataccagctttactaccttggtggagagagttatccaacaattggaaggtgcttttgcacttgtgtttaaaagtgttcattttcccgggcaagcagttggcacaaggcgaggtagccctctgttgattggtgtacggagtgaacataaactttctactgatcacattcctatactctacagaacaggcaaagacaagaaaggaagctgcaatctctctcgtgtggacagcacaacctgccttttcccggtggaagaaaaagcagtggagtattactttgcttctgatgcaagtgctgtcatagaacacaccaatcgcgtcatctttctggaagatgatgatgttgcagcagtagtggatggacgtctttctatccatcgaattaaacgaactgcaggagatcaccccggacgagctgtgcaaacactccagatggaactccagcagatcatgaagggcaacttcagttcatttatgc

SEQ ID NO: 188182 - DNA, 2749 bp, Homo Sapiens
ttgggctgtcgttgccttggccgtcgcatccccgagggagtcgtgtcggcgccaccccggcccccgagcccgcagattgcccaccgaagctcgtgtgtgcacccccgatcccgccagccactcgcccctggcctcgcgggccgtgtctccggcatcatgtgtgaacaggcaaagacaagaaaggaagctgcaatctctctcgtgtggacagcacaacctgccttttcccggtggaagaaaaagcagtggagtattactttgcttctgatgcaagtgctgtcatagaacacaccaatcgcgtcatctttctggaagatgatgatgttgcagcagtagtggatggacgtctttctatccatcgaattaaacgaactgcaggagatcaccccggacgagctgtgcaaacactccagatggaactccagcagatcatgaagggcaacttcagttcatttatgcagaaggaaatatttgagcagccagagtctgtcgtgaacacaatgagaggaagagtcaactttgatgactatactgtgaatttgggtggtttgaaggatcacataaaggagatccagagatgccggcgtttgattcttattgcttgtggaacaagttaccatgctggtgtagcaacacgtcaagttcttgaggagctgactgagttgcctgtgatggtggaactagcaagtgacttcctggacagaaacacaccagtctttcgagatgatgtttgctttttccttagtcaatcaggtgagacagcagatactttgatgggtcttcgttactgtaaggagagaggagctttaactgtggggatcacaaacacagttggcagttccatatcacgggagacagattgtggagttcatattaatgctggtcctgagattggtgtggccagtacaaaggcttataccagccagtttgtatcccttgtgatgtttgcccttatgatgtgtgatgatcggatctccatgcaagaaagacgcaaagagatcatgcttggattgaaacggctgcctgatttgattaaggaagtactgagcatggatgacgaaattcagaaactagcaacagaactttatcatcagaagtcagttctgataatgggacgaggctatcattatgctacttgtcttgaaggggcactgaaaatcaaagaaattacttatatgcactctgaaggcatccttgctggtgaattgaaacatggccctctggctttggtggataaattgatgcctgtgatcatgatcatcatgagagatcacacttatgccaagtgtcagaatgctcttcagcaagtggttgctcggcaggggcggcctgtggtaatttgtgataaggaggatactgagaccattaagaacacaaaaagaacgatcaaggtgccccactcagtggactgcttgcagggcattctcagcgtgatccctttacagttgctggctttccaccttgctgtgctgagaggctatgatgttgatttcccacggaatcttgccaaatctgtgactgtagagtgaggaatatctatacaaaatgtacgaaactgtatgattaagcaacacaagacaccttttgtatttaaaaccttgatttaaaatatcaccccttgaagcctttttttagtaaatccttatttatatatcagttataattattccactcaatatgtgatttttgtgaagttacctcttacattttcccagtaatttgtggaggactttgaataatggaatctatattggaatctgtatcagaaagattctagctattattttctttaaagaatgctgggtgttgcatttctggaccctccacttcaatctgagaagacaatatgtttctaaaaattggtacttgtttcaccatacttcattcagaccagtgaaagagtagtgcatttaattggagtatctaaagccagtggcagtgtatgctcatacttggacagttagggaagggtttgccaagttttaagagaagatgtgatttattttgaaatttgtttctgttttgtttttaaatcaaactgtaaaacttaaaactgaaaaattttattggtaggatttatatctaagtttggttagccttagtttctcagacttgttgtctattatctgtaggtggaagaaatttaggaagcgaaatattacagtagtgcattggtgggtctcaatccttaacatatttgcacaattttatagcacaaactttaaattcaagctgctttggacaactgacaatatgattttaaatttgaagatgggatgtgtacatgttgggtatcctactactttgtgttttcatctcctaaaagtggtttttatttccttgtatctgtagtcttttattttttaaatgactgctgaatgacatattttatcttgttctttaaaatcacaacacagagctgctattaaattaatattgatatattcagtattctcttcaactttgtcacgaggaagaatttcctgtagttaattttaactttccttcattacattgttgcataaaactagtcccttagtgccagtttggaagttacttgcaattgtttggaagatttgcaggtcgctgacctcatcatttcactctaagtatatgtggtaggctaaactcacaaaaaggtatgtatgctttacactgataagcaccaaatttagtattgtatcctaagtatttttcctcttctgtattttctgtgctctacccctgaaatatatttaggaataaagaa

SEQ ID NO: 188183 - DNA, 1049 bp, Homo Sapiens
ttggatcccgcgcgcccccgctcctgcaggctgtttttcttcaaataaagaacatggtgaaactgattcacacattagctgatcatggtgacgatgtcaactgctgtgccttctccttttccctcttggctacttgctccttggacaaaacaattcgcctgtactcgttacgtgactttactgaactgccacattctccattgaagtttcatacctatgctgtccactgctgctgtttctccccttcaggacatattttggcatcgtgttcaacagatggtaccactgtcctatggaatactgaaaatggacagatgctggcagtgatggaacagcctagtggcagccctgtgagggtttgccagttttccccagactccacgtgtttggcatcaggggcagctgatggaactgtggttttgtggaatgcacagtcatacaaattatatagatgtggtagtgttaaagatggctccttggcggcatgtgcattttctcctaatggaagcttctttgtcactggctcctcatgtggtgatttaacagtgtgggatgataaaatgaggtgtctgcatagtgaaaaagcacatgatcttggaattacctgctgcgatttttcttcacagccagtttctgatggagaacaaggtcttcagttttttcgactggcatcatgtggtcaggattgccaagtcaaaatttggattgtttcttttacccatatcttaggttttgaattaaaatataaaagtacactgagtgggcactgtgctcctgttctggcttgtgctttttcccatgatgggcagatgctagtctcagggtcagtggataagtctgtcatagtatatgatactaatactgagaatatacttcacacattgactcagcacaccaggtatgtcacaacttgtgcttttgcacctaatacccttttacttgctactggttcaatggacaaaaacagtgaacatctggcaatttgacctggaaacactttgccaagcaaggagcacagaacatcagctgaagcatttaccgaagattgg

SEQ ID NO: 188184 - DNA, 1900 bp, Homo Sapiens
ttggccgtgtgtctgtgcgcaaggagctgaaaggcgggaaggcttattccaagctgggcttcgctgacttgaacctggccgagtttgcgggctcgggctccacggtgcgctgctgcctgctcgagggatatgacacgaagaacactcgccaggacaactccatccttaaggtcaccattggtatgttcctgctctctggagatccctgcttcaagacgccaccatcgactgccaagtccatctccatcccaggccaggattcctccctgcagctgacgtgtaagggtggtgggaccagcagtgggggcagcagcaccaactccctgactgggtcccggccccccaaggctcggcccactattctcagctcagggctgccagaggaacccgaccagaacctgtccagccctgaggaggtgttccactctggccactcccgcaactccagctatgccagccagcagtccaagatctccggctacagcacagagcactcgcgctcctccagcctctcagacctgacgcaccgccgcaacacgtccaccagcagcagcgcctctgggggccttggcatgaccgtggagggccctgagggcagtgagcgggagcaccggcccccggagaagccgccgcggccaccccggcccctgcatctgtccgatcgctctttcaggcggaagaaggactcggtggagagccacccgacctgggtggacgacacgcggatcgatgcggatgccatcgtggagaagatcgtgcagagccaggacttcacagatggcagcaacaccgaggacagcaacctccggctgttcgtgagccgcgatggctctgccacgctgagcggcatccagcttgccaccagggtctcttctggggtctacgagccagttgtgattgaaagccattgaggagcaggtgtccgggctggagaagagtcctgctttctctggagtccagacctgtatcattccatgaggaactttccccttcagatcacctctgcgccacatctcatccatgcctcctccatgcactccagtccacactccccgtagcatcattccattgcccctcccatccatgctgggaccctcctggcccaccaaggcccaggcaccactgtgaatattctcctctgaaccactagagggcaggccaggcaggccaggcgggcccgtgcagcttgtgggcaagaaggagctggcaaggaccggcgctgctggagactgacccagccctctggctgaggacatgcagcagctcctaaatgtagagatgcctgtggctgagggggcctctctacctgtgtccccactcactccaggagcactggctttggtcacgtcttagcagcagggccttgctccgttgttcccttgccctggtggtgggggggccagaccgcctccggaatcctgccacctgtgactgtctgactgcttagtgcttcagctgtcccttccttgtgtcctgggggacctgctggcggcctcttcctgggagccatgacctcagaccccacccacactccagatcgagacccctgcctccccccggcaaatgtcctcccgctgccttgcagcctgcactttgcacatgctcacccccagcacagtcccactggcccctcacctccccttccctgagctccttcccaaggactcctggtcactgcctgctgtgcagtcagaggcccagggtccagcagcccggcgggaacgggtgctgcctcttcctccagttagctccagctcagtctgagacccgtgctgagaaaggtctgagcaccgaccgtgccctctgcccagggctgggtcctgagcagctgggtttcctgcacgaagttggagcaagcaaagtccttctctgccctcaggtcagctgcccagactggggc

SEQ ID NO: 188185 - DNA, 1246 bp, Homo Sapiens
  misc_feature (929)..(945): n is a, c, g, or t
ttggtggaattcttgctgcaagtgcatggctccgaggaccaggactttggcaactactactgttccgtgactccatgggtgaagtcaccaacaggttcctggcagaaggaggcagagatccactccaagcccgtttttataactgtgaagatggatgtgctgaacgccttcaagtatcccttgctgatcggcatcggtctgtccacggtcatcgggctcctgtcctgtctcatcgggtactgcagctcccactggtgttgtaagaaggaggttcaggagacacggcgcgagcgccgcaggctcatgtcgatggagatggactaggctggcccgggaggggagtgacagagggacgttctaggagcaattggggcaagaagaggacagtgatattttaaaacaaagtgtgttacactaaaaaccagtcctctctaatctcaggtgggacttggcgctctctcttttctgcatgtcaagttctgagcgcggacatgtttaccagcacacggctcttcttcccacggcactttctgatgtaacaatcgagtgtgtgttttcccaactgcagctttttaatggttaaccttcatctaattttttttctcccactggtttatagatcctctgacttgtgtgtgtttatagcttttgtttcgcggggttgtggtgaggaaggggtgatggcatgcggagttctttatcttcagtgagaatgtgcctgcccgcctgagagccagcttccgcgttggaggcacgtgttcagagagctgctgagcgccaccctctacccggctgacagacaacacagacctgtgccgaaggctaatttgtggcttttacgaccctaccccaccccctgttttcaggggtttagactacatttgaaatccaaacttggagtatataacttcttattgagcccaactgcnnnnnnnnnnnnnnnnngcttctctgccccttttccatttcttttgtatttgttttctgtgagagcactgaaatggcggccctggaatctacaatttggctctccactgagcaccttatcttgccaccttagccttaagaatgaatatgaagaaaaatacacagccacctctgtccagggcagtaagaagggctgcaaggaaggggaggatggggacaaggaaaggatcagatacctgctccagtagttgtgaggccactgtgtctcaagggactccaggaagagcagaagagggatctcacgaagttatttttatgc

SEQ ID NO: 188186 - DNA, 1865 bp, Homo Sapiens
  misc_feature (433)..(445): n is a, c, g, or t
  misc_feature (1762)..(1773): n is a, c, g, or t
ggcttggattaaggtcaggcattctctattcttttccccctgtaaacccattctaaatgtgggcctgaggtcaatgggagatgtgacctccctatggaggatgtaagaagcataggccatttctgccccatgttgaggaaacaatctgttgatagacctggaatttagagtacatctgaaaagcagttggacttcaagaaatttaaaattctctctttgagatggggtggactaagaccacccccaaagtttaaaaatatgctcattcaacttgaatcttctgaggactttttgtgaaaatggtggactgtttagggcataggacagattccccaaattgctttatgcttccacataactagagcacttcaatctatttaagcctttgtctcctaactgaaacattatttctaaatatttctattcaataagnnnnnnnnnnnnngagcaacttaagtgaattttgaagattgctccttccagtctcgttccttttcacattttcctgcattacctaataattacctcagcgttagaatttgaatgtattaattgatttaaacatcatgtagactaaagtcttaaacatctaagactcagttgtagttgcagaaaaaaattaaagtcacctctactgaaccttggtttcaatttaagatttttcttgcttttcaaaggggtaactaataaagattgaagggtttttttcccgattggtggaggaatgaagaactattgatgcaagtttttttattgtttctttctatgatcaggtacctgctttcattttagactgctacttccaaactaagctagattcttggttttaatgagaggaggcagagagagggaggcagatggaagaagaaaaacagttaaataagacatacccagtcactgcatttttggactataccgtatctttctagcacaaggaaatagataaactgtaaggtcttttttactcactttttatttatgtgttctatttgtgttagtcataactgtttatagtggttgtctaatttttacttttattatatgagatagagctgtgcagatcttcactcaagttagttctgtcacgcttcttcccattatttagagcacagttttttaaagcaactgtacaatttctcagccttatgagcttgctgtatttcttggtatcatgttgcttccaaattttgtttttactgtagaagacaattaatttattgtagagaagtggctgtgaaagtcgttctctgtctttaaaaatcaattgcagaagttcatttgtcatttttctagagataaattatagtactcaaactggcagtgctcagtatatacattttgtaagctttgtcagtgaaaccatcagttttgcaggagcttcctttcctagtcaagataaagcttaaaattccagaaattaatgtcgttcggactgactttattcatatttccatcaaacttctccaatacagtaagagatagtgttgaaccagcatcaagtctccagaaacatggcagagcagacaggccgttaagtttcacagacatcatagatccttttcttaaagaagaaaacatgtataaaatagttttagtagtccaaaatgtcaactatctgtagctgcttttgtgtgtgtgtcagtgaacaaataataatgccttgctcaatcaatgcattcagccatctcaagtgcaatttgtgaaggagactatggtttccaaaagatacatttttttacaaagttaaacctgtaaaaagtcnnnnnnnnnnnnccctccagccgtacaccaactgcacttggttgtttcagcagttggtatactattaaatagtccaggccaaataggtttctgtagctgtttta

SEQ ID NO: 188187 - DNA, 1226 bp, Homo Sapiens
gcatcagagctgtcccctggaatgttgtccgccaagacagcctgaagagtgttaataactccattgacaggtctgagtgctccacatgatttggtagacagtgactctgaaatatgaccaataataggggcaccatggttttccaatggctgagaaacagactcaatcaatttatcagtcccatgatctgtcttcacctcagaactaagtggaagaaataagtctgttgtatgctctgggggaggtacctccccaagaactatcaaccccttattagcacgtatctgtttgtaaatgtctgtttgctgacgaattcgatattccaagtcagaaacatgagcctgaagccagttccagcggctgacaatagctgcccggtctgcagcccatttccattctgacctgcgtctcaggggtacatgacgctgctcgggatcagctctggtcagttcttcctcttcaatatcagactcccctcctgaactactgtcagtgacatctgaatcaaatgcctgttcactgcacctcaagttggctatgccactagctgtaaatctctccaattcttctgaaattgaattgcttttcagaaagttgctaagtccctctgaagtggtggtctcactggcagcttttctcaaggcagcttcagcctttcgagtcagcatcaactggctccgtggtctcaaggattccaagtttggcagtttgctcaaagtcttctccaaaaatccacccagctgatgttgtatatgcctctcaacctgcttggcttgcacaacctgtaagcgcttttgtaatctgcgggcacggctctcaatgtcagcctgtcgccgcagtaaagctgttatccttgtgtcagaatctaaagcactgaaaagaatggaagacaggggagactttttaccctccaatttgacaccccccaagttagagctggagtctgtaccaggtgataatctactgcttccttgaagtgccggctgttccatggaattgacagaggatttgtttgcagtgctattattgctatacaaagttgtgtgttctacatcaaggcttctatgtggaagagtgcaattggtcataccccccttcaagtccccagattcagatcctcccatttcacccccatgaagagcagatgaagtgagagcccgttttcccccattgagggaagtggaattgtcatgatcagaatgtgttgaacttttagtcaattccaa

SEQ ID NO: 188188 - DNA, 1131 bp, Homo Sapiens
tacggatcggtccctggaggagcagcactaataatgtatggatttggcacaaatgcagctggagcaaggctgctgagaatacaccagctatatgtggctgctgagctgctgctaatgcatattgctgctgttgagctgcagttaactgttgaactgttagtgcattagtcctctgaaagagctgctgctgggaattgtagtcaaaaaggcctacagtagctcttgaagagtccattggtacctgattaccaggatagtcaaactgtaaggattccagaccaacttgttccatggcatccagattctgagtttcaggatttgaaaattcttcaacaagtggtttattagctgtaggattaggaagaggccccagtccttctgagggattagtattggggcccaagcgctcaactacttcagttggagaggcttgacgacttccaggagtacgattaaaatctttgcaatcggcatccattccatttggcaaacctctgccatttattttagaatcatcatcatctccttgtttaagatctctgttttggtcctcctcaaatggagaagccttgcctttttgatctcctttctcaggtccatctgtttcagcatctctagtgccaaaatttcccttcctaaatcgagaatccaatttatcagcaggagaagaacttaatacatattctaccatgctcacaccaaggcctccactttctgatcgcggagacagtattgcatttacttcactgtttccatgaaaaccctgtccagatcttctctgtaccataataggctgggacattgaatggtgagaagctccccatgcagtctctctccattcatcatccccaagaaatatgcctttttgtccatcttttgttgaatcatcaggttcccaaaactttttggtaggcaaaagctctcccattccccgagattctaatgcaagagcttgaaaatcatgattcatttcatccacagatcaaacctgttgaataacaaaaacaaaaattagtacaaagaaatgtttaaacagacttcttcaactatttttatattatattgctgctatgactaatattagcatgatctgagaaagggaagcactgatttctgtagggaagacaccaa

SEQ ID NO: 188189 - DNA, 1842 bp, Homo Sapiens
cccaccagtctactgcaggcccgtacagcatttcctggaggatctctggagcgatatagtctggcgtgccacagaatgtggccgtggtgacaccattgcaaatcccctcttgcacattccgaagtctgccagtttacagtgaccctcgtggtccaacaggacattgtccagtttcagatctctatagatgattcctttatcatggaggaacatgagagccgaaatgatttctgcagcatagaagcgagctcgtgcttcatcaaaacgacgagacttctgaatgtggaacatcaagtcacccccattcacaaactccatcacaaaaaacagacgatcgggggtctgaaagcagcagaacaactgagtgaggaaggggtgattgcgggccagagacaggatccttttctcggtcatggtgcattccacatcatcatcctgcagaatcacgtccttcttcagcaccttcacagcatagaggtctcctgtttcttttactcttgcaagcatcaccttcccaaaactccccttccccaacactcggatgaactcaaagttgtcgataccaagtcggttggaagaattaaccccaatcccatttccttctttgctgctctcctttccctgtcgtcttagggtcgatctggaaacgagtttcgaggttggagaaatatttccgggttggagacccatccctgccagggtcttggcaagttccaccgcatttaccccacagttaggggccacgttcgcttgacatcgaatatgcacattcattttacatattttacactgaagtccttgtcgcattattccccagagcagtgagccacagtgatcgcagaatgttggcactttgtagttgtggatgctgaacttgtgtgggatgttgatcccgaacctctgttctgcaatctttgccatccactttgttaatattgttttggcaagtacaggctgtaacaattagatgatggcagcgtttatggacgacacaggtgcacacttggcactgataaccctgtttcccaaacactccccagataaactccctgcagtgagagcagtaggtgggctgcctcagatacgtggccatgaacttgtgtccattgatctggtggactcgccttcgcatagccctttggcgcttcctggtaaaatgtttgaagatccggtctctctggagagtagcttcagtgaaactcccggtaagggttattaccacaaatactttcccctctggctcgagatccacccaaccctcgaaggtgtccgaggcgccggtcgtgcgcagcagctcctggaactgcagggtgcagttggccacgaagtggtcgtagcccaggggcgtctcgtggaagacggccaactcgaggtggccgccgtcggtgacgttagcgcaaaactcctcgttgtacgtgggtttgttggtcttctgcttggtgctggtctggcccacgcgcacctggtccacgctcaccgtcagataggggtccagcagctggtggcccttcttgaagagcgagtggcgcagggaccagcgggtgggctgcagccccactgcctcaccgatgcggaccctcaaatagccattgaacttcatggtgccagacgacatgccggcgccgctgccccggccccggggggccgcgctgcttcgcagcgggagaaccgggagtcccgtctcaggccagccctcgggacaggtgcaggagtcgaggcagccctggggaaaggcagcgcctaagcgcccctcgactggccattctgcctcctccgtgggacttttccctcccctccttccctccctcccgaggtggaaaggagggccaacgtttttgtaca

SEQ ID NO: 188190 - DNA, 1210 bp, Homo Sapiens
  misc_feature (71)..(86): n is a, c, g, or t
ttggaattgctgcttatcaaagattctgttctcgacccccaaaaggatttgaaaaatactttcctaatggnnnnnnnnnnnnnnnngctagtgaacctaaagaagttatgggagagaaaaaagaatcaaagccagctgctaccacacgctcttctggaggaggaggtggtggcggtggaaaacgaggtggcaagaaagatgattctcactggtggtccaggtttcagaagggtgacattccatgggacgacaaggatttcaggatgttcttcctctggactgctctgttctggggtggagtcatgttttacttgctgctcaagagatccgggagagaaatcacttggaaggactttgtcaataactatctttcaaaaggagtagtagacagattggaagtcgtcaacaagcgttttgttcgagtgacctttacaccaggaaaaactcctgttgatgggcaatacgtttggtttaatattggcagtgtggacacctttgaacggaatctggaaactttacagcaggaattgggcatagaaggagaaaatcgggtgcctgttgtctacattgctgaaagtgatggctcttttctgctgagcatgctgcctacggtgctcatcatcgccttcttgctctacaccatcagaagagggcctgctggcattggccggacaggccgagggatgggcggactcttcagtgtcggagaaaccactgccaaggtcttaaaggatgaaattgatgtgaagttcaaagatgtggctggctgtgaggaggccaagctagagatcatggaatttgtgaatttcttgaaaaacccaaagcagtatcaagacctaggagcaaaaatcccaaagggtgccattctcactggtcctccaggcactgggaagacgctgctagctaaggccacagccggagaagccaatgtccccttcatcaccgttagtggatctgagtttttggagatgttcgttggtgtgggccctgctagagtccgagacttatttgcccttgctcggaagaatgccccttgcatcctcttcatcgatgaaatcgatgcggtgggaaggaagagaggaagaggcaactttggagggcagagtgagcaggagaacacactcaaccaggctgctggtggagatggatggttttattaccacaacaaatgtcgtcattttggccggcaccaatcgaccagatatcctgg

SEQ ID NO: 188191 - DNA, 910 bp, Homo Sapiens
caggccagctgctcagccatccgcagcagcacagccagcagctcctgcaggcgggaggacgccgggtagggcaggtccacatttgccaatttacaaaatcgggcaagggaacatgaaagccgatctgcaggctgcagcgactgccaagccaggaaagtcgcagcagtgatgacgggcaagggatgcctcccggtcaccagccacgtctcatttgccagctccaccaactgcattgttcgagacagcatcttctctttgtcttccacgtatttggctggcacagaaggtgaagcttggaacagtttgaagctgctgcaataggtcttcaccagttctgccaagcacagagatggcacatccagtcccaggagcttcactatctgcatgtaagtgctagaaaacacatccaaatctgcatacaacagcgtgcagatggcccccattgttaggggccagttatgctgtcggcaggtgattaagacgcagcacccaaccaacacctccttcttttgcagcctggccgctcggatgccagagtgccgatatgcctgttggtagtaggcaaccgcggtatcctcaaatgttggtggcaactgcagaactcgacaaaggtctctcactcgccggagacctcgttgctggctgcgactaacttgttcgttttcccctgtgcttcgggaatatgttacctctcggagattgccctcgtcgctgaaggtagtggtaaggaccccctcggtgaccacgcagccgcagtcggagcacaccagctggctctgcgaatagtgcgagtcttccaccagctccgtggagccgcagtccgggcagcggcctctgcctggcatctcacaaccggccccaaagccgcggaagccttcagagactcctgggtctgcaacagcaaccccaa

SEQ ID NO: 188192 - DNA, 1155 bp, Homo Sapiens
tacaaaaaagttggctcaagaaggacatgaacgagaccttcaaggagaagtttcctcacattaagctgacactcagcaaaattaggagtctgaaacgagagatgcggaagcttgcgcaggaggactgtggccttgaggagcccacggtggccatggccttcgtctactttgaaaagctcgccctcaaggggaaactcaacaaacagaaccggaagctgtgtgctggggcatgtgtgctgttagcagccaaaattggaagtgacctcaaaaaacacgaagtcaagcatttaattgacaaactggaagagaagttccggctgaacaggcgagaactgattgcctttgaattcccggtgttagtggccttggaattcgccctccacttgcccgagcacgaagtcatgccccactacagacggctggtccagagttcctagcactggccccgaggacagccaagggccatttcttctcagcttggtggagcagcacttacttactactggaaatgaaaaaaagtagaactcagaataccagacttttcttcctctcgacatagtttggggagaagcagtactagaaactttccaaggagtcttgggtgtgtagccaagaggagccatgagctatggactcctcaagcacgggaagaggaggtgtgtgctgagaacagagaggccctgccctctgtccactagcgagaatccctagctgccccagcccagtctttctccccggcattcacaaactttgcaagcgtggtccagggccttctccagatctgttccaacttggagtgtgaagggcttgagcatacgggggaagagagtctgcagaagttgggggaaaacttttaaaagataccctcattgtgtcaaagagtgtgccaatctatttttgtatcagcattggaagtgcactttcccctggggcgtgtgggtgtgtgaatgtgcaagtgtctgagagatactgcatcagccctagacccccagagccagtcccgccctttacagagcagcccttagcctggggccatgggtcagctgacccttcaacaattatttctagatgatttctggataagaattgctctctcggtaccagacagtttgacatcctccaccccttagaaaatgactgacattgttttgttac

SEQ ID NO: 188193 - DNA, 1710 bp, Homo Sapiens
ttggcaagatggcggatctgtagtagttaccgcggcggcgggagagcaagcgagccctggggggcaaagagacgggagagtgggtgtatgcgcgggtgaagtgagaggtaacggggcctccgggcggagaggcctcagtggctcttgtcaccccttctcgcggctgaacctttggagccatggtgaattcgggcctctccgaagccgccgccgccgccaccgccactactgcctttaccgtctcctaagagtgaggagcgcggacgaggtaagcgaggaggcggcggctagagcggtggagacagcagccaccatgtcggatacgcggcggcgagtgaaggtctataccctgaacgaagaccggcaatgggacgaccgaggcaccgggcacgtctcctccacttacgtggaggagctcaaggggatgtcgctgctggttcgggcagagtccgacggatcactactcttggaatcaaagataaatccaaatactgcatatcagaaacaacaggatacattaattgtttggtcagaagcagagaactatgatttggctctgagttttcaggagaaagctggctgtgatgagatctgggaaaaaatttgtcaggttcaaggtaaagacccatcagtggaagtcacacaggacctcattgatgaatctgaagaagaacgatttgaagaaatgcctgaaactagtcatctgattgacctgcccacatgtgaactcaataaacttgaagagattgctgacttagttacctcagtgctctcctcacctatccgtagggaaaagctggctctcgccttggaaaatgaaggctatattaaaaaactattgcagctgttccaagcttgcgagaacctagaaaacactgaaggcttacaccatttgtatgaaattattagaggaatcttattcctaaataaggcaactctttttgaggtaatgttttctgatgagtgtatcatggatgtcgtgggatgccttgaatatgaccctgctttggctcagccaaaaagacatagagaattcttgaccaaaactgcaaagttcaaggaagttataccaataacagactctgaactaaggcaaaaaatacatcagacttacagggtacagtacattcaggacatcattttgcccacaccatctgtttttgaagagaattttctttctactcttacgtcttttattttcttcaacaaagttgagatagtcagcatgttgcaggaagatgagaagtttttgtctgaagtttttgcacaattaacagatgaggctacagatgatgataaacggcgtgaattggttaattttttcaaggagttttgtgcattttctcagacattacaacctcaaaacagggatgcatttttcaaaacattggcaaaattgggaattcttcctgctcttgaaattgtaatgggcatggatgatttgcaagtcagatcagctgctacagatatattttcttatctagtagaatttagtccatctatggtccgagagtttgtaatgcaagaagctcagcagagtgatgacgatattcttcttattaatgtggtaattgaacaaatgatctgtgatactgatcctgagctaggaggcgctgttcagttaatgggacttcttcgtactctaattgatccagagaacatgctggctacaactaataaaactgaaaaaagtgaatttctaaatttttt

SEQ ID NO: 188194 - DNA, 1586 bp, Homo Sapiens
ttgggttctcaatcacattcagattctcccagaccagaccttcacggccctccagcccgcagtgttcccgtgcatcagtcagctgacctgtcacgtgaccgacatcagagttcgccaggctgtgagggagtggctgggcagggtgggccgtgtctatgacatcattgtgtagccgactcctgttctactctcccaccaaataacagtagtgagggttagagtcctgccaatacagctgttgcattttccccaccactagccccacttaaactactactactgtctcagagaacagtgtttcctaatgtaaaaagcctttccaaccactgatcagcattggggccatactaaggtttgtatctagatgacacaaacgatattctgattttgcacattattatagaagaatctataatccttgatatgtttctaactcttgaagtatatttcccagtgcttttgcttacagtgttgtccccaaatgggtcattttcaaggattactcatttgaaaacactatattgatccatttgatccatcatttaaaaaataaatacaattcctaaggcaatatctgctggtaagtcaagctgataaacactcagacatctagtaccagggattattaattggaggaagatttatggttatgggtctggctgggaagaagacaactataaatacatattcttgggtgtcataatcaagaaagaggtgacttctgttgtaaaataatccagaacacttcaaaattattcctaaatcattaagattttcaggtattcaccaatttccccatgtaaggtactgtgttgtacctttatttctgtatttctaaaagaagaaagttctttcctagcagggtttgaagtctgtggcttatcagcctgtgacacagagtacccagtgaaagtggctggtacgtagattgtcaagagacataagaccgaccagccaccctggctgttcttgtggtgtttgtttccatccccaaggcaaacaaggaaaggaaaggaaagaagaaaaggtgccttagtcctttgttgcacttccatttccatgccccacaattgtctgaacataaggtatagcatttggtttttaagaaaacaaaacattaagacgcaactcattttatatcaacacgcttggaggaaagggactcagggaagggagcagggagtgtggggtggggatggattatgatgaaatcattttcaatcttaaaatataatacaacaatcttgcaaaattatggtgtcagttacacaagctctagtctcaaaatgaaagtaatggagaaagacactgaaatttagaaaattttgtcgatttaaaatatttctcctatctaccaagtaaagttaccctatgtttgatgtctttgcattcagaccaatatttcaggtggatatttctaagtattactagaaaatacgtttgaaagctttatcttattatttacagtatttttatatttcttacattatcctaatgattgaaaactcctcaatcaagcttacttacacacattctacagagttatttaaagcatacattataatctcccagccccattcataatg

SEQ ID NO: 188195 - DNA, 1658 bp, Homo Sapiens
ttggcattctgtcatttggctttataattctctgtgaagaaaatggtttgtattagaaaatttgaaagatttgaagatacaaatcagctacagcataaagttatgtatgtgtttggcaaacttaatgatagtttcttagaaactatttgatgcatataaaacagtaaacagctagttactgggagtctgaagtcttagaaacagatattggcaaaaaaattaaagatgaagggaattcatgacaacggtctccttagttgcataaatgtctgcaacacaaccttgttttctttgtctcgaggctatcatactttttcaagacatacaactagtattttttgctcaactgtcgaaaatctagttgtatggaccacaaacaagatatcaccatttactttatttctacatattacatttgctctccaggaataaataaggttgtgagtgccagatttggaaatccaaactgttagatcgtgatagatttccccataagtaaaaatagttctcatcttgttttgttttttaggttcccagattgtgatgagccatatcctcgacttgtggatctgaatttggctggagaaccaactgaaggagccccagtggcagtgcagagagactatggtttttggtgtccccgagagttaaaaattgatcctgatctgggttattcttttctgcatgtgcgtgattgttcacctccttgtccaaatatgtacttcagaagagaagaactgtcatttgctcgctatttcataggattgatttcaatcatttgcctctcggccacattgtttacttttttaacttttttgattgatgtcacaagattccgttatcctgaaaggcctattatattttatgcagtctgctacatgatggtatccttaattttcttcattggatttttgcttgaagatcgagtagcctgcaatgcatccatccctgcacaatataaggcttccacagtgacacaaggatctcataataaagcctgtaccatgctttttatgatactctatttttttactatggctggcagtgtatggtgggtaattcttaccatcacatggtttttagcagctgtgccaaagtggggtagtgaagctattgagaagaaagcattgctgtttcacgccagtgcatggggcatccccggaactctaaccatcatccttttagcgatgaataaaattgaaggtgacaatattagtggcgtgtgttttgttggcctctacgatgttgatgcattgagatattttgttcttgctcccctctgcctgtatgtggtagttggggtttctctcctcttagctggcattatatccctaaacagagttcgaattgagattccattagaaaaggagaaccaagataaattagtgaagtttatgatccggatcggtgttttcagcattctttatctcgtaccactcttggttgtaattggatgctacttttatgagcaagcttaccggggcatctgggaaacaacgtggatacaagaacgctgcagagaatatcacattccatgtccatatcaagttactcaaatgagtcgtccagacttgattctctttctgatgaaatacctgatggctctcatagttggcattccctctgtattttgggttggaagcaaaaagacatgcttt

SEQ ID NO: 188196 - DNA, 1444 bp, Homo Sapiens
ttggctctctctcactggcacagcgaggttttgctcagcccttgtctcgggaccgcaggtacgtgcctggcgacttcttcgggtggtccccgtccgccctcctcgtccctacccagtttcttgcttccctgccccatctccgccgctccccgcagcctccgccgagcgccatggctcctaggaagggcagtagtcgggtggccaagaccaactccttacggaggcggaagctcgcctcctttctgaaagacttcgaccgtgaagtggaaatacgaatcaagcaaattgagtcagacaggcagaacctcctcaaggaggtggataacctctacaacatcgagatcctgcggctccccaaggctctgcgcgagatgaactggcttgactacttcgcccttggaggaaacaaacaggccctggaagaggcggcaacagctgacctggatatcaccgaaataaacaaactaacagcagaagctattcagacacccctgaaatctgccaaaacacgaaaggtaatacaggtagatgaaatgatagtggaagaggaagaagaagaagaaaatgaacgtaagaatcttcaaactgcaagagtcaaaaggtgtcctccatccaagaagagaactcagtccatacaaggaaaaggaaaagggaaaaggtcaagccgtgctaacactgttaccccagccgtgggccgattggaggtgtccatggtcaaaccaactccaggcctgacacccaggtttgactcaagggtcttcaagacccctggcctgcgtactccagcagcaggagagcggatttacaacatctcagggaatggcagccctcttgctgacagcaaagagatcttcctcactgtgccagtgggcggcggagagagcctgcgattattggccagtgacttgcagaggcacagtattgcccagctggatccagaggccttgggaaacattaagaagctctccaaccgtctcgcccaaatctgcagcagcatacggacccacaaatgagacaccaaagttgacaggatggacttttaatgggcacttctgggaccctgaagagacttcttcccttcaggcttattgtttgagtgtgaagttccagagcaaggagccatgttcctctaagggaattcaggaattcagacgtgctagtcccacaccagttaggtagagctgtctgttcaccctcccatcccagctgatcccagtcactgcttgctggggccatgccatggaagcttcccatcagtctcccagctgaatcctccctgctctctgagctgctgccttttgcctcctgcaactcaacatcctcttcaccctgccctgcctgcagttgagggggcgaagaagaaccctgtgttctcaggaagactgcctccaccaccgctacccagagaacctctgcatctggcatttctgctctctatgcttga

SEQ ID NO: 188197 - DNA, 1026 bp, Homo Sapiens
ttggagaatttctatttaaccagacctgtagtagtattaccaatccagttcaattaaggtgattttttgtaattattattattttggtgggacaatctttaattttctaaagatagcactaacatcagctcattagccacctgtgcctgtccccgccttggcccggctggatgaagcggcttccccgcagggcccccacttcccagtggctgcttcctggggacccagggcaccccggcaccttcaggcacgctcctcagctggtcacctcccggctttgccgttcagatggggctcctgaggctcaggagtgaagatgccacagagccgggctcccctaggctgcgtcgggcatgcttggaagctggcctgccaggaccttccaccctggggcctgtgtcagccgccggccctccgcaccctggaagcacacggcctctgggaaggacagccctgaccttcggttttccgagcacggtgtttcccaagaattctgggctggcggcctggtggcagtgctggagatgaccccgagcccctccccgtggggcacccaggagggccctgccggaatgtgcagcctgtgggtagtcggctggtgtccctgtcgtggagctggggtgcgtgatctggtgctcgtccacgcaggtgtgtggtgtaaacatgtatgtgctgtacagagagacgcgtgtggagagagccgcacaccagcgccacccaggaaaggcggagcggttaccagtgttttgtgtttatttttaatcaagacgtttcccctgttttcctataaatttgcttcgtgtaagcaagtacataaggaccctcctttggtgaaatccgggttcgaatgaatatctcaaggctgagatgcatctattttaagatgctttggagcagacagctttagccgttcccaatccttagcaatgccttagctgggacgcatagctaatactttagagaggatgacagatccataaagagagtaaaggataagagaaaatgtctaaagcatctgggaaaggt

SEQ ID NO: 188198 - DNA, 1117 bp, Homo Sapiens
tttgtacaaaaaagttgggtgaatatgatggtgggggatagggcctcttctacattaccttggcccagggggatcagctggctgggaggattagtgagcacctctgtattttgaggtctgagtcttctggagctgtgtagttaatcttcggtttctgataacccctgggtccatctggccatcagcctcagcagtgagcaaagcaataccatactcatttctatgttcctgttccttcctctgctcctcctttggagaagcaataattcatgggggatgatacagtagcactttacaaatggctccatgtcattcatcccaggggccataatctcttgcaccacctattcttacttcctgttcagctcctttacagcttttattttcaactgcttcccaacttggtggggcctcctttaaggatgagccaatagtaagaatgtggctgtaatcagcagagacccctctgaggggtatctgttctgcagcccctagtgaaatcatgtgatgtgagacagaaacctaaacatggtacttgattctaaacctgtgccagtctatagcctctgcctccccaagcagagctcaagccaaacgcttctgtcctctttccttctgcattaaccctttgctgatcctcaggggccactcccccaacacccctgtacttgggtgagggatgttggacagagcctgttttcatgtactgcaggtgggggtgtgctgacatgtttgctcttggttgatggagaaggtacagaggccagggagtgaaaatggttgacagaagagggaagagttaggtgtctcatagtcactcatagtggggtggtcaggggtaatggcatctccccactttaggcttctcaaacagacttttgacacctctcaagttcagagctctgatgtggaaagacaggaggtgtggggaaggagggggatttcgtgtgtttgcatgagtgtgcgcttcaggccttgggagttggcaagagggagggaaggaaggagagcaaaatcttcggaaggtgtttcttgtacctgagggatcctgccctgaatctccatagtctccactgtgaactgaggaggggaggggtgtgctggggaataaatcttg

SEQ ID NO: 188199 - DNA, 1657 bp, Homo Sapiens
ttggcccaggcagcatggacctcagtcttctctgggtacttctgcccctagtcaccatggcctggggccagtatggcgattatggatacccataccagcagtatcatgactacagcgatgatgggtgggtgaatttgaaccggcaaggcttcagctaccagtgtccccaggggcaggtgatagtggccgtgaggagcatcttcagcaagaaggaaggttctgacagacaatggaactacgcctgcatgcccacaccacagagcctcggggaacccacggagtgctggtgggaggagatcaacagggctggcatggaatggtaccagacgtgctccaacaatgggctggtggcaggattccagagccgctacttcgagtcagtgctggatcgggagtggcagttttactgttgtcgctacagcaagaggtgcccatattcctgctggctaacaacagaatatccaggtcactatggtgaggaaatggacatgatttcctacaattatgattactatatccgaggagcaacaaccactttctctgcagtggaaagggatcgccagtggaagttcataatgtgccggatgactgaatacgactgtgaatttgcaaatgtttagatttgccacataccaaatctgggtgaaaggaaaggggccggggacaggagggtgtccacatatgttaacatcagttggatctcctatagaagtttctgctgctctctttccttctccctgagctggtaactgcaatgccaacttcctgggcctttctgactagtatcacacttctaataaaatccacaattaaaccatgtttctcacttttcacatgtttcatagcaactgctttatatgactgatgatggcttccttgcacaccacatatacagtgcgcatgcttacagccgggcttctggagcaccagctgcagcctggctactgctttttactgcagaatgaactgcaagttcagcatagtggaggggagaggcagaactggaggagaggtgcagtgaaggttctctacagctaagcctgtttgaatgatacgtaggttccccaccaaaagcaggctttctgccctgagggacatcttcccactcccctgctccacatgagccatgcatgcttagcaatccaagtgcagagctctttgctccaggagtgaggagactgggaggtgaaatggggaaatggaagggtttggaggcagagctgaaaacagggttggaaggatttcctgaattagaagacaaacgttagcatacccagtaaggaaaatgagtgcaggggccaggggaacccgtgaggatcactctcaatgagattaaaacaaggaagcagagaatggtcaaagaatgggattcagattgggaacttgtggggatgagagtgaccaggttgaactgggaagtggaaaaaggagtttgagtcactggcacctagaagcctgcccacgattcctaggaaggctggcagacaccctggaaccctggggagctactggcaaactctcctggattgggcctgatttttttggtgggaaaggctgccctggggatcaactttcattctgtgtgtggctcaagagttcttctgcagagatggagctatctttcctcctcctgtgatgtcctgctcccaaccatttg

SEQ ID NO: 188200 - DNA, 1592 bp, Homo Sapiens
ttggggggacagaagctaaaatattagggacccaggagataacagctagggattcaggggtcagagagatagaagcagagatagcagagtctgacatattggtagcccaggagatagaggtgggacttttgggggttctgggaatagagactggggcagcagaaggtgcgatattggggacccaagagatagcatctagggattcaggggtcccagggttagaagctgatacaacagggatccaggtgaaagaggttgggggttcagaggttccagagatagcgactgggacagcagaaactgagatattggggacccaagagatagcatctaggagttcaggggtcccagggctagaatctgaggtagctggggcccaggagacagaggtcgggggttcagggatctcagggcccgaggctggaatggcagaggcccgagtactgatgacccgtaagacagaaattatagttccagaggctgagaaggaagaggctcagacttcgggggtccaggaagcagagactagagttgggagtgctctcaaatatgaggctttaagggccccagtcactcagccaagagttttaggatcccaggaagcaaaagcagagatttcaggagtacaagggtcagagactcaagttctgagagtccaggaggcagaggctggggtttgggggatgtcagagggcaaatctggggcttggggggcccaggaagcagagatgaaggttttagagtctccagagaacaaatctggtacttttaaggcccaggaagcagaggctggggtcttgggaaatgagaaggggaaagaagctgagggaagcctcacagaggccagcctgcctgaagcacaggtggccagtggggcaggggctggggcgcccagggcctcttccccagagaaggctgaagaggacaggaggctgccgggcagccaggcaccacctgccctggtcagctccagccagtccctgctggagtggtgccaggaagtcaccactggctaccgtggcgtccgcatcaccaacttcaccacatcctggcgcaacggcttggccttctgtgccatcctgcaccgattctacccagacaagattgactatgcctcgctagacccactcaacatcaagcagaacaacaagcaggccttcgatggcttcgcggctctgggcgtgtcgcggctgctggagcccgcggacatggtgctactgtcggtgcccgacaagctcatcgtcatgacgtacctgtgccagatccgcgccttctgcaccgggcaggagctgcagctggtacaactggagggcggcggcggcgccggcacgtaccgcgtgggcagcgcccagcccgcccgccccgcgcgcacggctccttctcccacgtgcgcgacgcggacctgctcaagaagaggcgctcgcggctgcggaacagcagctcgttctcgatggacgatccggacgcgggagccatgggagctgcggctgcagaagccaggcccctgaccccagccctgccccaggccacccacagctgcagactctcaacggcccctggtgggagttcccccctcgaaggaaccaccccca

SEQ ID NO: 188201 - DNA, 1642 bp, Homo Sapiens
ttggtagaaacctctaaatcgaaatattataaaatcttgagcacttagtcctgctggttttagttagaaaggcatccaggaattgttttcctacgcccccttgagtggaaagatcttagttagaagataaagtcaagtttgtgttcaggggatgggaggaagactataaataagatgaagaaatcaaaagtaggaaacatgatgtaaacgaagcatggcagatctgtccagcactgatattgctctataaattgagcttactcagttttggccttatttttttacccaggccccatgtcacccagtcctaaaacagtaaccgtgtctacataacgggttggcccctggtgcatccctggaaaagtcaaaggacgcacacttcgaaattctgcagaacgtatttatacatggttcagaaatcttgcgtatctgacttatagccaaatctgcttgctcgaatagcctcagaggaagtcttgtttaataaaaaccttttgatttcctagtcaagtctttatggttgtctcgaggggtgtgtggctactttaatgaaaggctttcctgctctaaatctctttgctgggctgggcctcttcagactatctggtgaaactcctttccttagaacaaactcagtccgtccatgctctgtggcattttgctagatgataaccaaagccttattcctgtagccagtgtcagcagtcagagaggtggagggtgtgttctgctgtggttatgcatacctatctgctgttcttgaggtgtaaaaggaaaggtgaaaatcgggccaggccaagtactcagctgtcttaataggatgaagccttaagcagtggaaatttcagttattttccacagtattccattttggaggatttggggtgtttactttttaaattcttgaacaacttaacctccatgaggctttgtgaagtcagctgtgaccaccctcctcttactgtgttctcagtattcattcacttccagggaagaatgacagccacagggagatggtggtgggcaagaatgagagtcccaggatccagatttagcctcagatcttccccattcaggaagggttttccatttaacaagagcactagtatgaaaacattagggacaaatctcccatgtctttgaaattcggattctcctcttgagatccccttcctcacctgccaatcaactttataaggccacaagtggtcactggttttccttccacaggtttgaggttctcagctttccttaagcgacccagcagctccgctgttttcagagtgaatatgttaagctttgatgagattctattttcagtaagttagtgcttctgggacacttggagaaagctgtgagagtcattgtctacgcaaagaacaacgaagctgatcctaaaagtgatccaatctaagaaaatggtaaaacgagctctggccacagcacagaattttatgtgaggaactcagatttttgaagacttaacaattgcagagaaaggttgcagcctgcacaccatagcccacctctctgagcagactttggttttgtgtggtgacgtggcacatgtttgtacactgggatttttcaaggacgctacgcgagcagactgacttgcctcttctgtgagcactgtggcttt

SEQ ID NO: 188202 - DNA, 1730 bp, Homo Sapiens
ttggcccaaaatggcgagtgaggctgcggggactcgctgagcagcggagggggagcgtgcagagccgctgcggccctcacagtccggagcccggccgtgccgtgccgtagggaacatgcacttttccattcccgaaaccgagtcccgcagcggggacagcggcggctccgcctacgtggcctataacattcacgtgaatggagtcctgcactgtcgggtgcgctacagccagctcctggggctgcacgagcagcttcggaaggagtatggggccaatgtgcttcctgcattccccccaaagaagcttttctctctgactcctgctgaggtagaacagaggagagagcagttagagaagtacatgcaagctgttcggcaagacccattgcttgggagcagcgagactttcaacagtttcctgcgtcgggcacaacaggagacacagcaggtccccacagaggaagtgtccttggaagtgctgctcagcaacgggcagaaagttctggtcaacgtgctaacttcagatcagactgaggatgtcctggaggctgtagctgcaaagctggatcttccagatgacttgattggatactttagtctattcttagttcgagaaaaagaggatggagccttttcttttgtacggaagttgcaagagtttgagctgccttatgtgtctgtcaccagccttcggagtcaagagtataagattgtgctaaggaagagttattgggactctgcctatgatgacgatgtcatggagaaccgggttggcctgaacctgctttatgctcagacggtatcagatattgagcgtgggtggatcttggtcaccaaggaacagcaccggcaactcaaatctctgcaagagaaagtctccaagaaggagttcctgagactggcccagacgctgcggcactatggctacttgcgctttgatgcctgtgtggctgacttcccagaaaaggactgtcctgtggtggtgagcgcgggcaacagtgagctcagcctgcagctccgcctgcctggccagcaactccgagaaggctccttccgggtcacccgcatgcgatgctggcgggtcacctcctctgtaccattgcccagtggaagcacgagcagcccaggccggggccggggtgaggtgcgcctggaactggcttttgaatacctcatgagcaaggaccggctacagtgggtcaccatcactagcccccaggctatcatgatgagcatctgcttgcagtccatggttgatgaactgatggtgaagaaatctggcggcagtatcaggaagatgctgcgccggcgggtggggggtactctgagacgctcagacagccagcaagcagtgaagtccccaccactgcttgagtcacctgatgccacccgggagtctatggtcaaactctcaagtaagctgagtgccgtgagcttgcggggaattggcagtcccagcacagatgccagtgccagtgatgtccacggcaatttcgccttcgagggcattggagatgaggatctgtaatctccactgcttggatgtctgccctctaccccagaggaatttacagaaacttgccctgtgcctgtgtcccccatgctaggggcggaggggtcttttccttcttctttcctacctaccccttttctcttgggcaggggcctcgtatcctacctttccttggccccttgggctgggctgcccaaaggattgccccttctctttt

SEQ ID NO: 188203 - DNA, 2471 bp, Homo Sapiens
ttggccttggcaaatagtcctcggcagggtccgagttcttggataattcgagagaaaaggcacgataagttgcagtacgaggacacggaaacgaccaggagaggaggacagggagcgaagtttcctcaatagtgtgtgaagttagttaaaaactccctccttcctcaggatccctccgcctgcggtagcggtggtgaggccgagggagccgccattttggatgttcggttcctgctgccactgctgccgccgcccccggagctgctggtttcattcgaggtttcgggccgaggatgccagcccccatcagattgcgggagctgatccggaccatccggacagcccgaacccaagctgaagaacgagaaatgatccagaaagaatgtgctgcaatccggtcatcttttagagaagaagacaatacataccgatgtcggaatgtggcaaaattactgtatatgcacatgctgggctaccctgctcactttggacagttggagtgcctcaagcttattgcctctcaaaaatttacagacaaacgcattggctatttaggggcaatgctgctgttagatgaaagacaagatgtccatcttctcatgaccaactgtatcaagaatgatcttaatcatagcacgcaattcgtacaggggttagcactttgtaccctcggctgcatgggctcctcagagatgtgcagagatcttgcaggagaggtagagaagctcctgaaaacctccaactcttacttaagaaaaaaggcagcactgtgtgctgttcatgtcatcaggaaagttcctgaactgatggagatgtttttaccagcaacaaaaaatttattgaatgagaagaaccatggtgtcctccacacatctgtagtcctcctcacagaaatgtgtgagcgaagcccagacatgcttgcgcatttcagaaagcttgtgccccaattagttcgtattttaaagaacctcatcatgtccggatattcaccagaaacatgatgtttctggtatcagtgacccctttttgcaggtacgaattttgcggttattaagaattttaggacgaaatgatgatgattcaagtgaagctatgaatgatatattagcacaggttgccactaatactgagactagtaaaaatgtaggaaatgctattctttatgaaacggttttgactatcatggatattaagtcagagagtggattgcgagtcctagccataaatatcctgggtcgtttcttattgaacaatgacaagaatattagatatgtggctctgacatctttgttgaagactgtacagacagatcataatgcagtacagaggcacagaagcacaattgtggactgtcttaaagatttggatgtctcaataaaacggcgtgcaatggaattgagttttgccctggtaaatgggaataatatccgaggcatgatgaaagaattactttattttctggattcgtgtgagccagaatttaaagcagactgtgcatctggaatctttcttgctgcagaaaagtatgcaccttccaaacgatggcatatagacacaattatgcgtgttttgacaacggcaggaagttatgttcgtgatgatgcagtccccaatttaatccagttaataactaatagtgtggagatgcatgcctatactgtccagcgcctgtacaaagcaattcttggtgattattctcaacaacctttggtacaagtggctgcatggtgtataggtgaatatggtgatcttcttgtatctggccagtgtgaagaggaagagcctattcaggtaacagaggatgaagtgttggatattttagaaagtgtcctaatctctaatatgtccacctctgtgacacgaggttatgccctcactgccattatgaagctttccactcgattcacttgtactgtaaaccgaattaagaaagtggtttccatctacggaagcagcattgatgtggaactccagcagagggcagtagaatataatgcacttttcaagaaatatgaccacatgaggtctgccctacttgagagaatgcctgtcatggaaaaagtgaccacaaatggccctactgagattgtgcagacaaatggagagacagaaccagctccactagagaccaaaccgccaccctctgggccacagcccaccagccaggccaatgatttattggatttgttgggaggaaatgacataacacctgttattccaactgcgcctacaagcaaaccatcttctgctggtggagaacttcttgatttgctgggagacatcaaccttacaggtgctccagctgctgctcctgcccctgcctcagtcccacagatatcccagccccacttcttgttggatgggctttcatcacagcctctcttcaatgatattgctgcagcatcccctccatcacagcatacagtaagaatggcttgaagatagaattcacctttgaacggtcaaatacc

SEQ ID NO: 188204 - DNA, 1511 bp, Homo Sapiens
ggggcaaaaaggcatatagcggatgaggtagttttcagcccagatgtaggtagctgtggcgaaaggcactacgaggccgtggcccactcaccacttatacagctccaggcccaacaggccgccacagctgctgtagtggtggcaatggctgggataatctggcccacaattcgcttgctctgggcacggttgaccggtggaatcccgtagttctgacatctcaggctagctgccgctaccacaaagtccacatggaagttgctgtcatcatccttctcaaacatcagaggcttcaggggagggcccacactccagacttccagggctttgttcagttccttctgctgctcagggccaaactcagcagaagccgaagccagctctagattactagcaaagatgggggccatctgttgggggtcaggctgtggcagcagcttcagcagctccctgagtgcagtccagtcctgtgagccaggcagcccatgcatctgggcatacaggttggcagctgccagtacgtagaggaggtgtgtgtcttggttggtgtcaaactccaagggctggggacactgtttgggacctgaccagaagggagttccatcctcaagcactttattaggtgggaagtgcctcagcagctgtttgatgccataatgaaagcagagtttccagtggccaagagcccacgccacacagtcttgccagttctgtggacgcactctcaggaccccaagcactggcttcagtaaggtgagtgtctgtggctcatccatgtctgccagggaagtgtgtgcctgttggtggtggttgatggtctctgcagacagtcggaagagttcttcaaactcatgccgggcccactgcagggtgtgctcggctgtgctagggaagtaccgcacggtacagacagggtagggggcatcctcagaagctgcagctgaggcaggggctctgtaggcctcagtcacatgtggcatgaatactgtagcactgccccaggtgcccgatgtgcctgcctccagcagtggcttcagatagtgggtgcaacgagcagccacatagcgccgggcctggaaactgtccagggcagcagccacaccatccacacgggagaaaaagttatccccatagatgtgctctgtggtgggatccagtgggtaggtgagcgggatcacctgtaagtctgggttcaggccccgggcagctgctgcagccacctctgccttgggtctaccaacgtcctgggacctgaagaggaactgacggctgagattggagcgctctatgtggtccatgtcaacaacagtcaagcccccgctgttcccggcccccagtcccactagggcaaagactttgagcagctcacaaccaatggcaccagcgcccaccaggaggtagtgctggcgtctcagtttctcctgaaaaccagccccaaacactgcaatttgcccatcatagcggctgcctctcagggcacagtcctcaggactgggaaggagctcccccaa

SEQ ID NO: 188205 - DNA, 1601 bp, Homo Sapiens
  misc_feature (982)..(1203): n is a, c, g, or t
  misc_feature (1318)..(1365): n is a, c, g, or t
ttggggtcaagatgttctcccaccaagtgcagaagaacctggctccgttctttgaggcctgggcctggcccatccagaaggaagtggctaccagcctggcctatctgcctgaatggaaggaaaatattatgaaattgtacctcctcacacagatgccccactgaaattgaagtcaagaaatgcaaaaaggaactgacacatctcagcaaagaaaactgaagggatttggttataagtggagaggatctcagcatatttctggaagatagaaagtggatgaagcatgataatgaaagagtgaagaacctttcagataaaatgtaagctgatctgaacaacataaccccaaagagacttgcgcacctgaaaagcttgtctactgaagaattactccagttgtaagattgagccctctcctactctcccccaactcttatgcacagaacacaggcagtctccactattgataccagttaaaaatttcttgttattgttgctgttgttgtttgtataaaggaattgaacaggctgcttgcagagagataagagttggtgctccagaaaaaaatttctcttctagtggaaataagtgcccctacccccagccggtcagctaattctctactgacagctgagacctcctactcaagtgcctgttgccttcaggtatagaagaggtttcctgaagaaacagacctaactgtacaacagcagaggaaacccatgccaactgttatacaagttaacagttatgttgattcttaaatgggaatggtgagttagaaattcccagacatgggcgatggggagggaagaggaataagaaaagtcacgaggtagaattaggggccttgaaaatatgacaaactctgagggaaacaaagacaatgtggaaagaataacttaattttaattccatctccagagagatttgaggtgtatttaagatgaaaaacaggatactacaaagaaacggaaaacnnnnnnnnnnnnnnnnnnnnnnnnnnnnnnnnnnnnnnnnnnnnnnnnnnnnnnnnnnnnnnnnnnnnnnnnnnnnnnnnnnnnnnnnnnnnnnnnnnnnnnnnnnnnnnnnnnnnnnnnnnnnnnnnnnnnnnnnnnnnnnnnnnnnnnnnnnnnnnnnnnnnnnnnnnnnnnnnnnnnnnnnnnnnnnnnnnnnnnnnnnnnnnnnnnnnnnnnnnnnnngcaagaaaagaaagagaagactgagaataagaagatctctttgaaaataaaataagactgctaaaagtatttggtatacagtctggaaaataaagttgagggaatctctccagannnnnnnnnnnnnnnnnnnnnnnnnnnnnnnnnnnnnnnnnnnnnnnncatagacaatcaatatgtaatgttaggagttcctggaagagagaacagagacagtgtaggtgaagaaataaaaagaaaaagaattgaagaacagagcaagctaagtctccagattgagagggcccaatacaatctacatctagacacaatattgtaaaattttggaatattaaggatagaaggaagatattaaagtggccagggagaaaacaaatgaggtcatcacgattagctca

SEQ ID NO: 188206 - DNA, 1141 bp, Homo Sapiens
  misc_feature (113)..(138): n is a, c, g, or t
gaaaaagttctggagatctgtttcacacagtgtaaatgtacttcacatggctgaactgtattctttagaaacagttaatatggtaaattttatgttatgagtttttcatcacnnnnnnnnnnnnnnnnnnnnnnnnnnttcaatttttacacaaattattactataaaacatggtagacattctgataggataagtgcttttccttttggataaaaaaagcaacctgtattaaagcctataatttgatgacatctgtatgatccttttttttctctacactcaaatgctgactttcctttcctatctgttgtaaccccactgtcctgatcctactctaccccatctctaattctcttagttcatgaatttaactaattcttagtccaaaaagggtccagaattcagagtggacaaacagcaattgggcaacacatagacagtatgtttctactatgtaaaaatgacccagcaagttttgatatttgaaccagacacatcttaagcagcatgcatttcaatatgctaaaatgctcttacaggctaacaccataaaaatataaattttagaaatgtatttccaacattaattatcaattaattttatgcttccatagctagctggtcaatttgcaatgtttaaagttacaaatatcttatgcataatttgaccaactaaacatttgtctaatatattcctacactaatacaaaattatcttttcttgaaaaccttcttgctcccaacaaaattaaatatgtatatagtataagcagtaagaacgttaaattacgtgaacaaataccattagaacagcaccatctggtatgttgtatgtgtatgttttgagtaacaacgctaacaatcttagaagaataaaggagaaaatggtagggtgagggatacagagaggaaatccaaacactactcaatgacaactcttctgaaacgttaggaaatgttatcaggacctttggatctcttccttttaactacagattccttaaaatacacaactgctgcacaataaattctgagtgtgctaagatgccatttttccactgttgtgtatctaatccctaaagcccaataaatacttttttgaatgaaggcgtgtcagtttccaacttttttgtacaaagt

SEQ ID NO: 188207 - DNA, 1795 bp, Homo Sapiens
  misc_feature (96)..(121): n is a, c, g, or t
ttggcaggttgctttttttaatccaaaaggaaaagcacttatcctatcagaatgtctaccatgttttatagtaataatttgtgtaaaaaattgaannnnnnnnnnnnnnnnnnnnnnnnnngtgatgaaaaactcataacataaaatttaccatattaactgtttctaaagaatacagttcagccatgtgaagtacatttacactgttgtgaaacagatctccagaactttttcatcttgcaaaactgaaactccatacccattaaacaactcccctttttgttttctcctcagtggaatagaattttgactccatataaatcaagaaacacctaaattctttagttgtttgtgtttgcaagatctaaggtcatggtaaacattaagttcttaaaatttttgggagggacagtgcacctctcctctgaattgttagcaattaaattgagtaggttttaaatgtctattcattggaagggtttgttatttcattttgagccagaggggagaggcacattttaaatatcagaattagattagctttgagtttgtacaattgggaacataatagattttcataaattatgtgtgccttgttggaagtgtcaactgtctttatgtctgcttgtaaaagtttcaaaatatgttttccctcaaaaaggcaacgttacttcatttgcttgaatattatgataggaatgcttactgatattacttgatagtcatatatagcctagaaatttaacatatatataactatagcagtattaataatgatagttgtacttctttaaaacattaaatttgaggaaactttaatgctgtctcgtgtacattgctttactacagtgagggggaatatcctttagattgagcctcaatttactggttagtagtatgtgaaactctggtataaaaacgtaaactagacagtagagccgatgaattaaaattgtaaattgctacattggcattttctacctccttttctgtcagagtattactttttccagcatttattcttatttgtgagtaaagaggaaatgggaacctgaggttaaaattgacatttttgtttcattgagaatttaagcagtaggtacaggagaagtgacttgtcacattaatttggtgcctaaatctgtaactacaagttgtgatcgacatgtacaaaatgtctaagaaaggtcatatgctgaatattttacttttcctgtatagtctgcatgatttgtttcataaacccagcttatttcctccaaaaagcaaaatggtcctgtaatttttaaagtaaaataaacgtgccattttgtctgcaatctataatttcaggaagttattgaaagttctgactcagggctttttaacagttcaagcaattgtcagttatattttggaaactccatctgtgtaattctccagtgccttgaaagaattattaacttggcaacactattaaaactttataaaagatggtctttagtgcacgtgtatcattatatacacgttttaaagtcatattgcttagcttgttaataatgattctgcatgtgtgctgggtttgggtaattctttaaaggaagttttctagatttgcacttgatgtttgttttttaaaaactgattatttatggccgtgacactgttaccagaaaagtaattctaattaagttattatgcaaagtcatctataagtagcatctgggaagaggagatcgaggccacagtttgctattttagtatgaaaggaggatctgtttgggaaacatagattgtcttcccctcaaatgaaggg

SEQ ID NO: 188208 - DNA, 1496 bp, Homo Sapiens
ccaactttgtacaaaaaagttgggtctttgaaaggaaacatggctgcttttctaaagaatgtgtgtctggggttggaagatctgcagtatgttttcatgatttcttcacatgagcttttcattacattgttgaaagatgaagaacgaaagctacttgttgatcagatgaggaagagatcccctagagtaaatctgtgcattaaacctgtaacttcattttatgatatcccagcttcagcaagtgtcaacattggtcagttagagcatcaacttatattgtcagtggatccttggaggattagacaaattttaattgaattacatggtatgacttcagagcgccagttctggacagtgtctaataagtgggaagtaccttctgtctatagtggtgttatcctgggaattaaagacaatttaacaagagatttggtttatattcttatggccaaaggtttgcactgcagtactgttaaggacttttcccatgctaaacagctctttgctgcttgtttggagttggtaacagagttctcaccgaagcttcgtcaggtcatgctgaatgagatgttgcttttggatattcatacacacgaagctgggacagggcaggcaggagagagaccgccatccgaccttataagtagagtacgaggctatctggaaatgaggcttcctgatattcctcttcgtcaagttatagctgaggaatgtgttgcctttatgttaaactggagagaaaatgaataccttacactccaagttcctgcatttttgcttcagagtaatccatatgtaaagcttggacagcttttagcagctacatgcaaagaacttccaggccctaaagaaagtagacggactgccaaagacctttgggaagttgttgttcaaatctgtagtgtgtccagtcagcacaaacgaggaaatgatggcagagttagtttaataaaacagagggaatctacgttaggtatcatgtatcggagtgaactgctttcttttatcaaaaaattacgagaaccactcgttttgactattattttatcactctttgtgaaacttcacaatgttcgggaggacattgtgaatgatattacagctgaacacatttctatttggccatcttccattcccaacctccagtctgtggactttgaagctgtggcaatcacagtgaaagagctagttcgatatacactcagtataaatccaaataaccattcttggttaattatccaggcagatatttactttgcaacgaatcagtattcagcagctcttcactattacctccaggcaggagctgtgtgttctgacttctttaacaaggctgtgccccctgatgtttatacagaccaggtaataaaacgaatgataaaatgttgttctttgctgaattgccacacacaggtggccattttatgtcagttcctcagagaaattgactacaaaacagcgtttaaatctctgcaagaacaaaacagtcatgatgc

SEQ ID NO: 188209 - DNA, 950 bp, Homo Sapiens
ttgggaggctagcagggagcggtgagggagagcggctggatttcttacgggatcggcacgtgcgatttttccagcgctgcctccaggttttgccggagcgctattcttcactcgagacaagcaggttgacaattgcattttttgcactctccgggctggatatgttggattccttagatgtggtgaacaaagatgatataatagagtggatttattccctgcaggtccttcccacagaagacagatcaaatctaaatcgctgtggtttccgaggctcttcatacctgggtattccgttcaatccatcaaaggctcctggaacagctcatccttatgatagtggccacattgcaatgacctacactggcctctcatgcttagttattcttggagacgacttaagccgagtaaataaagaagcttgcttagcgggcttgagagcccttcagctggaagatgggagtttttgtgcagtacctgaaggcagtgaaaatgacatgcgatttgtgtactgtgcttcctgtatttgctatatgctcaacaactggtcaggcatggatatgaaaaaagccatcacctatattagaaggagtatgtcctatgacaatggactggcacagggagctggacttgaatctcatggaggatcaactttttgtggcattgcctcactatgtctgatgggtaaactagaagaagttttttcagaaaaagaattgaacaggataaagaggtggtgtataatgaggcaacaaaatggttatcatggaagacctaataagcctgtagacacctgttattctttttgggtgggagcaactctgaagcttctaaaaaattttccaatacactaactttgagaaaaatagaaattacatcttatcaactcaagatcgccttgtaggggggatttgccaagtggccagacagtcatccagatgctttgcatg

SEQ ID NO: 188210 - DNA, 1863 bp, Homo Sapiens
  misc_feature (1545)..(1562): n is a, c, g, or t
ttggcgctgtccctctccgcggcggtctggtttccccgacgtgttttgtttgcgacgctgtcgtgtaacagcgcgctttacggccgcggggacggagcgagccggcgccagggcccctcgggccgggaagaggggaaggggagcgaggttgatgcccggcggaggggcgagcgcggcgtctggccggcttctcaccgccgcggagcaaagagggtcccgggaagcggcagggtcggcgtccaggagcggcttcgggggctccggcggcggcagaggcggagcaagcggccccgggtccgggagcggaggcccggggggccccgcgggcaggatgagcttgaccccgaaggagctctcgagcctgctgagcatcatatcggaggaggcgggcggcggcagcaccttcgagggcctgtccaccgccttccaccactacttcagcaaggccgaccacttccgcctgggctcggtgctcgtcatgctgctccagcagcccgacctgctgcctagcgcggcgcagcgcctcacggcgctctacctgctctgggagatgtaccgcaccgagccgctggccgccaaccccttcgccgccagcttcgcgcacctgctcaaccccgcgccgcccgcccgcggcggccaggaacccgaccgccctccgctctcaggatttttacctcctataactccaccagaaaagttttttctttcccagctgatgctggcacccccacgggaactcttcaaaaagacgcctcgccagattgcactgatggacgttggaaacatgggccagtctgtggacattagtgggcttcagttagccttggccgaacgccaatctgaattgccaacgcaaagcaaagcgagcttccccagtattctcagtgacccagacccggattcttctaattctggatttgacagctcagttgcctctcagatcacagaagctttagtcagcggaccaaagccacctattgaaagccattttcgaccagagtttattcgtccaccgcctccactccacatttgtgaggatgaacttgcttggctaaaccccacggagcctgaccacgcgatccagtgggataaatcgatgtgtgttaagaatagcactggtgtggagatcaaacgaataatggccaaagccttcaaaagccccttatcctctccccaacaaacacagctacttggtgagttggaaaaagaccccaaacttgtctaccatattggcctcaccccagccaaacttcctgaccttgtggaaaacaaccctttagtcgctatagaaatgttgctgaaattaatgcagtcaagccagatcactgagtatttctctgtcctggtcaatatggacatgtctttacattcaatggaagttgtaaatcgactaactacagctgttgatctacctcctgaatttattcacctttatatatcaaattgcatctctacttgtgaacagattaaggataaatatatgcaggtaatataaatttttgtaaattttataaatggctgccaggaaaatgagcagactaacannnnnnnnnnnnnnnnnncagaatcggttggtgcgtcttgtgtgtgtgtttctccaatccttgatccgtaacaaaattattaatgtacaggatttgtttatagaagtgcaggcattctgtattgaattcagtaggatacgagaagctgctggtcttttccggttgttgaagacattggatactggggaaacacctttctgagaccaaaatgtcaaaataatacctcatcagaacccatcccatccattcactgttcagctgtactgtgatttagtttttacaccgttaaaaccctgagtggaattgcttggttttaatg

SEQ ID NO: 188211 - DNA, 1268 bp, Homo Sapiens
ttgggtcagaagaacgggtggtacgtaaagtcctttatttgtctctgaaggagttcaagaattcccagaagaggcagcatgcggaaggcattgctgggagcctgaaaactgtgaatgggctccttggtaatgaccagtctaagggattaggaccagcatcagaacagtcagagaatgaaaaggacgatgcatcccaagtgtcctccactagcaacgatgttagttcttcagattttgaagaagggccgtcgaggaaaaggcccaggctgcaagcacaaaggaagtttgctcagtctcagccgaatagtcccagcacaactccagtaaagatagtggagccattgctaccccctccagctactcagatatcagacctctctaaaaggaagcctaagacagaagattttcttacctttctctgccttcgaggttctcctgcgctgcccaacagcatggtgtattttggaagctctcaggatgaggaggaagtcgaggaggaagatgatgagacagaagacgtcaaaacagccaccaacaatgcttcatcttcatgccagtcgacccccaggaaaggaaaaacccacaaacatgttcacaacgggcatgttttcaatggttccagcaggtcaacacgggagaaggaacctgttcaaaaacacaaaagcaaagaggccactcccgcaaaggagaagcacagcgatcaccgggctgacagccgccgggagcaggcttcagctaaccaccccgcagcggccccctccacgggttcctcggccaaggggcttgctgccacccatcaccacccccctctgcatcggtcggctcaggacttacggaaacaggtttctaaggtaaacggagtcactcgaatgtcatctctgggtgcaggtgtaaccagtgccaaaaagatgcgcgaggtcagaccttcaccatccaaaactgtgaagtacactgccacggtgacgaagggggctgtcacatacaccaaagccaagagagaactggtcaaggacaccaaacccaatcaccacaagcccagttccgctgtcaaccacacaatctcagggaaaactgaaagtagcaatgcaaaaacccgcaaacaggtgctatccctcgggggggcgtccaagtccactgggcccgccgtcaatggcctcaggtcagtggcaggttgaacccaaagtcatgcactaaagagtggggggggcggcagctgcgggagggcctgcagctgcgggagggctgcggaacttctaagaggagactgg

SEQ ID NO: 188212 - DNA, 880 bp, Homo Sapiens
  misc_feature (61)..(98): n is a, c, g, or t
ttggcgctgagccatccatgggggtcgcgggccgcaaccgtcccggggcggcctgggcggnnnnnnnnnnnnnnnnnnnnnnnnnnnnnnnnnnnnnngcgggggccgtcccgccgggtcggggccgtgccgcggggccgcaggaggatgtagatgagtgtgcccaagggctagatgactgccatgccgacgccctgtgtcagaacacacccacctcctacaagtgctcctgcaagcctggctaccaaggggaaggcaggcagtgtgaggacatcgatgaatgtggaaatgagctcaatggaggctgtgtccatgactgtttgaatattccaggcaattatcgttgcacttgttttgatggcttcatgttggctcatgacggtcataattgtcttgatgtggacgagtgcctggagaacaatggcggctgccagcatacctgtgtcaacgtcatggggagctatgagtgctgctgcaaggaggggtttttcctgagtgacaatcagcacacctgcattcaccgctcggaagagggcctgagctgcatgaataaggatcacggctgtagtcacatctgcaaggaggccccaaggggcagcgtcgcctgtgagtgcaggcctggttttgagctggccaagaaccagagagactgcatcttgacctgtaaccatgggaacggtgggtgccagcactcctgtgacgatacagccgatggcccagagtgcagctgccatccacagtacaagatgcacacagatgggaggagctgccttgagcgagaggacactgtcctggaaggtgacagagagcaacaccacatcagtggtggatggggataaaccgggtgaaacggcggctgctcatggaaaacgtgtgctgt

SEQ ID NO: 188213 - DNA, 1314 bp, Homo Sapiens
ttgggtcgggtgcagactgcggagcgggccctaccgtgtgcgcagaaagaggaggcgcttgttgcggcattgccctgactgcggagtgcatcttctttgtatctgaccaacacagcctctacccactgcttgaagccaccgacaacgatgacatctatggggctgcctggatcggcatatttgtgggcatctgcctcttctgcctgtctgttctaggcattgtaggcatcatgaagtccagcaggaaaattcttctggcgtatttcattctgatgtttatagtatatgcctttgaagtggcatcttgtatcacagcagcaacacaacgagactttttcacacccaacctcttcctgaagcagatgctagagaggtaccaaaacaacagccctccaaacaatgatgaccagtggaaaaacaatggagtcaccaaaacctgggacaggctcatgctccaggacaattgctgtggcgtaaatggtccatcagactggcaaaaatacacatctgccttccggactgagaataatgatgctgactatccctggcctcgtcaatgctgtgttatgaacaatcttaaagaacctctcaacctggaggcttgtaaactaggcgtgcctggtttttatcacaatcagggctgctatgaactgatctctggtccaatgaaccgacacgcctggggggttgcctggtttggatttgccattctctgctggactttttgggttctcctgggtaccatgttctactggagcagaattgaatattaagcataaagtgttgccaccatacctccttccccgagtgactctggatttggtgctggaaccagctctctcctaatattccacgtttgtgccccacactaacgtgtgtgtcttacattgccaagtcagatggtacggacttcctttaggatctcaggcttctgcagttctcatgactcctacttttcatcctagtctagcattctgcaacatttatatagactgttgaaaggagaatttgaaaaatgcataataactacttccatccctgcttatttttaatttgggaaaataaatacattcgaaggaacctgtgttatcacagtaacccagagctgtatttggctagcaatctgcctgtatctctcactattatctaaaagaaaccttccaatgcttctgttgatctcagtattgtcaggggaacagagaagttgggaaaagattactgaaatataccttttgcatttctttctagagtagctcccaaagtgctagtattatgggcgtgaaccaccatgcccagccgaaaagcttttgaggg

SEQ ID NO: 188214 - DNA, 1588 bp, Homo Sapiens
  misc_feature (963)..(973): n is a, c, g, or t
  misc_feature (1198)..(1220): n is a, c, g, or t
ttgggattttgaaacctaagctaagaaatgtgggtttgatatgctgaaaaatagggagctacttaaaatttttgaacaagcaagtcacatgatgaaattaattgaggaacattgtatttgtgattgcatatggatggagtgggaggacctagaggcaaagacattagataggagaccaccagaacaaactagacgtgaaaggtgcagctgtggaaatggaaagagatgggcaaaaccaaaaatcaccacagagaaaaaaaatcatccagatttcatgatagattggatgtattttgaaacacctctctccatacaaatgaaataattcagcaaaattctagaaaatgctggtgtaggagctcagtggaaatctcccgtaagtgctgtgagaaattataaattctggggactccagctgatacagtgtgcattcacttacagcttcctttgcccctttgtacactagagcacaacaggaaatattggcttatctctgtaggaagtgtctctataggagttgcttactgaactgaatatctttgtttagaactaattgacctttctaaaacagcatttttaaagagcttactcaaataaggcagactttaaccatctgataagtcagagacaaatcagtcctcttctaagcaaggttgacagtcagtgcaagagaaaagaaagcacagaaagaaaggcaccatcagacaaaagaacagtgtattagtaaaaaccagataattaagaaaattttatttaatgtgaacattgaattctaacacaaatccttttcctgcattatgatagtatctgtgtgaaccaaccttttttcagccctttttgttatggaatgttaagaatgttagtttacaaggttataaagtagaagagtctaattagaaaccagaaaatatctcagtcttttggtctgaatttgttttcctttggttagattcttaaagtagnnnnnnnnnnnctactacttattttgtaaacattttgaggattttgattcagatattttaaattattatgagagataaagaataaccctgtccaaaaaagtaagaaaatgaataaaatttgtttaaaagaggattctcttaaaatataaccaaagggacagattttgacagcagtcttcattgttgttccatatgagtgttttctaaacctaacagatgtaagcaataaataagtnnnnnnnnnnnnnnnnnnnnnnntctctcaaatgaggctattggtttccttcaaaattaactcatcatctggtcagatatttccagaaattgtttttaactatctggcaaagctactgttttcagtgaagagagggatccaacagtgatttgatgttttagtttatataacaggacagtggtagtatcatcaatcacttagcagatttaattaagtattctctctatggtcaaatgcattaccattcttcccactagtctaatagtttgagtattggcttgctatttaagagaagtaagttatttttacaagaccttttgtcttgacaaaatatccataactcctttccactagccacagtattagagactactgtcgacacacacacaaa

SEQ ID NO: 188215 - DNA, 1127 bp, Homo Sapiens
ttggcgacacgctctcgcggtccagggcgctgtccagcaccaacgagtagtaattcttgaaggtggacaccagcttgaagggaacgtggggcattagggagcaggtcacctgcccgttggcacctgagtcacggtcagacacgctgatcagagcaatgaccgtgctgagtggagcgtcctctttgacaggcaggaaaagggtggttatggccatctctgggggattatcattcacatccaggagtttcactactactttacagtgtcctgataatgggaatgtacttttatccatggcatcaatattaatttcatatgagttatagtcttcataatccagttccccgttaacttttatttcaccagtattagaattaattataaatttggactttacatcgtcaagaacaagattactaaagaaatacactatttccttattgatgccctcatctgcatctgaggcgttcagtttaataactaatgtcccacttggtgcattttccaacaatctgacattataaatggatttatcaaattctggggcgttatcattagcatccaatacattgatcaacaactgaactgtacctgttagttcgggttttcctccatcagttgcaatcactaataaacggtgttcttgtgtttcttctctatctaaggatttcctcaaaaccagctctaaaaagttcgtttcttcttcatttgttttaacatctaagtcaaaatattcgtttggatttaacctgtatctcaattgtgcatttgctccaatatccaaatccgacgcgccctctagcggaaaccgcgaatctggcattcttgactctaaaatgaataatctttgttcttgtctggagaacctgggcggattgtcattgatgtccttcactgccacctccacatggaaaacctgcagcggcctgtccacgatcacctccaggtggatgctgcactccgccctccgccggcacagctcctcccggtcgatccgagaattcacaaacaaaatgccattctgcagatttacctccagaaatccccgcggcccttggacgccacccggaacagcgcggcaccagctccgccagctccagccctaaggtcctgcgcgatgcggccaa

SEQ ID NO: 188216 - DNA, 717 bp, Homo Sapiens
ttggcctacttcttggtgaggttcactgtgatatacaacgaacagatggcaagcaagaagcgggagctcttcagtaacctgcaggagtttgcgggcccctccgggaaactctccctgctggaagtgggctgtggcacgggggccaacttcaagttctacccacctgggtgcagggtgacctgtattgaccccaaccccaactttgagaagtttttgatcaagagcattgcagagaaccgacacctgcagtttgagcgctttgtggtagctgccggggagaacatgcaccaggtggctgatggctctgtggatgtggtggtctgcaccctggtgctgtgctctgtgaagaaccaggagcggattctccgcgaggtgtgcagagtgctgagaccgggaggggctttctatttcatggagcatgtggcagctgagtgttcgacttggaattacttctggcaacaagtcctggatcctgcctggcaccttctgtttgatgggtgcaacctgaccagagagagctggaaggccctggagcgggccagcttctctaagctgaagctgcagcacatccaggccccactgtcctgggagttggtgcgccctcatatctatggatatgctgtgaaatagtgtgagctggcagttaagagctgaatggctcaaagaatttaaagcttcagttttacatttaaaatgctaagtgggagaagagaaacc

SEQ ID NO: 188217 - DNA, 1165 bp, Homo Sapiens
ttggggtatgaggttgactcatttacaccatttcgcaaagctcagattggtcctccagaagtacatttagaagctgaagataaggcaatagtgatacacatctctcctggaacaaaagatagtgttatgtgggctttggatggtttaagctttacatatagcttagttatctggaaaaactcttcaggtgtagaagaaaggattgaaaatatttattccagacataaaatttataaactctcaccagagactacttattgtctaaaagttaaagcagcactacttacgtcatggaaaattggtgtctatagtccagtacattgtataaagaccacagttgaaaatgaactacctccaccagaaaatatagaagtcagtgtccaaaatcagaactatgttcttaaatgggattatacatatgcaaacatgacctttcaagttcagtggctccacgcctttttaaaaaggaatcctggaaaccatttgtataaatggaaacaaatacctgactgtgaaaatgtcaaaactacccagtgtgtctttcctcaaaacgttttccaaaaaggaatttaccttctccgcgtacaagcatctgatggaaataacacatctttttggtctgaagagataaagtttgatactgaaatacaagctttcctacttcctccagtctttaacattagatcccttagtgattcattccatatctatatcggtgctccaaaacagtctggaaacacgcctgtgatccaggattatccactgatttatgaaattattttttgggaaaacacttcaaatgctgagagaaaaattatcgagaaaaaaactgatgttacagttcctaatttgaaaccactgactgtatattgtgtgaaagccagagcacacaccatggatgaaaagctgaataaaagcagtgtttttagtgacgctgtatgtgagaaaacaaaaccaggaaatacctctaaaatttggcttatagttggaatttgtattgcattatttgctctcccgtttgtcatttatgctgcgaaagtcttcttgagatgcatcaattatgtcttctttccatcacttaaaccttcttccagtatagatgagtatttctctgaacagccattgaagaatcttctgctttcacttctgagaacaaatcgaaaaa

SEQ ID NO: 188218 - DNA, 1490 bp, Homo Sapiens
ttggcgtcctcatacccacccccacccaagggcctggcctgagctgggatgattggaggggggaggtgggatcctccaggtgcacaagctccaagctcccaggcattccccaggaggccagccttgaccattctccaccttccagggacagagggggtggcctcccaactcaccccagccccaaaactctcctctgctgctggctggttagaggttccctttgacgccatcccagccccaatgaacaattatttattaaatgcccagccccttctgacccatgctgccctgtgagtactacagtcctcccatctcacacatgagcatcaggccaggccctctgcccactccctgcaacctgattgtgtctcttggtcctgctgcagttgccagtcaccccggccacctgcggtgctatctcccccagccccatcctctgtacagagcccacgcccccactggtgacatgtcttttcttgcatgaggctagtgtggtgtttcctggcactgcttccagtgaggctctgcccttggttaggcattgtgggaaggggagataagggtatctggtgactttcctctttggtctacactgtgctgagtctgaaggctgggttctgatcctagttccaccatcaagccaccaacatactcccatctgtgaaaggaaagagggaggtaaggaatacctgtccccctgacaacactcattgacctgaggcccttctctccagcccctggatgcagcctcacagtccttaccagcagagcaccttagacagtccctgccaatggactaacttgtctttggaccctgaggcccagagggcctgcaagggagtgagttgatagcacagaccctgccctgtgggcccccaaatggaaatgggcagagcagagaccatccctgaaggccccgcccaggcttagtcactgagacagcccgggctctgcctcccatcacccgctaagagggagggagggctccagacacatgtccaagaagcccaggaaaggctccaggagcagccacattcctgatgcttcttcagagactcctgcaggcagccaggccacaagacccttgtggtcccaccccacacacgccagattctttcctgaggctgggctcccttcccacctctctcactccttgaaaacactgttctctgccctccaagaccttctccttcacctttgtccccaccgcagacaggaccagggatttccatgatgttttccatgagtcccctgtttgtttctgaaagggacgctacccgggaagggggctgggacatgggaaaggggaagttgtaggcataaagtcaggggttcccttttttggctgctgaaggctcgagcatgcctggatggggctgcaccggctggcctggcccctcagggtccctggtggcagctcacctctcccttggattgtccccgacccttgccgtctacctgaggggcctcttatgggctgggttctaccc

SEQ ID NO: 188219 - DNA, 972 bp, Homo Sapiens
  misc_feature (78)..(96): n is a, c, g, or t
  misc_feature (538)..(589): n is a, c, g, or t
ttggcaccaccacttatgcccctagaagggaaggggagagggaaacgtgccctctgtttgatccttgttttgtgacannnnnnnnnnnnnnnnnnnactcaaagttaacctacctgtaactttttaaaaacttgtaaaataactgaccctcccttcctgtccgccctcttcccctctaatgctcacgctcccaacacaaggtgggcagggaggcaccattcaggaacctggaccaaagctgacgaggctgggccaagccagggatggggccacagccagaaccccgagccctacttccaggttctggttagctcagccccagcccagcccagctgctctgcccagagctgggtgagtggggagacacctcagagccccgcaaaacccactgaccggaggcaaaaggcagtggggctgggggtagttttccatggtcacagagaactagtggtggctctgagaaggggaggacctctgggctttgattccatctccttgtcttttttctttgtttttagagacagggtcctgctatttnnnnnnnnnnnnnnnnnnnnnnnnnnnnnnnnnnnnnnnnnnnnnnnnnnnntgggctcaagcaatcctcctgagtgatcccatttcttaatcagtgtagccccaagaaggctggggctatttaccagggtagaaaaaggagcttacctcccacctttggtcctaagtccctgccccctccccttcacaccataactaggtaacagtttgataactagggaagaaagcagaacagttaagcagccgccacatccccgctggctgggggcctcactccaggaaggggctggactggctgtcctttccagtggcctggctccgctgtgtggatggggagatcggggccagaggcagaaccctggtgaggaagctccagtcctgctctctacccagcccatcttgcctccatggtgcctctggaggcctctgggcctc

SEQ ID NO: 188220 - DNA, 1566 bp, Homo Sapiens
  misc_feature (591)..(642): n is a, c, g, or t
ttggctggtctttttcaggttgaaaaacattttagagacgtggaaagccaaaagatactgcaacgttcacaagcccagcaaccacagaaggaggctgccctgtcatcctgagtccgtacacatggaggactcttccagcatccagccaaggaggcgctggtggtggcttcagcggaggcaggccgggggagggaagggatcctatatgtcctgttggctcttaacaaagggtcagcatttccaaatcttagacttgaacaaacaaaacacccaacaaaaaagaacaagagaataattcaaaagttgaatcattacttgactaacagacttcggtccaccatgtccttttcacagccctcttctggaacagtcaccttgttaattttatttttgaaaattattttcccactctgccctttacttctgactttcctttcctagtttgttcctgccattctgtttttataagtggctacacttgccttctgaatgattgaaagaaacttttacatcttttcttccaaaataaaagtaacaagctgactgtgattcttaaattgagaccagagcagcaaacgtctcactttaaannnnnnnnnnnnnnnnnnnnnnnnnnnnnnnnnnnnnnnnnnnnnnnnnnnngcacagggcatggcttgaattagttttatttttcttaactttaaatatatatatgaaaatatatattaaaatgttctctaaatattttctgcttcttgcaggtctctttttactagatcatggctgttcttcccacctcatccctctgaaaataaaaatgtattgccctccccaccatccatcatagccaggccactaacttgacttggtgcaagagattcttgctgcgaactttgtagagccagtgtgcagatagaatttggctttgagggttcctgatggctttttagtctttaactgtgtgtgtaccagtctcacatttggcccaaacctcaggattctccctctgcctgtcttacttcatggtactagaagaccttcctcgccactctctccacatgagagagtcagctgccctttctcctgtgcctctgcaggaagaactctcttgcatggcacatctcagctcctcattgagggatagttttctttgataagaaacctggagtccatttactctgacctctctttaaatctatatccagagccactagcccaggaaaaacttgggtgacccgtaatttctcttctcctgctgtccttttgctcttacgccccaccccaactccccttaaattttacaggcttatgacagtttgtatgtgctcagccaatgagcagaaaacctggaaagaatttctggactttagcccaccagtttgtctggttgactaacctgctgagagctaaaattggcacccattgccccgtgccttcaggcagtctcctggggcagagtatgccaccatccgaatatcatgcactgagtgggatgtgggtgatgctcacatgactggctagagctctgggggtggggtgggggttaactactatttttttggccatgatctctttcccccttcc

SEQ ID NO: 188221 - DNA, 1279 bp, Homo Sapiens
ttggcttaatagtaccttttttttaacctgaaagttgactacctacctttcaggaaatataatattttttgggtttagctaggttgactttcttctagaaatggaaaagatggcaccctcggtaccaaagtgctgggactctgcactatgcttgtgtgtatgtgtgtgcctctgtcttgctctcttatctcccagcagtgagacattggacgtgtttgctcatgaagatgcagtatatggcttgtctgtgagcccagtgaatgacaacatttttgccagttcctcagatgatggccgggttctcatttgggacattcgggaatccccccatggagagcccttctgcctggcaaactatccatcagcctttcatagtgtcatgtttaaccctgtggagcccaggttgttggccacagccaattcaaaggaaggagtgggactctgggacattcgaaaacctcagagttctctcctgcgctatggtggaaacctgtccctccaaagtgccatgagtgtacgattcaacagcaacgggacccagctcctggccctgaggcgacgcctgccccctgtgctctatgacatccattcccgcctgcctgtgtttcagtttgacaatcagggttacttcaactcatgcaccatgaaaagctgctgttttgcaggagatcgtgaccagtatatcctttcgggctctgatgacttcaacctgtacatgtggagaattcctgcagatccagaagcaggtggcattggtagggtggtcaacggagccttcatggtgctgaaagggcatcgatctattgttaaccaagtccgatttaatccccacacctacatgatctgctcttctggtgtagaaaagattatcaagatctggagcccatacaagcagccaggatgtactggagacctcgacggtcggattgaggacgattcccgctgcctctatacccatgaagagtacatcagccttgtgctgaacagtgggagtggcctgtcgcatgactacgccaaccagtcggtccaggaagacccccggatgatggccttctttgactcactggtacgccgagagatcgagggctggagctctgactcagacagtgacctcagtgagagtactatcctccaactgcacgctggggtcagcgagcgctcaagctacactgactcagagtcttcggcctcattgcctcgctctccgcctcccacagtagatgagtctgccgacaacgccttccacctggggcccctgcgggtcaccaccacaaacaca

SEQ ID NO: 188222 - DNA, 1229 bp, Homo Sapiens
  misc_feature (1159)..(1168): n is a, c, g, or t
ttggctccacctgactttggaccaaccccagaacagagcagagccacctcctatagacgcccattgccctgctgctgtacacttcagcagcttgcacaagggagctcacttaaaaggagaaattgtgtagttttaaaatatattttgtgtaaaataccttactatgctataaaccaccattaaaaaccagtgttttgatttggtacttaaatatttttggagtgaaaattatcactaaagtaacatgactccaacaaaagtatggtttcattataaaagagtactgtattgatttgcccaagttttgtaacttagtaaaggtattaacttccttggatttgtactttgtgatttagtatgctgtatcgtgggctggttatgttaactgaaaaaaataaagtcattacctgagttttgcagtgctctaacttaaacagaagaacagctgttcacatcttttagcattttacatttgcctaacttaaaaattgccatgtgtcaaaatcatggttttgtaattgctaaggcatgatatgtcaggttatttgaatataattactttttgaagtaattgtgaccacaaaacatcttttttacatgaaggagctgtgtatcatttgaaattactcaaatgatgtcttgctctgaggcataaatcccaggtacttagtgtttttaataatacggtgccactgcaggatttgggggcggtggggaagaacaagcataatggtagggggaggcttggcctgaaactaaccactgagtgaattgcactgcaggttttacttaacgggaattccttatttgggatgtcaagagggcagctgcaaactgaaaaacaatccagtaaatgtactttgttttatgtattgtagcaggcaattaactactaaataatagctttgacatttgcaattgttgcatagagactatttttgctagaagatgattagctcttgcctttattttacagtgcttagtgtgataaacttctagtcatgtttcctatccaagagaccagttaatatatgtacataaaccacagaaatagtataacacactatttttaaattatcgttttcctacttaaattttgtttagcttaagacttcttacgacatttgtaaagccggttaaatttaataaggtttctgannnnnnnnnngtaacgggagatagtttttacaagtgaaataacatttcagctaaataaacatcgctaaata

SEQ ID NO: 188223 - DNA, 1704 bp, Homo Sapiens
ttggggcttaactcacaggtttcccatcagctttctccctaaaactatgttcatctgcctctctctgccagagaacatacagccgagaatactgccgaagctgagactgactactgtgcattaggaaagacctggagtcaggactttggtgggatttggagctccgaggcagtaataactgaacaagcagccctgtcccctaggctgcagaagcttgaatgcatcctctcccagaacctgccacaggaaactgggggctttgtcaggtcagcccaactgcatgcaaaagaccaccatcctcagaagccaagttgtcttttatgaagaggcaaggaaaggggaaacccacatgtgaccctgattttggtatggcttgatagagttccctgaaaactccttgtatgtgtgctaaaaccagggaagcatgtgactgccaagcaggcaacccctgatgatttgtaaagccaggtggcagggccttggggagccccagcacaatgatattgtgtggtcttccctcctgtggaatcgaggggaaattattcttcccaataccttgatttgattttcagtttcataagcttcttcctctgaatcttattgagggactatggtaccaagcaggtaggactgttcacctggtggaacagttcttgctctgccttctaggcttcatcccagaaatccagcctctttctggagaccccaaagctggagggagatgggctttcctctgggcctctctcctactttgccatccacactgctcctggctaaccccagcaataaccaacaaatggtaggaagccccatctattgctttttctcaattatgactgcatagtttatggaaacaaagatcttgaggaagatgagggaagccctcccctcttcacagtccccatctcttctcctttgtacctgtcaacaccagagttcagtgtttaaacagacaaaatataaagtattgagtaggtggttcatatgccgaatccacttggtaggaagaaaccaccagctttatagtgtgcctgatagattttaaacattcctgggcacccactcaagagtgctctttttatcaccttctggaaatccgcaaagttgcaggggcctctggagtgtctcttctctagagagaattggtgggacccccctcagtgcagtggccccaactagtggagggagagaggacttaagtcagatggactcaacagaaatgggtttccagaagaataatgaaaagttgtgggtaggaaaatgaatcatttggactcttcaatgaaatggagtgagcccaggagagctcagccaacagaggcactctgggaacctgttagtaaagccaggctggccaaatgccatttgattttgaacctcgtaggtccccactcaccctctgccaggagctaagtaaggcaggagagctgacttgggactcctggctcggccccaacagggagcccccttcccaccatccctcggcaagctcaccacctcatccttctgccaaggcagctttcctttcttttgtgtgttttctgtgttcttagcctccaccctcctcctgccacccttgtggactaggaccaggtcctgaccccagtcagaaaatgatgacatgtacagtggcacaccttaaccagtcactaattttcactgttgtgaaagtgatttgatttagaattaaacaaatggttttac

SEQ ID NO: 188224 - DNA, 1082 bp, Homo Sapiens
ttggcgaagtggtagagcacgaggtcacagggaatttgaattctgaccccttgcttgaactctgccagtgtcccctctgccagctagactgcgggagccgggagcagttgattgctcacgtgtaccagcacactgcagcagtggtgagcgccaagagctacatgtgtcctgtctgtggccgggcccttagctccccggggtcattgggcgccacctcttaatccactcggaggaccagcgatctaactgtgctgtgtgtggagcccggttcaccagccatgccacttttaacagtgagaaacttcctgaagtactaaatatggaatccctacccacagtccacaatgagggtccctccagtgctgaggggaaggatattgcctttagtcctccagtgtaccctgctggaattctgcttgtgtgcaacaactgtgctgcctaccgtaaactgctggaagcccagactcccagtgtacgcaagtgggctctacgtcgacagaatgagcctttggaagtacggctgcagcggctggaacgagagcgcacggccaagaagagccggcgggacaatgagacccccgaggagcgggaggtgaggcgcatgagggaccgtgaagccaagcgcttgcagcgcatgcaggagacagacgagcagcgggcacgccggctgcagcgggatcgggaggccatgaggctgaagcgggccaatgaaaccccggaaaagcggcaggcccggctcatccgagagcgagaggccaagcggctcaagaggaggctggagaaaatggacatgatgttgcgagctcagtttggccaggacccttctgccatggcagccttagcagctgaaatgaacttcttccagctgcctgtaagtggggtggagttggacagccagcttctgggcaagatggcctttgaagagcagaacagcagctctctgcactgaaccacaccctcctgcctgccctccttcccacctacctacccacccacccacacccacagccacgaggaccagtgctgctgcccacccacgaagcccctgttcttgctgccagaggcaggcctggggtttattg

SEQ ID NO: 188225 - DNA, 951 bp, Homo Sapiens
ctttgtacaaaaaagttggcaggtggggccggagctgtggctatgctgattgggcccaaggcccctctggccctggagcgagggctgaggggaacccatatggagaatgtgtatgacttctacaaaccaaatttggcctcggagtacccaatagtggatgggaagctttccatccagtgctacttgcgggccttggatcgatgttacacatcataccgtaaaaaaatccagaatcagtggaagcaagctggcagcgatcgacccttcacccttgacgatttacagtacatgatctttcatacacccttttgcaagatggtccagaagtctctggctcgcctgatgttcaatgacttcctgtcagccagcagtgacacacaaaccagcttatataaggggctggaggctttcggggggctaaagctggaagacacctacaccaacaaggacctggataaagcacttctaaaggcctctcaggacatgttcgacaagaaaaccaaggcttccctttacctctccactcacaatgggaacatgtacacctcatccctgtacgggtgcctggcctcgcttctgtcccagtccagaggtgtccttctaaagctggtagaggtttcacgagtcatcagggacccagaacccttctcttttgctgtccctttgtcctagtgcatggtttccacactgtggtgcaagatgtctcctcaagctctaggcattacatctgctatcctgctgtcagaaagaaggaaggggaaaagaagatcatttccttctctttaaggacatttcccagaagtcacacagaacatttccatttatattactttgggccagaacttggtcatatggccacatttagttccaaatgattaggaaatgcagtcttttattgatccctgtgcccaggaaaatattggaggcctttttcaaggaaaaaggggaaaa

SEQ ID NO: 188226 - DNA, 1413 bp, Homo Sapiens
ttggctgggtttctggaactgctgggtttctgcttgctcctctggagatgcagcgtctgttgactccagtgaagcgcattctgcaactgacaagagcggtgcaggaaacctccctcacacctgctcgcctgctcccagtagcccaccaaaggttttctacagcctctgctgtccccctggccaaaacagatacttggccaaaggacgtgggcatcctggccctggaggtctacttcccagcccaatatgtggaccaaactgacctggagaagtataacaatgtggaagcaggaaagtatacagtgggcttgggccagacccgtatgggcttctgctcagtccaagaggacatcaactccctgtgcctgacggtggtgcaacggctgatggagcgcatacagctcccatgggactctgtgggcaggctggaagtaggcactgagaccatcattgacaagtccaaagctgtcaaaacagtgctcatggaactcttccaggattcaggcaatactgatattgagggcatagataccaccaatgcctgctacggtggtactgcctccctcttcaatgctgccaactggatggagtccagttcctgggatggtcgttatgccatggtggtctgtggagacattgccgtctatcccagtggtaatgctcgtcccacaggtggggccggagctgtggctatgctgattgggcccaaggcccctctggccctggagcgagggctgaggggaacccatatggagaatgtgtatgacttctacaaaccaaatttggcctcggagtacccaatagtggatgggaagctttccatccagtgctacttgcgggccttggatcgatgttacacatcataccgtaaaaaaatccagaatcagtggaagcaagctggcagcgatcgacccttcacccttgacgatttacagtacatgatctttcatacacccttttgcaagatggtccagaagtctctggctcgcctgatgttcaatgacttcctgtcagccagcagtgacacacaaaccagcttatataaggggctggaggctttcggggggctaaagctggaagacacctacaccaacaaggacctggataaagcacttctaaaggcctctcaggacatgttcgacaagaaaaccaaggcttccctttacctctccactcacaatgggaacatgtacacctcatccctgtacgggtgcctggcctcgcttctgtcccaccactctgcccaagaactggctggctccaggattggtgccttctcttatggctctggtttagcagcaagtttcttttcatttcgagtatcccaggatgctgctccaggctctcccctggacaagttggtgtccagcacatcacacctgcccaaaacgcctaacctcccgaaagtgtgtg

SEQ ID NO: 188227 - DNA, 1412 bp, Homo Sapiens
  misc_feature (1197)..(1256): n is a, c, g, or t
ttggctggccgaccctcgccttccttctctgcagcttccccgcagccacctccccgtgcaagatcctcaagtgcaactctgagttctggagcgccacgtcgggcagccacgccccagcctcagacgacacccccgagttctgtgcagccttgcgcagctacgccctgtgcacgcggcggacggcccgcacctgccggggtgacctggcctaccactcggccgtccatggcatagaggacctcatgagccagcacaactgctccaaggatggccccacctcgcagccacgcctgcgcacgctcccaccggccggagacagccaggagcgctcggacagccccgagatctgccattacgagaagagctttcacaagcactcggccacccccaactacacgcactgtggcctcttcggggacccacacctcaggactttcaccgaccgcttccagacctgcaaggtgcagggcgcctggccgctcatcgacaataattacctgaacgtgcaggtcaccaacacgcctgtgctgcccggctcagcggccactgccaccagcaagctcaccatcatcttcaagaacttccaggagtgtgtggaccagaaggtgtaccaggctgagatggacgagctcccggccgccttcgtggatggctctaagaacggtggggacaagcacggggccaacagcctgaagatcactgagaaggtgtcaggccagcacgtggagatccaggccaagtacatcggcaccaccatcgtggtgcgccaggtgggccgctacctgacctttgccgtccgcatgccagaggaagtggtcaatgctgtggaggactgggacagccagggtctctacctctgcctgcggggctgccccctcaaccagcagatcgacttccaggccttccacaccaatgctgagggcaccggtgcccgcaggctggcagccgccagccctgcacccacagcccccgagaccttcccatacgagacagccgtggccaagtgcaaggagaagctgccggtggaggacctgtactaccaggcctgcgtcttcgacctcctcaccacgggcgacgtgaacttcacactggccgcctactacgcgttggaggatgtcaagatgctccactccaacaaagacaaactgcacctgtatgagaggactcgggacctgccaggcagggcggctgcggggnnnnnnnnnnnnnnnnnnnnnnnnnnnnnnnnnnnnnnnnnnnnnnnnnnnnnnnnnnnngtgttctgctagacgcgtagatgtggagggaggcgcgggctccgtcctctcggcttccccatgtgtgggctgggaccgcccacggggtgcagatctcctggcgtgtcaaccatgggcccgcagaacgcccagggaaccgcctgctgccaagggctc

SEQ ID NO: 188228 - DNA, 1508 bp, Homo Sapiens
  misc_feature (1334)..(1342): n is a, c, g, or t
ccaactttgtacaaaaaagttgggttagtcaccacctgctcctccgtcttctcaggagaccagctggtccaacgtgagtagataggcgcctgggccgacctccaaggcccctgagcctcagcgggcgacggacccagcaccacggcctctctgggccttgtccccgcagcgggccctgcgttcttcctccagtcagtggaggcgcccagtctccccagatatccttggaacagaagatcttattgtggaagtgacttccaatgatgctgtgagattttatccctggaccattgataataaatactattcagcagacatcaatctatgtgtggtgccaaacaaatttcttgttactgcagagattgcagaatctgtccaagcatttgtggtttactttgacagcacacaaaaatcgggccttgatagtgtctcctcatggcttccactggcaaaagcatggttacctgaggtgatgatcttggtctgcgatagagtgtctgaagatggtataaaccgacaaaaagctcaagaatggtgcatcaaacatggctttgaattggtagaacttagtccagaggagttgcctgaggaggatgatgacttcccagaatctacaggagtaaagcgaattgtccaagccctgaatgccaatgtgtggtccaatgtagtgatgaagaatgataggaaccaaggctttagccttctcaactcattgactggaacaaaccatagcattgggtcagcagatccctgtcacccagagcaaccccatttgccagcagcagatagtactgaatccctctctgatcatcggggtggtgcatctaacacaacagatgcccaggttgatagcattgtggatcccatgttagatctggatattcaagaattagccagtcttaccactggaggaggagatgtggagaattttgaaagactcttttcaaagttaaaggaaatgaaagacaaggctgcgacgcttcctcatgagcaaagaaaagtgcatgcagaaaaggtggccaaagcattctggatggcaatcgggggagacagagatgaaattgaaggcctttcatctgatgaagagcactgaattattcatactagggtttgaccaacaaagatgctagctgtctctgagatacctctctactcagcccagtcatattttgccaaaattgcccttatcatgttggctgcctgacttgtttatagggtccccttaattttagtttttagtaggaggttaaggagaaatcttttttttcctcagtatattgtaagagagtgaggaatacagtgatagtaatgagtgaggatttcttaaatatacnnnnnnnnngttctaggaatgagggtaggataaatctcagaggtctgtgtgatttactcaagttgaagacaacctccaggccattcctggtcaaccttttaagtagcattccagcattcacacttgatactgcacatcaagagttgtgtcacctttcctgggtgatttgggtttc

SEQ ID NO: 188229 - DNA, 518 bp, Homo Sapiens
  misc_feature (90)..(108): n is a, c, g, or t
ttggcgctctccggccctaagaaaatgtcagccgccaacgccgccgccgccagagtcgccatgcagatcccgcgcgccgctcttctcccnnnnnnnnnnnnnnnnnnngcggcgcccgcctcgcgcagctgtcccgggccggccgctcggcgcctttggccgccgggtgcccagaccgctgcgagccggcgcgctgcccgccgcagccggagcactgcgagggcggccgggcccgggacgcgtgcggctgctgcgaggtgtgcggcgcgcccgagggcgccgcgtgcggcctgcaggagggcccgtgcggcgaggggctgcagtgcgtggtgcccttcggggtgccagcctcggccacggtgcggcggcgcgcgcaggccggcctctgtgtgtgcgccagcagcgagccggtgtgcggcagcgaccccaacatctacgccaacctgtgccaactgcacgccgccagccaccgctccgagaggctgcaccggccgccggtaatcttcctgcagcgcgga

SEQ ID NO: 188230 - DNA, 1101 bp, Homo Sapiens
ttgctcttggtgtagacagttctgggtgcgatttagaaatgtctcctcctctattactaggctgtagagaaacagttctacagtaaggaatggaatgaatgaagctgccctccacggtttaaactgttcattttctatgcaactttataaaatattccacatgaaataacccaggcaaaaatactcacaagctggggcgtgccagactttggaacattttctctacttatctctgtcagttccagactagatgcttgggtactttgtaagtccgagctgaagctaaaaccaattgagtgaatattcactttgccataaatgcccagagtgtctattttctctgggccgatcctgtggccatagagcagagtatgttttccatttacagccacctggaatttgtcctttagcaccataatcacgatctcaaaagacttttctcttttgaaaggcgtgtcataggtgatctcttcccgtccccatttttcatttatcaaagtattgcaaacaatgcagccggcccttttgaaacgaggattgaaatgaaaggccacatcggctcgaggtttcacactgctgccattctgcagatccacctggaatctgtctgcgtcactaggaacatgcccacatatcacaatcaaagttccaggatccagctgatcgggaatggtgccaacatacgggattaccgggttatagatgatattctgtaggttgtttaaggacaacatcattcttttccagcttcttgtcgattggagtctcttctgtgtatgacctaagattttaggcaagtttcatttaaaggttacctggattgaaactgaggcactggccccaaagactggtgtttcaggcgctccacggagcaggttgtttgtcagcagctaagtgccgtcagggttcccggctctggcgtccgtgggcggctctgtatgcaggtgaaacggtgggggaagggttcagtacgctggactgtgcccagcccaagctccccatccgttagtgataacttggactcgcagccactccgcgtcactcgccggttatcctgcgtgtgggtgttttctccaaattggacacttagggaacagccaa

SEQ ID NO: 188231 - DNA, 1557 bp, Homo Sapiens
ttggctagaggcgcagaagaggaagccatcgcctggccccggctctctggaccttgtctcgctcgggagcggaaacagcggcagccagagaactgttttaatcatggacaaacaaaactcacagatgaatgcttctcacccggaaacaaacttgccagttgggtagcctcctcagtatccaccgacagcattccaaggacctccaggatatagtggctaccctgggccccaggtcagctacccacccccaccagccggccattcaggtcctggcccagctggctttcctgtcccaaatcagccagtgtataatcagccagtatataatcagccagttggagctgcaggggtaccatggatgccagcgccacagcctccattaaactgtccacctggattagaatatttaagtcagatagatcagatactgattcatcagcaaattgaacttctggaagttttaacaggttttgaaactaataacaaatatgaaattaagaacagctttggacagagggtttactttgcagcggaagatactgattgctgtacccgaaattgctgtgggccatctagaccttttaccttgaggattattgataatatgggtcaagaagtcataactctggagagaccactaagatgtagcagctgttgttgtccctgctgccttcaggagatagaaatccaagctcctcctggtgtaccaataggttatgttattcagacttggcacccatgtctaccaaagtttacaattcaaaatgagaaaagagaggatgtactaaaaataagtggtccatgtgttgtgtgcagctgttgtggagatgttgattttgagattaaatctcttgatgaacagtgtgtggttggcaaaatttccaagcactggactggaattttgagagaggcatttacagacgctgataactttggaatccagttccctttagaccttgatgttaaaatgaaagctgtaatgattggtgcctgtttcctcattgacttcatgttttttgaaagcactggcagccaggaacaaaaatcaggagtgtggtagtggattagtgaaagtctcctcaggaaatctgaagtctgtatattgattgagactatctaaactcatacctgtatgaattaagctgtaaggcctgtagctctggttgtatacttttgcttttcaaattatagtttatcttctgtataactgatttataaaggtttttgtacattttttaatactcattgtcaatttgagaaaaaggacatatgagtttttgcatttattaatgaaacttcctttgaaaaactgctttgaattatgatctctgattcattgtccattttactaccaaatattaactaaggccttattaatttttatataaattatatcttgtcctattaaatctagttaccatttatttcatgcataagagctaatgtttattttgcaaatgccatatattcaaaaaagctcaaagataattttctttactattatgttcaaataatattcaatatgcatattatctttaaaaagttaaatgttttttt

SEQ ID NO: 188232 - DNA, 2100 bp, Homo Sapiens
  misc_feature (1123)..(1184): n is a, c, g, or t
  misc_feature (1831)..(1845): n is a, c, g, or t
ttggcacggcggcgcagccccaaagcgagcgaagctagggtcgccgccactgccgcaggaggcgtgaggggagaaaaacattcagatggcagatcacagtttttcagatggggttccttcagattccgtggaagctgctaaaaatgcaagtaacacagaaaagctcacagatcaggtgatgcagaatcctcgagttctggcagctttacaggagcgacttgacaatgtccctcacaccccttccagctacatcgaaactttacctaaagcagtaaaaagaagaattaatgcattgaaacaacttcaggtgagatgtgctcacatagaagccaagttctatgaagaggtacatgacttggaaagaaagtatgcagcgctataccagcctctctttgacaagagaagagaatttatcaccggcgatgttgaaccaacagatgcggaatcggaatggcacagtgaaaatgaagaggaagagaaattggctggagacatgaaaagtaaagtagtcgtcacagaaaaagcagcggcaacggctgaagagccagatcccaaaggaattccagagttctggtttaccatcttcagaaatgtggacatgctgagtgaattagtccaggaatatgatgaaccaatcttgaaacacctgcaggatattaaagtgaaattttctgaccctggacagcctatgtcttttgtgttagagttccactttgaacccaacgactactttaccaactcagtcctgacaaaaacctacaagatgaaatcagaaccagataaggctgatcccttttcctttgaaggtcctgagattgtggactgtgacgggtgtactattgactggaagaaaggaaagaatgttactgtcaaaaccatcaagaaaaagcagaagcataagggtcgaggcactgttagaacaattacgaaacaagtacccaatgagtcctttttcaacttcttcaatccattgaaagcatccggggatggagaatcactggatgaagattctgaattcacattagcctctgattttgaaattggacactttttccgtgagcggatagtcccgcgggctgtgctgtacttcactggggaggccatagaagatgatgacaatttnnnnnnnnnnnnnnnnnnnnnnnnnnnnnnnnnnnnnnnnnnnnnnnnnnnnnnnnnnnnnnatgatgcggaaattaaccccaaggtgtaatttttgtctgttaatcattcatacgtttctagaaggaacccagccagccggcggaatgcaagcagcagtaggaagcggaggcgggtgcctggcagaccggctgtcgggactccaggcctgtgggcggggcctcggtccttgccgcagcacaatcccgtggacagagcttactccatctaactcgttttcaagtgcatgattttcactttcacttttcctttttccttattattttgcttaacttgtacagtggcaactgaaatgcatttcagaaataggaggtttcgtccagcaccctctgcagccttggtgcctgtagctctggacttccctgggcctttccctgtgggagggccctgtagaccacatcagggtggggtgggggtcacttggcaaaaagggccgaggtctggtgatgtggttcccaggatctggaacctctcccacccctcctgcagttggactgaattcttccctttcatccgaagaaacccacttgctgtttccagccgctgaatctgctgagtgtgcagcctgcatcacctgctgtatgccgatcatctcagaaagggctgtgtagagtagggccctgttctccttaggatgttgcttcttgannnnnnnnnnnnnnnaggggtgggtcagggttgtgacacaccagcccaggtgagagctgctgcgggtcacctcatatttatttatcccttcttgcctgtgaggactgcggcttttcgctgtggctcgtccttaacgtttctgaaccaccttggtgccctgagcaggaagatgtgccacttcctagcaggcgcaaggcctgtgcggaagaaacgccgctccctgccaccagggctgaagatgcgagcccgtcctcatgacgcaggcgccac

SEQ ID NO: 188233 - DNA, 1514 bp, Homo Sapiens
ttggcttcgtggctgcaggcctcagtaacatcatcggtatcatcgtctacatttccagcaacacaggtgacccgagtgacaagcgggacgaagacaaaaagaaccattacaactacggctggtctttttactttggagctctgtctttcattgtggctgagaccgtgggcgtcctggctgtaaacatttacattgagaaaaataaagagttgaggtttaagaccaaacgggaattccttaaggcgtcttcctcttctccttatgccaggatgccgagctacaggtaccggcgacggcgctcgaggtccagctcaaggtccaccgaggcctcgccctccagggacgtgtcgcccatgggcctgaagatcacaggggccatccccatgggggagctgtccatgtacacgctgtccagggagcccctcaaggtgaccaccgcagccagctacagccccgaccaggaggccagcttcctgcaggtgcatgactttttccagcaggacctgaaggaaggtttccacgtcagcatgctgaaccgacggacgacccctgtgtgagccgcctgccctttctctccgctccagcctctccccagaacggctctttttgtcacacaggatggcatgtgatcctcaagacgacgaacaatgaactaaagccaaatgcagccctccctggcctccagaggtggcgtgggctggctttgcacgaaggttgtgctgggagaccggacccggggctgcagaagaagctgaaggctgactttgtcccctccccgaaaaagggtgttttgatgcctcagggtctctgaaatctcccgggaagccccagagctttcctgaggctgcctggccttgatcaacttgggaagacaaaattgagccattatctcctcttggaaacgaatcttgccagaaaaacgggatttcagggccttccctccctgcctgggtgtcgggccaccagaaggctctgccggacgccaagaagacggtctctgggctcttgtcagctgcttttgaacctgaggttcctgcgtcgttgagccagaaatcagaccaccgaagctcactcccttcctctccatctctccctctctccaagactctggcagtggcctatgatcctgaagacagctctgcagccaactggtgctttggcctttgcgctgtcccggggccagcttccctcgacctggggaggccgtggcctgtggaggaggcccaggtaaaggctgggggctgttgctggctatcctctttgcttctggaagtttctgcctcactcagaatgggcaggacagacccactgactggacttcagagtctggagggttccatcggtcaggggaatggcggccacgtgacctcttgccgtgccccttgtcatagacacctccctccactggcatttggcaacatgagcctggtacttctgtgcaagaaagggagacctaatggtgaacagtgggccaataaaagccctagagaacaaacatccatcttcctaggtgg

SEQ ID NO: 188234 - DNA, 1370 bp, Homo Sapiens
ttggtgacctcttgccgtgccccttgtcatagacccaaggagcaactctgtcccctgagcgttgggggtcccgggggagaggtggacagacacctccctccaactggcatttggcaacaggagcctggacttctgtgcaagaaagggagacctaagggtgaacagtggccaataaaaaccctagagaacaaacatccatttcctaggtggttacaaatcataacttcctgcaaatcaacgccaggagagcaacttaccttcatttctttgtcttaaaaagtagcagcaactggccccacaactcctgtcattgtaagttattctgccaccacctaacaggacggagtggagtgagtttggataaacggaccgagctgggcttctcttcctccctacagaggggagatctcagcactttgtccggagctgaggaagtggtttctgtgttttacagtttttccagccattcttttcttccccctcctgaagcaagcaaagagcgtggaggcgtgtgcaggcttggaagaagaactctccagaacatggaacttaaccctcttttgtataaaacatgtgctttctaaagaaaaattgtttcttattttttgagactccttgatccaccctggaacagtcgcctgtagtcctggtagctgttgtgcttggaaataacgagcgcatccttgcctcagctacctgctcacagcccatgggtggactcggccccctggggttcagacccaggtccgttcggcctagtgatgatgtcatcgtccatcccatcttcctttgcccccaggaaaggacgcatccaccggtagcggccccagctgactgtcgccgtgtgctggggatctgaaatgaggcctgccagggcccctgtgtgctgtgctccagagccttcgctcccatcagggttggcatcatctgatggcatgtccaagtgtgcccagcagcggatgctgaagcaccagagctcaaggccttcacctgctctaggccagccctgtcaccacctccactgccatgaccaggccgaaggcagggaacgccctccccagtcccgctgtccagcaaggccccgagacttttcttctgtgatttccaaaagcaaggcagccgtgctgttctagttcctctccatccgccacctcccctcccgctgccccagaagtttctatcattccatggagaaagctgtgttccaatgaatcctacctcttgcccagtcccaggcagagtaagcagggcccacctagggaccaagaaagagtaggagaaggggacgagccgggagcaaaaccacctcagacactcgggccttctcagccttctctcgcggccagctgggtctccggggaccctgggcc

SEQ ID NO: 188235 - DNA, 1216 bp, Homo Sapiens
ttggcgtgttctaagggaagccattgaaaagcatgcccgcttccggcagatgtgcaacagtttcttcgtagacctggtgtccaccatttgcttcaaggacaacgctccgcctgagaaggaagtgattgagagcctgctctctctcctcttcgtccaaaaggggcgcttaagagatgctgcccagagacactgtgaacacacaaaatctctctctccattcaatgatgttgtggataagactcctgtcatccgctcagtgatactgaaactgcttttgaagtacagctttcatgatgtaaaagattatattcaggaatatttgaccctgttaaaaaagaaagcattcataactgaagataaaactgaactgtacatgctcttcatcaactgcctggaggattcaatacttgagaagaccagtgcttactccagaaatgatgaactgaaccacctagaagaggaaggtcgtttccttaaggcatattctccagcaagccggggccgagagcctgccaacgaggcctcggttgaatacctgcaagaggtggcccggatccgcctctgcctcgacagagctgcagatttcctctcggagcctgagggaggcccagagatggccaaggagaagcagtgctacctgcagcaagtcaagcagttctgtatccgagtggagaacgactggcaccgggtgtacctggtgcggaagctcagcagccagcgggggatggagttcgtgcagggcctctccaagcccggccgcccgcaccagtgggtgtttcccaaggacgttgtcaagcagcaggggctgcggcaggaccacccaggccagatggataggtacctggtgtacggcgatgaatacaaggctctccgtgatgctgtggccaaagctgtcctcgagtgcaagccactgggcattaagactgctctgaaggcctgcaagaccccccaaagccagcagtcagcctacttcctgttaacactgtttagagaggtggctattttgtacagatcccacaatgcaagcctccaccccacgccagagcaatgtgaagctgtgagcaaattcattggcgaatgcaagatcctttcacctcctgatatcagccgttttgcaacatcgctcgtggacaattctgtgccattgttgagggcggggcctagtgacagcaaccttgatggaacggtgacagaaatggccattcatgctgcagcc

SEQ ID NO: 188236 - DNA, 2425 bp, Homo Sapiens
  misc_feature (289)..(297): n is a, c, g, or t
ttggcttctgaacaagagatcatgcacatgttacgaatgataagaaaacatgtaagaaaaaattatatgaaattcaaggcaaaattttcattaatacaatttcacagaattattgagtcagcaattttgagttttacatctttaattaaacatctcaacttacacaaaatctctaagtcagtgactaccttacagaagaatctctgtgatattatagagtctaaacttaagcaagttaaaaagaatggcatagttgatcgtttatttgaacagcaactaccagatatgnnnnnnnnnttgtggaagtttgtagatgaccaacttgattatttgtttgcaaagcttaagaaaatcttagtatgtgattccaaaagctttggaagagatagtgatgaaggcaaacttgaaaaaacaagtaaacagaatgcacagtattcaaatagtcagaaaaggagtgtggacaactccaacagagaattgctgaaagaaaaattatcaaaatcagaagaccctgttcattataagtctttagtgggatgtaaaaaatctgaggaaaattatcaagaccaaaataactccagtattaacactgtaaagcatgacattaaaaaaaattttaacatctgctttgataatataaagaactctcaatccgaagagcgctccttggaagtacactgtccaagcaccccaaagtcagaaaaaaacgaaggaagcagcatagaggatgcacagacatcccagcatgcaactttgaagccagaacgaagtttcgagattcttaccgaacagcaagcatcgagccttacttttaatttagtgagtgatgcacaaatgggtgaaatatttaaaagtttgttgcaaggttctgatcttttagacagcagtgttaactgtactgaaaaaagtgagtgggagttaaagactccagagaagcagctgctagagactcttaagtgcgagtctataccagcttgtacaacagaagagctagtttcaggggtggcttctccatgtcctaaaatgattagtgatgataattggtcattattatcatctgaaaaaggtccatctctgtcttcagggctttcattgccggttcatcctgatgtgttggatgaaagttgtatgtttgaagtgtctactaacctacctttaagtaaagataatgtgtgtagtgtagaaaagagcaagccctgcgtttcttccatacttcttgaagatctagcagtctctttaacagtaccatcgcctctgaagtcagatggtcatctcagttttttaaagcctgatatgtcgtccagttcaactcctgaagaagtcattagtgctcattttagtgaagatgccttacttgaggaagaggatgcatctgagcaagatattcatttagctctggagtctgataattcaagcagtaaatcaagttgttcttcttcctggacaagccgatctgttgctccaggctttcagtaccaccctaatctacctatgcatgccgtcataatggaaaagtccaatgatcatttcattgtgaaaatacgacgtgcaacaccatctacctcttctggccttaaacagagtatgatgcctgatgaattattgacatctttgcccagacatggaaaggaagctgatgaaggaccagagaaagaatatatttcatgtcagaacacagtttttaaatctgtggaggaattggaaaactccaacaaaaatgttgatggcagcaagtcaactcatgaagaacagagctctatgatacaaacacaggttcctgatatatatgaatttcttaaagatgcttcagataagatgggtcatagtgatgaagtggctgatgaatgtttcaaattgcatcaagtatgggaaacaaaagtgcctgaaagcattgaagaattgccttcaatggaagaaatctcacactctgttggggaacatcttccaaacacatacgtagatctaacgaaagatccagtcactgaaaccaaaaacttgggggaattcatagaagtaacagttttacatattgatcagttgggatgttctggaggcaatttaaatcagagtgctcaaatattagacaattctttgcaggctgatactgtaggtgcttttattgatttgacacaagatgcttcaagtgaggctaaaagtgaaggtaatcatcctgcattagctgtggaagacttgggatgtggggtgatacaggtagatgaagataattgtaaggaagaaaaggcacaagtggcaaacaggcctttaaaatgcattgttgaggaaacctatatcgacttgaccacagaatctctcagttcatgtgaagtaaaaaaagatgagttaaaatcagagccaggatcaaattgtgataactcggagttgcctgggactttgcataattctcacaaaaagagaagaaacattt

SEQ ID NO: 188237 - DNA, 1520 bp, Homo Sapiens
  misc_feature (704)..(767): n is a, c, g, or t
gggggggtggtcccggggtgaactcagcaagggttggggtgctgggcgtggtgggtgggaaggactcagggaaagtttccaggccccaggaagctggaacttgtgagaggagagtcggggcctgggtgagggctggggaaggccaccgctggcagaggagccaggagggaggctggctgtggcatgggtgggacttgcagtgctcacccacaaacaacagcgggttttgcagaagtcgctatttggaaaagggcatttcttctcattgctgccaagggaattggccttgggacattcctaggagtgaaggtctcggaggttataggaatgggagcagccacaaacaaacgcaccacgcgtgtgaggtgggtcccagaggggggccccagatggggccagtcctgtgaggtgttccagccaggagccccttaatccaaacggggaaggaagggtggaggccccactgtctgtttcctgggaccatagctgagactgtgccttcaccgccacgtccctgagatgggaggggctggaggtgccccgcggcatgttttgtgtggcaacactgataacctaggtgtgtgacctgcatagccacattcttgcaggtgaggagactgatctggggagaggagccatatgcccagggtcatctgaggttcaaggctagcctgctgtacttaccctggccagggtagtcgctnnnnnnnnnnnnnnnnnnnnnnnnnnnnnnnnnnnnnnnnnnnnnnnnnnnnnnnnnnnnnnnnatcatctccatcacgctgggcatgagcacgtgggcggggctcacggtgcggcagcgcttcagtgctggcccatccggctcctccttgatgtgcatgtcaggcttcacgggcactggcttccagctgcacgtggggtcgatggtgatctcctcatagtcagagttctgaatgtaaatcaggatgcccagcatgtactggtccacctccaggccctccagcaaagctgtcttgttgcacacaggacacctccaagtcccccgctcacagttgagctgcaggtacgactccaggtcaaagcactgtatgtggcgacagtcatgacctcgggcagggagctggatcctgcggaaggtgatggggcacttcagggacaccttgatagctgtctgctccaccccgtcctctccgttgggcccaggggtgccagggatggtgccgctgctgaagttccgctttatcttggtgatgcagtgctcagcaggcaggaggcgctttttgaggaggccctgcagcaccgagcggacggatgggcggtgcactagctgcagcacgaagaggtgggagcagcagcaggcggtgacggtgatctggatggtgttgcggcctggctggcacacatgcttcaggtagagtggcttgtgcgaggtcttgttgtcgccacgctcgatggtgagcggcgtggcattgacgctgacctgcaccgaggctggccagttggtgccaacttttttgtacaaagttggcttttatagg

SEQ ID NO: 188238 - DNA, 1213 bp, Homo Sapiens
acaaaaaagttggcgaataaagcctccggttctaaaattaatttgttgcagctttgtaaatatttctttaagattcagcctgagagttaggagaaatatttcagagccaaaagtgccttatacaaccttagcctattatagtaaatcattcaaggattcagaattttgcagtcacagaagagtgtatttattatgtagaatgaatgagggtactgtcacctgccttaatgtaggtaggcccagagtcttacatttaagatcttacatgcagttataaaaccgccacagtcttcaatccagatttgaagactcatgccataggtgacattctaaaataccattaaagccacttaaatgttaaataagaatatacatgcacatcagctcaatgtctttgagtattaattttatgtaagcattctatttaacatgaatataggacaaatcatggctatatctatagaccttggataaactggattgaccaattatacactcacggtgacttttttattggtgggaaggggattggggtggggcaggctggcttaatgtaatatgagcaaccaaagtgggacttctgtctccccgctatattcccattgctctgaatggttgattgaagggtcagggaactagattttatggctttagttcactgtgattgtacatttatacttggcctatgtgctggccgcacctgaacatagctggtgcttatgccgagttatttgcgatgagtaaatatttagtttctttttcttcatatttataatgttgatctggcatcctcaggctgcagctttattaacttataacttactcatctctatctttaccagcaggctctgtattgttgatatttgcaacttgttttgcttttccattggtggaattgaaataattagtttttaattacataagatgcctgtttgctatttggtggaagatagatgttcatattgaagcagtcacatttgtactgtagttcaataaaagaaaaatgaagtattctgtagcctatatttttcatagagctcatgagcatttactgtacttgctgggtcttgccaagatcatttattccgctgcattgccaaagtgtcttcataccaaattaaaggtggttttaatatatgtttcatggaaagttgtttataaaattcaaaggtatttcatttagtgaaaagtcttatttattaaagtggtttga

SEQ ID NO: 188239 - DNA, 1347 bp, Homo Sapiens
ttggccccagtttgcagacaccccagggaacctgcccccgtccatgaacctgtcgcaacttcttggcctgaggaagaacatcagcatccaccaagcctatcagcagtgcaaggaaggggcagcgctctggacagtcctgcagctcaacgactcctacgacctggaggagcacctggatatcaaccagtataccaacaagctacggcaggagttgcagagcctgaaagtagacacacagagcctggacctgctgagctcagccgcccgccgggacctggaggccctgcagagcagtgggcttcagcgcatccactaccccgacttcctcgttcagatccagaggcccgtggtgaagaccagcatggagcagctggcccaggagctgcaaggactggcccaggcccaagacaattctgtgctggggcagcggctgcaggaggaggcccaaggactcagaaaccttcaccaggagaaggtcgtcccccagcagagccttgtggcaaagctcaacctcagcgtcagggccctggagtcctctgccccgaatctccagctggagacctcagatgtcctagccaatgtcacctacctgaaaggagagctgcctgcctgggcagccaggatcctgaggaatgtgagtgagtgtttcctggcccgggagatgggctacttctcccagtacgtggcctgagtgagagaggaggtgactcagcgcattgccacctgccagcccctctccggagccctggacaacagccgtgtgatcctgtgtgacatgatggctgacccctggaatgccttctggttctgcctggcatggtgcaccttcttcctgatccccagcatcatctttgccgtcaagacctccaaatacttccgtcctatccggaaacgcctcagctccaccagctctgaggagactcagctcttccacatcccccgggttacctccctgaagctgtagggccttgtggggtgaggtgaccctgaggctgcctgtcctcccctttgatttagcctgggccacaggacttcggtagctcttgccccagagcccaggctggcatccaggcctggactgtccccagttccggcttacctggccccaccttgcctgctcctttccacccctttctgctcacgacccccatcattcacgctcagaatcacatgggacttctgtgcagctgcagagccagcaagtccctccaggtgtcaccccttacccccatgctggtggcatcctcacaggaagagcctgttctccacctgctggagcctggaccctggggtgggacagaggcctcgtccaaccccactccccttcccgtgtgtctaccccctgcc

SEQ ID NO: 188240 - DNA, 2042 bp, Homo Sapiens
ttggggagaagcggtggtagcggaggctgtagtggggctggtggtgcttccaactgcgggacaggaagtggccgtagcggcttgttggataagtggaagatagatgataagcctgtaaaaattgacaagtgggatggatcagctgtgaaaaactctttggatgattctgccaaaaaggtacttctggaaaaatacaaatatgtggagaattttggtctaattgatggtcgcctcaccatctgtacaatctcctgtttctttgccatagtggctttgatttgggattatatgcacccctttccagagtccaaacccgttttggctttgtgtgtcatatcctattttgtgatgatggggattctgaccatttatacctcatataaggagaagagcatctttctcgtggcccacaggaaagatcctacaggaatggatcctgatgatatttggcagctgtcctccagtcttaaaaggtttgatgacaaatacaccttgaagctgaccttcatcagtgggagaacaaagcagcagcgggaagccgagttcacaaagtccattgctaagttttttgaccacagtgggacactggtcatggatgcatatgagcctgaaatatccaggctccatgacagtcttgccatagaaagaaaaataaagtagccaattctaaaagtagccctctttctcctggatcttgctgaattagtggcttggggggtgggggagataaaaagaacttaaaatgggtaaagtaagaaatgttaaaaagtccctgttttgtcctgaaattttagtctattctgggtaaataggattttctgacacagatatgagaagttgtagctctgatgtctagctgtagtctccttgatctgctgattgcattattttaatttgcttttctgggaaagcagttttgctaaaagctgtacagactttttcttttgtacctagcagtactttatatagtatagctttgggccatgtagcattttaagactcaattttaaaaaattattaatctgttgctgactcttaattcctatttcaatatgtgtttccttgaagaattcaggatacaacttcttgtgtatgacagctttccttcacacactatttttgtgggtgtgtatatatctgatttgggaagaatttaaaaaacacatagctttttaatttgtttgaaacagactttctgcctgttacatttttgcttttaaccaattaaagaagccaatggcattttagttttatattgtgttttccactagtatatccctgttgatttgtttgtgccttttattaactgccattttctaaaatttttttcaataaaaggaaggaagatgtgaaaaaaatggagtcatagttttgatggagagaacagagaaacaagtgttaacatctttctactataggtttttttcatttttaggctattttacttgtcaaaggcccctgagaacctgtagctaaggaactcttagctttccagtgataataacaataataacaacattctgtacttactttgtgccagaaatgctccaagtactttacatgtgttaataatgctcacagcaatcctaagaggcaggtgctgttattatccccattttacacatgaggaaactgagatacaaaagttaaataattgtcacacagctagtgatagaactgggattcaaacctggggagtccggcttcagagtttgtggtcctgcagagacaaaacagccgcttttccagtattttcccagtatggtcagagaagacctgggtgcttgccaagatcctttgacctttaggaatatttccctacagccttacaaaacatcaattttggctgagcctagtacccaacactatattcagtttgtaagaaattaccattatcacatttcctgtttgtcttggagaggttgtcctatctcgcaccacatagtaaggaattgtgaacaacactggacagaaagttaaagccttggattctgtactcttcattcctgtaaaccttgggtaagtttcggaattctctgtga

SEQ ID NO: 188241 - DNA, 1288 bp, Homo Sapiens
ttggcaactgttccagtgtgcggtgggccacccgggttcaagacatcttcacagctgggaagctcctggccttggccctgattatcatcatggggattgtacagatatgcaaaggagagtacttctggctggagccaaagaatgcatttgagaatttccaggaacctgacatcggcctcgtcgcactggctttccttcagggctcctttgcctatggaggctggaactttctgaattacgtgactgaggagcttgttgatccctacaagaaccttcccagagccatcttcatctccatcccactggtcacatttgtgtatgtctttgccaatgtcgcttatgtcactgcaatgtccccccaggagctgctggcatccaacgccgtcgctgtgacttttggagagaagctcctaggagtcatggcctggatcatgcccatttctgttgccctgtccacatttggaggagttaatgggtctctcttcacctcctctcggctgttcttcgctggagcccgagagggccaccttcccagtgtgttggccatgatccacgtgaagcgctgcaccccaatcccagccctgctcttcacatgcatctccaccctgctgatgctggtcaccagcgacatgtacacactcatcaactatgtgggcttcatcaactacctcttctatggggtcacggttgctggacagatagtccttcgctggaagaagcctgatatcccccgccccatcaagatcaacctgctgttccccatcatctacttgctgttctgggccttcctgctggtcttcagcctgtggtcagagccggtggtgtgtggcattggcctggccatcatgctgacaggagtgcctgtctatttcctgggtgtttactggcaacacaagcccaagtgtttcagtgacttcattgagctgctaaccctggtgagccagaagatgtgtgtggtcgtgtaccccgaggtggagcggggctcagggacagaggaggctaatgaggacatggaggagcagcagcagcccatgtaccaacccactcccacgaaggacaaggacgtggcggggcagccccagccctgaggaccaccattccctggctactctctccttcctcccccttttatcctacctccctgccttggtcctgccaacacatgcgagtacacacacacccctctctctgcttttgtcagcagtggtagggactttggtgtgggtggtgagaaattgtaaacaaaaactgacattcatacccaaagaaccagcctctcaccccaggg

SEQ ID NO: 188242 - DNA, 1983 bp, Homo Sapiens
ttggcgagaaagtcctctcgggagaagcagcgcctgttcccggggcagatccaggttcaggtcctggctataagtcaccatggcacagcaagctgccgataagtatctctatgtggataaaaacttcatcaacaatccgctggcccaggccgactgggctgccaagaagctggtatgggtgccttccgacaagagtggctttgagccagccagcctcaaggaggaggtgggcgaagaggccatcgtggagctggtggagaatgggaagaaggtgaaggtgaacaaggatgacatccagaagatgaacccgcccaagttctccaaggtggaggacatggcagagctcacgtgcctcaacgaagcctcggtgctgcacaacctcaaggagcgttactactcagggctcatctacacctattcaggcctgttctgtgtggtcatcaatccttacaagaacctgcccatctactctgaagagattgtggaaatgtacaagggcaagaagaggcacgagatgccccctcacatctatgccatcacagacaccgcctacaggagtatgatgcaagaccgagaagatcaatccatcttgtgcactggtgaatctggagctggcaagacggagaacaccaagaaggtcatccagtatctggcgtacgtggcgtcctcgcacaagagcaagaaggaccagggcgagctggagcggcagctgctgcaggccaaccccatcctggaggccttcgggaacgccaagaccgtgaagaatgacaactcctcccgcttcggcaaattcattcgcatcaactttgatgtcaatggctacattgttggagccaacattgagacttatcttttggagaaatctcgtgctatccgccaagccaaggaagaacggaccttccacatcttctattatctcctgtctggggctggagagcacctgaagaccgatctcctgttggagccgtacaacaaataccgcttcctgtccaatggacacgtcaccatccccgggcagcaggacaaggacatgttccaggagaccatggaggccatgaggattatgggcatcccagaagaggagcaaatgggcctgctgcgggtcatctcaggggttcttcagctcggcaacatcgtcttcaagaaggagcggaacactgaccaggcgtccatgcccgacaacacagctgcccaaaaggtgtcccatctcttgggtatcaatgtgaccgatttcaccagaggaatcctcaccccgcgcatcaaggtgggacgggattacgtccagaaggcgcagactaaagagcaggctgactttgccatcgaggccttggccaaggcgacctatgagcggatgttccgctggctggtgctgcgcatcaacaaggctctggacaagaccaagaggcagggcgcctccttcatcgggatcctggacattgccggcttcgagatctttgatctgaactcgtttgagcagctgtgcatcaattacaccaatgagaagctgcagcagctcttcaaccacaccatgttcatcctggagcaggaggagtaccagcgcgagggcatcgagtggaacttcatcgactttggcctcgacctgcagccctgcatcgacctcattgagaagccagcaggccccccgggcattctggccctgctggacgaggagtgctggttccccaaagccaccgacaagagcttcgtggagaaggtgatgcaggagcagggcacccaccccaagttccagaagcccaagcagctgaaggacaaagctgatttctgcattatccactatgccggcaaggtggattacaaagctgacgagtggctgatgaagaacatggatcccctgaatgacaacatcgccacactgctccaccagtcctctgacaagtttgtctcggagctgtggaaggatgtggaccgcatcatcggcctggaccaggtggccggcatgtcggagaccgcactgcccggggc

SEQ ID NO: 188243 - DNA, 1124 bp, Homo Sapiens
acaaaaaagttggcttactttccctcgggatgaaggtgaacatgggggtgagactgaagcctgaggaattaaaggtcatatgacagggctgttacctcaaagaagaaggtcacatctgttgcctggaatgtgtctacactgctgctcttgtcaactggctgcaaaatacactagtggaaaacactctgatgtaatttctgcccagtcagcttcatccctcagtataattgtaaatcatcacagattttgaagtcacacctgaagacatgctctcacatatagaggtacacaaacacaccgtcatgcacatttcagcttgcgtctatcatgattcctgttgagagggctttcattgtctgactcataatggttcaggatcaactatcatcaaacggaaggattaactagacagagaatgtttctaacagttgctgttatggaaatctcttttaaagtcttgagtacatgctaatcaataatctccactcatgcattcctactgcttggagtagctgtactggtaaatactactgtaggagtatctgcttgttaaaatggaaaaatgtgtctttagagctcagtattctttattttacaaacacaacaaaatgtagtaacttttttccagcatacagtaggcacattcaaagtggtccaagatggctcttttttctttgaaaggggcctgttctcagtaaagatgagcaaacatttggaatttacatgtgggcagacattgggataacaactttcatcaccaatcattggacttttgtgaagtcgacaccagctaaggctgcttaaaataagttctgatcattatataagaagggaaatgcctggcagacaccatgtaagttataagtgtctgtcttatctttactacacatattgtaacaaattcaatatcctagtcttcatttgtatgaatggtttgtattgtacatagtttaaccaagtgttatttgagctgcttattaatattaacttgtacttgtctctctgcttgttattggttaagaaaaaaggatatgaggaattcattttatcaatgtagctgtgaaagccattaaaaagacaaacttaatgtacagagcatttattcagatcaagtattggtgaaa

SEQ ID NO: 188244 - DNA, 2553 bp, Homo Sapiens
ccaactttgtacaaaaaagttggcccccagcccggagcaccgccgaggactccagcacaccgagggacatgctgggcctgcgccccccactgctcgccctggtggggctgctctccctcgggtgcgtcctctctcaggagtgcacgaagttcaaggtcagcagctgccgggaatgcatcgagtcggggcccggctgcacctggtgccagaagctgaacttcacagggccgggggatcctgactccattcgctgcgacacccggccacagctgctcatgaggggctgtgcggctgacgacatcatggaccccacaagcctcgctgaaacccaggaagaccacaatgggggccagaagcagctgtccccacaaaaagtgacgctttacctgcgaccaggccaggcagcagcgttcaacgtgaccttccggcgggccaagggctaccccatcgacctgtactatctgatggacctctcctactccatgcttgatgacctcaggaatgtcaagaagctaggtggcgacctgctccgggccctcaacgagatcaccgagtccggccgcattggcttcgggtccttcgtggacaagaccgtgctgccgttcgtgaacacgcaccctgataagctgcgaaacccatgccccaacaaggagaaagagtgccagcccccgtttgccttcaggcacgtgctgaagctgaccaacaactccaaccagtttcagaccgaggtcgggaagcagctgatttccggaaacctggatgcacccgagggtgggctggacgccatgatgcaggtcgccgcctgcccggaggaaatcggctggcgcaacgtcacgcggctgctggtgtttgccactgatgacggcttccatttcgcgggcgacggaaagctgggcgccatcctgacccccaacgacggccgctgtcacctggaggacaacttgtacaagaggagcaacgaattcgactacccatcggtgggccagctggcgcacaagctggctgaaaacaacatccagcccatcttcgcggtgaccagtaggatggtgaagacctacgagaaactcaccgagatcatccccaagtcagccgtgggggagctgtctgaggactccagcaatgtggtccatctcattaagaatgcttacaataaactctcctccagggtcttcctggatcacaacgccctccccgacaccctgaaagtcacctacgactccttctgcagcaatggagtgacgcacaggaaccagcccagaggtgactgtgatggcgtgcagatcaatgtcccgatcaccttccaggtgaaggtcacggccacagagtgcatccaggagcagtcgtttgtcatccgggcgctgggcttcacggacatagtgaccgtgcaggtccttccccagtgtgagtgccggtgccgggaccagagcagagaccgcagcctctgccatggcaagggcttcttggagtgcggcatctgcaggtgtgacactggctacattgggaaaaactgtgagtgccagacacagggccggagcagccaggagctggaaggaagctgccggaaggacaacaactccatcatctgctcagggctgggggactgtgtctgcgggcagtgcctgtgccacaccagcgacgtccccggcaagctgatatacgggcagtactgcgagtgtgacaccatcaactgtgagcgctacaacggccaggtctgcggcggcccggggagggggctctgcttctgcgggaagtgccgctgccacccgggctttgagggctcagcgtgccagtgcgagaggaccactgagggctgcctgaacccgcggcgtgttgagtgtagtggtcgtggccggtgccgctgcaacgtatgcgagtgccattcaggctaccagctgcctctgtgccaggagtgccccggctgcccctcaccctgtggcaagtacatctcctgcgccgagtgcctgaagttcgaaaagggcccctttgggaagaactgcagcgcggcgtgtccgggcctgcagctgtcgaacaaccccgtgaagggcaggacctgcaaggagagggactcagagggctgctgggtggcctacacgctggagcagcaggacgggatggaccgctacctcatctatgtggatgagagccgagagtgtgtggcaggccccaacatcgccgccatcgtcgggggcaccgtggcaggcatcgtgctgatcggcattctcctgctggtcatctggaaggctctgatccacctgagcgacctccgggagtacaggcgctttgagaaggagaagctcaagtcccagtggaacaatgataatccccttttcaagagcgccaccacgacggtcatgaaccccaagtttgctgagagttaggagcacttggtgaagacaaggccgtctgacccaccatgtctgccccatcacgcggccgagacatggcttgccacagctcttgaggatgtcaccaattaaccagaaatccagttattttccgccctcaaatgacagccatggccgggccgggtgcttctgggggctcgtcggggga

SEQ ID NO: 188245 - DNA, 1016 bp, Homo Sapiens
tacaaaaaagttgggttctgcggcacgggatggcggaggcgcctcctgtctcaggtacttttaaattcaatacagatgctgctgaattcattcctcaggagaaaaaaaattctggtctaaattgtgggactcaaaggagactagactctaataggattggtagaagaaattacagttcaccacctccctgtcacctttccaggcaggtcccttatgatgaaatctctgctgttcatcagcatagttatcatccgtcaggaagcaaacctaagagtcagcagacgtctttccagtcctctccttgtaataaatcgcccaagagccatggccttcagaatcaaccttggcagaaattgaggaatgagaagcaccatatcagagtcaagaaagcacagagtcttgctgagcagacctcagatacagctggattagagagctcgaccagatcagagagtgggacagacctcagagagcatagtccttctgagagtgagaaggaagttgtgggtgcagatcccaggggagcaaaacccaaaaaagcaacacagtttgtatacagctatggtagaggaccaaaagtcaaggggaaactcaaatgtgaatggagtaaccgaacaactccaaaaccggaggatgctggacccgaaagtaccaaacctgtgggggttttccaccctgactcttcagaggcatcctctagaaaaggagtattggatgggtatggagccagacgaaatgagcagagaagatacccacagaaaaggcctccctgggaagtggagggggccaggccacgaccaggcagaaatccaccaaaacaggagggccaccgacatacaaacgcagacacagaaacaacatgggccccattccaaaggatgacctcaatgaaagaccagcaaaatctacctgtgacagtgagaacttggcagtcatcaacaagtcttccaggagggttgaccaagagaaatgcactgtacggaagcaggatcctcaagtagtatctcctttctccc

SEQ ID NO: 188246 - DNA, 707 bp, Homo Sapiens
tgaaagtgaaacagaaagtacagcatctgcaccaaattctccaagaacaccgttaacacctccgcctgcttctggtgcttccagtaccacagatgtttgcagtgtatttgattccgatcattcgagcccttttcactcaagcaatgataccgtctttatccaagttactctgccccatggcccaagatctgcttctgtatcatctataagtttaaccaaaggcactgatgaagtgcctgtccctcctcctgttcctccacgaagacgaccagaatctgccccagcagaatcttcaccatctaaggtaaaattatgtctaagcatttggacagtcccccagccattcctcctaggcaacccacatcaaaagcctattcaccacgatattcaatatcagaccggacctctatctcagaccctcctgaaagccctcccttattaccaccacgagaacctgtgaggacacctgatgttttctcaagctcaccactacatctccaacctccccctttgggcaaaaaaagtgaccatggcaatgccttcttcccaaacagcccttccccctttacaccacctcctcctcaaacaccttctcctcacggcacaagaaggcatctgccatcaccaccattgacacaagaagtggaccttcattccattgctgggccgcctgttcctccacgacaaagcacttctcaacatatccc

SEQ ID NO: 188247 - DNA, 1688 bp, Homo Sapiens
atgagccagtgcacccggcggaatcttggaatttttatagacagcacctcagtttctgactccagccgcacacctcctgcctctgccagcaggggttgccgccagaccagagccagggccaggtccctgcgtccatcccccccggtaggatggacgtgagccatccttctaggggacttttttcagtgtgcgactcgtctctgttaggtggtaggagccagtttgtgtggcctgtgccacgctccacagtgcgtggctgggctctgtgtgtggcctgtgtcccctgtccctgcaggacccagcaggcatcgtggcgtgacagctgtgtccaagccactgcccgggcatcccatcacccaccagggtgcacggtctctcctgctgggggctttctgtcgcatgtgtgtctcctgtcgactctgcagtttgttctcagagcagaatgtttcctgttctcagtgcacaaagacactggttttcaatcggcgtctaaaaccacgttcctgcctttcattgcaacacggtgtgttcatttgtttaaaacagtttaatgagtaagtttagatgactggtcaatatcttaaaaatgtatattagtaagaagttcttcctggaatttttctttcgattctggcagaataaacaggtgtttttagttttcccactgtctgagccaagcaggaccctgtcccagagcaagagatgtccccttccatctctgacccttgcctgggacaagctttgatggggggccccagcttcaaggctgtggtgggaacagcacccccaaatgccagcctctcctttcttcccatccaccagtatactgcggggccatttctggtctttgtccaacaggaaacccatttctggtgggatatgccttccagtgccacagggccactcaccccatgcatctctgtcctgcccgtcagtgctgggacggacagcaagggcaagcccagtgtctggcggataggtgggtgggaacagagaggggagaatgccgtcctaagcttctgcttggggatcccccacacgacctgggtactgcctgggaaacctgtcctaagtaaaactatggacctcgcctcgcccaccggcctgcaaagccagcatctccgtgaaggtggatggaagcgcctttgtcctcattttgagctgcaagctgggtcagcggctctgaagccctcgagtgactttctaacccaagacccagcccctggcaggaggaggggtgggtgcagggctggtgggacaaaaagaggcctcagcaggcctggaagacccttccagtacatcccacagcgtgtcgagcagctgggagaacctgtgtcaagctcgagccgtcataggtccccatgaggtgtctgaagccccttcttggtgatgggaggcagaggtgctgacgttctggagcatggacgtgagtcctcagctggctccgcgtgggcccttggagggtgccaggtgtgtggtgaccttctggatgcctttaacttcatggctgcgtcattcctgatttagaactttaaccggagcttcatctagtgattgcaaaactggaccaatgggagggacggcggcgcaccccgctccctccgtggaatggagctcagctcttcggaggcatcaagcacctgtcgcctctcgtggtccccctggccgagggagtgcggcctctgcaa

SEQ ID NO: 188248 - DNA, 1610 bp, Homo Sapiens
ttggcaacaataaaagtaatactaacagcattagcattgtgctaataagcatttatgatctcactgatgggtaccaacatcgctgtaaagtgagaactactatgaattccattttgtaagtgaagaagggctcagagatgaagtatctcaatcaagttcacgcagcttgtaagggatgaagtcaggattcacactcaggcagtcaggctttatttagtaccaccgtgctgtgatgctgctttgtgtcttcagggtctggcacgtggtgtaagtatgcaatattttttgaggctttatggacaaattctgaatatactttattatagagtaatcctcttgtcattgataattcaataaactgcttttcccccttctagtttttgatctatgccagttattttgcactcatcgctgtggttttcctggccagtggtgcagtcagtgttatgaagaaatgtagaaagctggaagatccacaatcaagttctcaagtaaccacttcataatatactgctgaagggcttcttcttatagcaagaactctgcacagcaactgcctggatgtatttgattttttaaagcgtagacatatatttatgaatgtgcatttcttgacttcacagcagccacttggctaataccttgtgttccgggaataacatgatactattcagaggagccagaagtaaagtttatttcatggattatttatgagagctaatttaaggatgactttttttctgattcaaaagtgaacttgattttaaaaaccagtcaagagcaatcaaagcagcacatggtgttgtatacttcattagcaagtgagtttggtgttttataggtcacatatgtctgtatctacttagccagatgcttggcctggtgggaccagggctccacagaggccacaaaatgttgcaagtcatgatggatggaaatatgttctaacagcatctgcctctattcaatttaattcttatttctgtgttactcatgtacattggtctttctacatagttattctatcactggcaatatttgttctggtttagtgttctgtattttaaggtgtacgtatcatttctaattttaagttattttaaaaaaattcatcatatgaatgttcttggttcccattgtgacgattatttatttctgtaaaatttgtttagaagtacgtttttgcattattcatatgcttcccagagaagctcatttagttagaaaataaggcaagttttgaagcctgctaaatgaagagacttaagaaagcttaaggtacgcttgcttgtctttaaatcttcaatatgaaggactattaattccaagattaaaagttcatatataggctaaagatgtaactaggccatttgtatttgtattcccttttatttccaaataaaatgaaaaatctttttttaataatttcatccctatttatagtttttatattatttgtttttcttatcccagtaaagatgtcaataggaattgcattagtccaaggcctttttcataaactgagcctcttttcaattatttcaattggaacaggaactaggatagatgtgattcctgcatttttttaccttaaatctgccttttgtttc

SEQ ID NO: 188249 - DNA, 1411 bp, Homo Sapiens
  misc_feature (518)..(555): n is a, c, g, or t
aaaagccaactttgtacaaaaaagttggcccaaaggtgcagacagaaagcaaaaaacggatagggaaaaaatggagaaacgaacacctcatgaaaaggagaaatatcagccttcctatgagacaaccatactcacagagtgttctccatggcccgagatcacgtatgtcaataactccccatcacctggcttcaacagttcccatagcagtttttctcttggggaaggaaatggttcaccaaaccaccagccagagccaccccctccagtcacagataacctcttaccaacaaccacacctcaggaagctcagcagtggttgcatcgaaatcgtttttctacattcacaaggcttttcacaaacttctcaggggcagatttattgaaattaactagagatgatgtgatccaaatctgtggccctgcagatggaatcagactttttaatgcattaaaaggccggatggtgcgtccaaggttaaccatttatgtttgtcaggaatcactgcagttgaggnnnnnnnnnnnnnnnnnnnnnnnnnnnnnnnnnnnnnntgaggatggagactcaaatggtactttcttcgtttaccatgctatctatctagaagaactaacagctgttgaattgacagaaaaaattgctcagcttttcagcatttccccttgccagatcagccagatttacaagcaggggccaacaggaattcatgtgctcatcagtgatgagatgatacagaactttcaggaagaagcatgttttattctggacacaatgaaagcagaaaccaatgatagctatcatatcatactgaagtaggagtgcggcgtttcgtgcccagtggctgctccttccttcacctctgaaaacggccctcttgaagggggatatgaatggagatttgaaggtctgcaagaacctgactcgtctgactgtgtgtggaggagtccaggccatggaggcagaatcctggccctctgtgttggcccaagctcttgtggtacacacagattactgcccaatatgcagttctgcagctgttttagttaaatttctggaccttgttgttgttaaatatcagtagaaactctacataatttagagtgtatgtagggcataatgatgatgggaattgtgtgatgtttaacaggaagatcttaaattttgtgatatggagccctgtaatttttttcttatataaaaatgggtatctatattcataagactaatcttcaatctctttgtactggtctcaaatgtactggtatctctgctttttgccacagtttgtccctgaaaactttatcagtgaggagaaatacagaattttccttttggttcccctgtaataccacaactaatagtattttcagctaacatttattgaccaggcagtgtgataaatttttt

SEQ ID NO: 188250 - DNA, 2299 bp, Homo Sapiens
  misc_feature (51)..(59): n is a, c, g, or t
  misc_feature (172)..(188): n is a, c, g, or t
  misc_feature (1900)..(1908): n is a, c, g, or t
  misc_feature (1930)..(1945): n is a, c, g, or t
ttggccttattttaggttggtgcttaactggaggtgatgcataagtctgannnnnnnnnccaagatagaaaaagcatttatcctaacaaattggtattttttattaagcctccatgtggctctgaatgcaagctatatatagtgagtttttctaaattaagggaactctgcnnnnnnnnnnnnnnnnnaagtaactggtctgtaagtgcatatctctagaacgtccccgcaaatgaatgagggccagtggccttggcagaggcaggtgtggcctcgtaaaggcagtgctggccgcgccagggcatcagtgctgatgtgggagctgtgcttccacctaagccgttggtaggggactgtggcatttaagaatgtagagagcgcatcctttttgatctcctgggcggagtgaacctgcaggggccaccccagaaaccttggttctgatgcactgcaagcaagtaaccagcttctcactccagtttcaagtggctattatgtaatataaattcaaagcacattgtgaatagaacctacatgaaaacatacactttgttgcccactgacatgttaccagaagttgtaccatgatgttgttttgacccctgtgagctgatggccccggccctgctctgtgcacatttctgtccgtgttccccagcactctggttggagagagtccacatcttcagctccgtgtggacatctccctgtacctctgcatcagcacatggatttaagagttatgtaatcgtgagagaatggtgtttgtggtttttccccctctttggctggtggaggataaagttcctgctcttttacctccaagacgagggcctcattgattcacttccagaagtgctgcacttctgaagaacaaggatgcactaaagttagcaagtttataataaagttaaatataaattattttgttttaaaatgcctcaaatttttctttattctaagcagcaaacattaaaataagaatatttcctgctaaatgtaaccatacactttattccacaaaatgttatttaacaagactgagggttttttttaagaaaaaattatttccatccaatatttaaagacttgaattttatttaaacttgaaaatgactttgccttaacttttgtataagacagcttagagtccatggagcccggccctgggttggcgtgagtgggtcagagttactcagttactgcgtggatctcctgtcgctagttttactgagtaagcatactgtagtacaagagctagtagtagtttttgtaatataccttaaagatcttcaacagttgatcttttttcagaatgttggaaaatcctgtaaatgcaaatagtcaatactgtattaaatacgtgcacttggagtgtgcttcgcttgtacagttgtaaataatcagaacatatgaaaaaggtaccctacagagaaaattctgatacagattattgatatattataaatgttgctgttgagcgggatgtagataaactaaatgttgtggtttgaatattattttgatttgttgagattttcttttttctcttacatcggtgtgttgaactgattctgcctctttgctgcaaaagggaattggaaagtcttattaaaagcctccagatgttttcatactcttttaaaatgtatgtaaatgcatactaatcatatctaatgtgaaagagttttaaagtatatagagagcaaaaactggcaggatcgtaagtgaaggtgactagtaatctaatttaaatcacctgcagctaagcatgattgaccctgccagaggaaaacatgcctatttgaccatttcctttaaagcagttgccattattcaaatacagagaaatagccacagggctagtgtttttcaaatgcattttaaagaacatggggannnnnnnnngtagttgtcagttcactgaccnnnnnnnnnnnnnnnntcagaaataattgatctgtgaaacccaaactctcaatactcagaaagctgggaggcaacctcgaggcctgggcctacgagctgcatcttcgctacggaagggccagggcgccatcagccattcccaaaacacaaggcctgcccgtccgccagtgagtccttggtttttaataatgagaagtcctttcccccaaggtgtgagcattgcagcgcagtgtgtgtgtgtggttagagccagcttagtccttcactttgtcgaccgaagtgggagctcaacagctgcatgaggagggcagcgcgtgcattagccagtcgccactggagggctctgctgccctccggtcaatacactgta

SEQ ID NO: 188251 - DNA, 1145 bp, Homo Sapiens
  misc_feature (320)..(328): n is a, c, g, or t
  misc_feature (350)..(365): n is a, c, g, or t
  misc_feature (961)..(975): n is a, c, g, or t
actttgtacaaaaaagttggggaaagtcttattaaaagcctccagatgttttcatactcttttaaaatgtatgtaaatgcatactaatcatatctaatgtgaaagagttttaaagtatatagagagcaaaaactggcaggatcgtaagtgaaggtgactagtaatctaattaaaatcacctgcagctaagcatgattgaccctgccagaggaaaacatgcctatttgaccatttcctttaaagcagttgccattattcaaatacagagaaatagccacagggctagtgtttttcaaatgcattttaaagaacatggggannnnnnnnngtatttgtcagttcactgaccnnnnnnnnnnnnnnnntcagaaataattgatctgtgaaacccaaactctcaatactcagaaagctgggaggcaacctcgaggcctgggcctacgagctgcatcttcgctacggaagggccagggcgccatcagccattcccaaaacacaaggcctgcccgtccgccagtgagtccttggtttttaataatgagaagtcctttcccccaaggtgtgagcattgcagcgcagtgtgtgtgtgtggttagagccagcttagtccttcactttgtcgaccgaagtgggagctcaacagctgcatgaggagggcagcgcgtgcattagccagtcgccactggagggctctgctgccctccggtcaatacactgtagttactgcctagccagcagcagtcttctgcatcaagaactgaaaccttgctcggaggtgatttttatagcatcctttttaattaaaggtgaaatacagattgctatataatgtctgaaaaaacctgatactacttcaagagtttctgctcagaagaaaatgagagttatcataataggaagctgtggcggtccatgccaactgtgctgtgtcacatacagcgatgagagtggctttcatacnnnnnnnnnnnnnnnaagttaacaccctcctttacccccagcagtatctcaggttatagaatcagagatgcagcagtgacaaatggcattttaacttgtaaaatcgtgtgatgatgcttatcattttgaaatagaagaataaaaacctggtcccgtttcaccagacatgaaattcaagtggagtc

SEQ ID NO: 188252 - DNA, 1755 bp, Homo Sapiens
ctttgtacaaaaaagttggcaactactcacagctactacacagagacccgaacgagtcactgatatacacctggaccaccaccaatggatatacaaatggcaaacaattttactccgccctctgcaactcctcagggaaatgactgtgacctctatgcacatcacagcacggccaggatagtaatgcctctgcattacagcctcgtcttcatcattgggctcgtgggaaacttactagccttggtcgtcattgttcaaaacaggaaaaaaatcaactctaccaccctctattcaacaaatttggtgatttctgatatactttttaccaccgctttgcctacacgaatagcctactatgcaatgggctttgactggagaatcggagatgccttgtgtaggataactgcgctagtgttttacatcaacacatatgcaggtgtgaactttatgacctgcctgagtattgaccgcttcattgctgtggtgcaccctctacgctacaacaagataaaaaggattgaacatgcaaaaggcgtgtgcatatttgtctggattctagtatttgctcagacactcccactcctcatcaaccctatgtcaaagcaggaggctgaaaggattacatgcatggagtatccaaactttgaagaaactaaatctcttccctggattctgcttggggcatgtttcataggatatgtacttccacttataatcattctcatctgctattctcagatctgctgcaaactcttcagaactgccaaacaaaacccactcactgagaaatctggtgtaaacaaaaggctctcaacacaattattcttattattgttgtgtttgttctctgtttcacaccttaccatgttgcaattattcaacatatgattaagaagcttcgtttctctaatttcctggaatgtagccaaagacattcgttccagatttctctgcactttacagtatgcgtgatgaacttcaattgctgcatggacccttttatctacttctttgcatgtaaagggtataagagaaaggttatgaggatgctgaaacggcaagtcagtgtatcgatttctagtgctgtgaagtcagcccctgaagaaaattcacgtgaaatgacagaaacgcagatgatgatacattccaagtcttcaaatggaaagtgaaatggattgtattttggtttatagtgacgtaaactgtatgacaaactttgcaggacttcccttataaagcaaaataattgttcagcttccaattagtattcttttatatttctttcattgggcactttcccatctccaactcggaagtaagcccaagagaacaacataaagcaaacaacataaagcacaataaaaatgcaaataaatatttcatttttatttgtaaacgaatacaccaaaaggaggcgctcttaataactcccaatgtaaaaagttttgttttaataaaaaatttaattattatttcttgccaacaaatggctagaaaggactgaatagattatatattgccagatgttaatactgtaacatactttttaaataacatatttcttaaatccaaatttctctcaatgttagatttaattccctcaataacaccaatgttttgttttgtttcgttctgggtcataaaactttgttaaggaactcttttggaataaagagcaggatgctgcaaagttatgagtctgtccctcaatgctccctgtcaactatcagtgggagtgtcagggaaaagatccaa

SEQ ID NO: 188253 - DNA, 1397 bp, Homo Sapiens
  misc_feature (1112)..(1138): n is a, c, g, or t
ttggcttttcccagcgccagaggcgcctagggttggggtcctcgctcaggcacagagacccgacaccgagcggcggcttccccgggatcgagggacgcgcacgccagaggagacgaaaggaacccgggtcggaccagatcggaaccactgaccattgcccatggcggccctaggccctagcagccagaatgtcactgaatacgtcgttcgagttcctaagaatacaaccaaaaaatataacatcatggcttttaatgcagccgacaaagtcaactttgctacgtggaatcaggctcggctggagcgggacttgagcaacaagaaaatctaccaagaggaggagatgcccgaatcgggcgcgggcagtgagttcaaccgcaagcttcgggaggaggctcggaggaagaagtacggcatcgtcctcaaggagttccggcccgaggaccagccctggctgctccgggtcaacggcaaatcaggcaggaagttcaagggcatcaagaagggaggcgtaacagagaacacgtcctactacatcttcacccagtgccccgacggggccttcgaggccttccccgtgcacaactggtacaatttcacaccgctggcccggcatcgcacgctcactgccgaggaggccgaggaggagtgggagaggaggaacaaggtgctgaaccacttcagcatcatgcagcagcggcggctcaaggatcaggaccaggacgaggatgaggaggagaaggagaaacgtggccgcaggaaggcgagcgagctgcgcatccacgacctggaggacgacctggagatgtcgtccgatgccagtgatgccagtggtgaggaggggggcagagtccccaaggccaagaagaaggcgccgctggccaagggcggcaggaaaaagaagaagaagaagggttcagacgacgaggccttcgaggacagcgatgatggggacttcgagggccaagaggtggactacatgtcagacggctccagtagctcccaagaagagcctgagagcaaggccaaggcgccgcagcaggaggaggggcccaagggtgtcgatgagcagagcgacagtagtgaggagagtgaggaggagaagccgcctnnnnnnnnnnnnnnnnnnnnnnnnnnnaagaagcacccaccctgcaggagaagaagcgcaggaaagacagcagcgaggagtcggacagctcagaggagagcgacattgacagcgaggcctcctcagccctcttcatggcgaagaagaagacgccacccaagagagagcggaaagccgtcgggagggagctcaaggggcaacagccgccccaggcacgcccagcgcagagggtggcagcaccttcctccacccttgcgggcggctgccagcaaactcgagcaaaggg

SEQ ID NO: 188254 - DNA, 961 bp, Homo Sapiens
gcaaaaacatttacgattggttgaaagcacacagaaaaaccacatgtttgtgacttcaaagggacaaggggcatttcccagtggtcccttgatgaggtgcggattggctaagattttttgtcgatggtggtgaaaaaccattctgtgaatttccgcagctgagctgtcgcggtctgggactcctcctgcagtctcatgttgtcctgtctcaggtgctgcacttctgcttggagaacggccttgtcttgtttttccttccgaaggtcggtctggagttgtcgaagaattaattccagctgattgactttcccggtcagtggtgatggagaacgctccccagttgtgtccatgaactctttgccactgcctggatctacacataagggcagctcttgggccccttccaggtcctgcccatgctgcatatctgtcagggtgcagaaggatgccaccctctggtcttcaaatgcccgtgcagcatccacgaggtgggtccaatctaaccctgtggctgtgtccgggaggggcatcaggccaggatctgcgcacttggacttatctgataaggacccatcggagaaccagaactcatttctcaggctccccatgctgggtgcggggtgggcccgcggaggcagcgtgctgtggtagggcggggtggtgctgaacagaatgtcgttgggcagggcctggtcaagcacggaactccgggaactgccaaaggaggaccccctcctgttgctgcagatgctctcgtcagacagcgtgcggtaaagcgacctccttggagacaggttcccatagaacgaaaactttcttcgcccctcctccactaaggggctgtcaggaagcatcaatttcagaaaatcttctttagacagaacatgttgagtctctgcaacagcatctcccaccactgtctgatgctgagttgctgtggacatgacccaacttttttgta

SEQ ID NO: 188255 - DNA, 1083 bp, Homo Sapiens
  misc_feature (128)..(213): n is a, c, g, or t
ttggctgcccatcgtccgggatggcaagaaggtcagcagcacccactattacttgctgcccgagcgaccatcctacctggagcgctaccagcgcttcctgcgtgaggcccagagccccgaggagcctnnnnnnnnnnnnnnnnnnnnnnnnnnnnnnnnnnnnnnnnnnnnnnnnnnnnnnnnnnnnnnnnnnnnnnnnnnnnnnnnnnnnnnggctgccttggaccccaaggccaacttctccaccaacaacagcaacccaggggcccggccaccacccccgagggccactgctcggctgccacagaggggctgccctggcgatgggccagaggcgggccggccagcagacaagatccagatgctgcaggccatggtgcatggggtgaccacagaggagtgccaggcggccctgcagtgccacggctggagcgtgcagagggctgcccagtatctgaaggtggagcagctcttcgggctgggtctgcggcccagaggggagtgccacaaagtgctggagatgttcgactggaacctggagcaggccggctgccaccttctgggctcctggggccctgcccaccacaagcgctgagatgcgtctggagagccagagggcctgcctgaaggaatcacctgagcctgtccgtccaccaggagtggggagatgcccccatccagtcctggaggacccgctgctcctgctgctcccggggatggagcaaggccaaggctgcgggaggctgggagccctgccctgcccatccctcccgcaccagcgctgtccctgcacactttggttcagtcccggtgcccctgccaagatgtggaaggggccgggtgaagacaggcttgagggctgccccagcaggctctgggtatgacctgcctctggccctggtcctgggcggggcctgtgggtggagtagtacccccaggccctgccctgggtgacagactgggaggaaaccaggctggacctgggcaggcgggatgtgttggccacagggagaggcggaccggcacccggttgggacctcctaggactgggccttctttcagggggcccctggcagcagctgg

SEQ ID NO: 188256 - DNA, 1327 bp, Homo Sapiens
  misc_feature (286)..(364): n is a, c, g, or t
  misc_feature (400)..(513): n is a, c, g, or t
ttgggaccgtagcgagggtgctgctgcgctgggggaaggaaaacgccgctttgactgtgccttgttctgacagctggcgggaagcaagcgccttttcgaaagccagaggctcgagttacccctcttaccaccgtcatggcagtcccagctggtcacctgacttttgaatgccgcaattttctccgagtagaccctaaaagggacatagttttggatgtcagcagtacaagtagtgaagatagcgatgaagagaatgaagaactgaataaattgcaggcattacagnnnnnnnnnnnnnnnnnnnnnnnnnnnnnnnnnnnnnnnnnnnnnnnnnnnnnnnnnnnnnnnnnnnnnnnnnnnnnnnggtcttactcatccagttccactgaagaggacactnnnnnnnnnnnnnnnnnnnnnnnnnnnnnnnnnnnnnnnnnnnnnnnnnnnnnnnnnnnnnnnnnnnnnnnnnnnnnnnnnnnnnnnnnnnnnnnnnnnnnnnnnnnnnnnnnncattcttctacacctaatagttctgaattctccagaaagtaactgagactttggcttaagccgttaaatttaaaaatttgtttttaaaacgtgtttgcccttccttggaatttgctatatattatgctttgcaataaatcacagccttttccatatagacatttttcgtatttgggaccattatccctctggcaatatatttttaatgtgctgtaactgtaaagtattaaatcagtcttgttacttgatagccatgccccaagtatagctatttgtgtatactaaacacatcatttttggtatttgtgtctctgtgtgtttggctagtgttactacttcataagttcattgtaaaatggctttactgccatcaacatgggtcatctacctagcagttaatgagtattgctgaatcaggtgtccaccttccaatgatgaagcaaggtaaggggtaatgttttgctcttgacacagagaaatttaatagctttatgtactaaaatataatatcttttaaagatagtgaaattcttcagttttttaaatctctagggattttttttcaatgttgtagaagatgcagctgcttaatggtcttgactaggactttttaaatgaatggtgtctgcaggtagatgatcatgaaaatatctctaacaaagttttactcttctatgaaatgcagaatttctagtacctgcctcctttgtttttgtaataattaaaatacttcttgtataaagagattagttcagcctgttagtaagtctgcagagatgatgctgagttggttgtgatttttagaatagactcc

SEQ ID NO: 188257 - DNA, 1061 bp, Homo Sapiens
ttggctcactcctcagagaccagggccatgtcagtggagcagcttaccgatgtccttatgaatgaaattctccatggagctgatggaaccagtatcaagtgtggcattattggagaaattggttgctcctggcctttgactgagagtgaaagaaaggttctccaggccacagctcatgcccaggctcagcttggttgtcctgttattatccatcctggacggagctccagggcaccatttcagattatccgaatattgcaagaagcaggcgcagacatctccaaaacagtcatgtcacacctggataggactattcttgataagaaagagctcttggagtttgctcaacttggctgctacttggaatatgatctctttggtactgaactacttcattaccaactcggcccagatattgacatgcctgatgataacaaaagaattagaagggtgcgtctcctggtggaagagggctgtgaagatcgaattctggtagcacatgacatacatacgaaaacccggctgatgaaatatggaggtcacggctattctcatatactcaccaatgttgttcctaaaatgttgctgagaggcataactgagaatgtgcttgataagattctaatagagaaccctaagcaatggctaactttcaaataggatggttgcttatgaattcacaccttgagtataaaacttgcagagaacattcagcgatttccagtccactgtgagatattaatcagttacctaggactaatgacagatcatttccttctgatgagaactaggagggtttgccttctctgagaccagctattacaactgtgcctctagggagttactcagcctaattgagccctattattttaacttaacaaaataaatacagaagtacctatttctaaacaatgatttaaagtctatatcccctaagcggagttgttgtttttctccctaatctatcagctgcactacttgagaaaatttaaagtgtttctagttaaaatatttccttcttgagcgatctaatgtttcttgtatattgatgatcctactaa

SEQ ID NO: 188258 - DNA, 1556 bp, Homo Sapiens
  misc_feature (609)..(667): n is a, c, g, or t
  misc_feature (1455)..(1469): n is a, c, g, or t
aatgtagaaagaaaacagtggggagcatatccttgtggagcatctctggtgtaactagtgattagtattttggtcttttgacttcaacccccatcagcttccatcttcttcctcttctcaatgattgcactaatcctcttccactggcgatcaagctctgctttgtcattggtttccttgaagcgcctggttttccgcccttcagacattttgataccatactggaatgcagccttgggcaaagcttctttgttgttcatatactcgctgtattcttcctgggtatcaaagtcccaacggcctaagggccccttcttgttaccctggtccattttgctataatccacctcctcatcactatccacagccatgtcatccatcgtggctgggtagcactctgcataactgttggacatgccaaagaaatctcccagctgctttttgtcttctggcttcttcagcgattctgtgccttcccagccagcagacccagcaaacttttcattgatggacttgatcaactccttggtagacccaggtcctttgtcaacgtccatgggctcatcatctacttttggcttctcaaagtagctgtgtctcttcttttcnnnnnnnnnnnnnnnnnnnnnnnnnnnnnnnnnnnnnnnnnnnnnnnnnnnnnnnnnnnctcggtcacggtctctgtctctttcccgatcacgctcccgttcccgatatctctcccgctccttgtcccgaggtgtcttggttgtggagggtacgtaatccccaatgtcttcaaaaatattcatgtcagcctcaggaggtttcttctcttccagcttccctttatccttcttcttaagcttcttgttacgggttccctgcctcaggtatgaaaggatctgggtcagcttgctaatgacaatgtcatttgtggtcagtgtggtctgggcctccatggtggggcaatcagccttgctgcggataagagtggtggggatatctgtgtcagcatactcatcatccaggtctaccacataggccatgcggcccggcaggaacaactcattccgctcatatgctttgctcttaaaaagcattcggtaaacattgcggcccagacgtgttttaaattcaattttattttcaggatcctcatctttcttggtttctttctggggcttttccatcagttcctcttcctctttctctttgctggcaatctcagctcgtaccttttgaagcagagcaaaatccaagcctttcaccaaatgggtgtgttccatgtcaccacccaagaatttggactcctggatcaactgtcttctcttctctgcagctgatttgtccgcctcagcagtggggccaacagccctatagttagctgtggtgctgataagctcggtttcttcataatctttgttcactccatctctccgttccttggcacgatcccggtacttctctgctagnnnnnnnnnnnnnnnaatttcttgttggcgtagcttggcataataacttttctttttcctccttcgtgcagctgggtcttcatcctcagtgtactcccccaa

SEQ ID NO: 188259 - DNA, 1229 bp, Homo Sapiens
  misc_feature (88)..(102): n is a, c, g, or t
  misc_feature (884)..(960): n is a, c, g, or t
ttgggggagtacaatgaggatgaagacccagctgcacgaaggaggaaaaagaaaagttattatgccaagctacgccaacaagaaattnnnnnnnnnnnnnnnctagcagagaagtaccgggatcgtgccaaggaacggagagatggagtgaacaaagattatgaagaaaccgagcttatcagcaccacagctaactatagggctgttggccccactgctgaggcggacaaatcagctgcagagaagagaagacagttgatccaggagtccaaattcttgggtggtgacatggaacacacccatttggtgaaaggcttggattttgctctgcttcaaaaggtacgagctgagattgccagcaaagagaaagaggaagaggaactgatggaaaagccccagaaagaaaccaagaaagatgaggatcctgaaaataaaattgattttaaaacacgtctgggccgcaatgtttaccgaatgctttttaagagcaaagcatatgagcggaatgagttgttcctgccgggccgcatggcctatgtggtagacctggatgatgagtatgctgacacagatatccccaccactcttatccgcagcaaggctgattgccccaccatggaggcccagaccacactgaccacaaatgacattgtcattagcaagctgacccagatcctttcatacctgaggcagggaacccgtaacaagaagcttaagaagaaggataaagggaagctggaagagaagaaacctcctgaggctgacatgaatatttttgaagacattggggattacgtaccctccacaaccaagacacctcgggacaaggagcgggagagatatcgggaacgggagcgtgatcgggaaagagacagagaccgtgnnnnnnnnnnnnnnnnnnnnnnnnnnnnnnnnnnnnnnnnnnnnnnnnnnnnnnnnnnnnnnnnnnnnnnnnnnnnncacagctactttgagaagccaaaagtagatgatgagcccatggacgttgacaaaggacctgggtctaccaaggagttgatcaagtccatcaatgaaaagtttgctgggtctgctggctgggaaggcacagaatcgctgaagaagccagaagacaaaagcagctgggagatttctttgggcatgtccaacagttatgcagagtgctacccagccacgatggatgacatggctgtggatagtgatgaggaggtggattatagcaaatggac

SEQ ID NO: 188260 - DNA, 1573 bp, Homo Sapiens
  misc_feature (1509)..(1522): n is a, c, g, or t
tgcctgcagcctgcagcctgcagcctccggccggccggcgagccagtgcgcgtgcgcggcggcggcctccgcagcgaccggggagcggactgaccggcgggagggctagcgagccagcggtgtgaggcgcgaggcgaggccgagccgcgagcgacatgggggaccgggagcagctgctgcagcgggcgcggctggccgagcaggcggagcgctacgacgacatggcctccgctatgaaggcggtgacagagctgaatgaacctctctccaatgaagatcgaaatctcctctctgtggcctacaagaatgtggttggtgccaggcgatcttcctggagggtcattagcagcattgagcagaaaaccatggctgatggaaacgaaaagaaattggagaaagttaaagcttaccgggagaagattgagaaggagctggagacagtttgcaatgatgtcctgtctctgcttgacaagttcctgatcaagaactgcaatgatttccagtatgagagcaaggtgttttacctgaaaatgaagggtgattactaccgctacttagcagaggtcgcttctggggagaagaaaaacagtgtggtcgaagcttctgaagctgcctacaaggaagcctttgaaatcagcaaagagcagatgcaacccacgcatcccatccggctgggcctggccctcaacttctccgtgttctactatgagatccagaatgcacctgagcaagcctgcctcttagccaaacaagccttcgatgatgccatagctgagctggacacactaaacgaggattcctataaggactccacgctgatcatgcagttgctgcgagacaacctcaccctctggacgagcgaccagcaggatgaagaagcaggagaaggcaactgaagatccttcagatcccctggcccttccttcacccaccacccccatcatcaccgattcttccttgccacaatcactaaatatctagtgctaaacctatctgtattggcagcacagctactcagatctgcactcctgtctcttgggaagcagtttcagataaatcatgggcattgctggactgatggttgctttgagcccacaggagctccctttttgaattgtgtggagaagtgtgttctgatgaggcattttactatgcctgttgatctatgggaaatctaggcgaaagtaatggggaagattagaaagaattagccaaccaggctacagttgatatttaaaagatccatttaaaacaagctgatagtgtttcgttaagcagtacatcttgtgcatgcaaaaatgaattcacccctcccacctctttcttcaattaatggaaaactgttaagggaagctgatacagagagacaacttgctcctttccatcagctttataataaactgtttaacgtgaggtttcagtagctccttggttttgcctctttaaattatgacgtgcacaaaccttcttttcaatgcaatgcatctgaaagttttgatacttgtaacnnnnnnnnnnnnnnggttgcaattgtttaagaatcatggatttattttttgtaactctttggcta

SEQ ID NO: 188261 - DNA, 1725 bp, Homo Sapiens
aagcacaaaattaaaaacatgtaatttttctaataatacagtttgatatattaatgactgaaccttcagtattcagattcctgtctcaacaatatattgttatgtcccatacgtggtaatcacatagagtaatagtggtagctgtgatttatatggcactttaaaggatatttttacatatattttctcattttatcttcacaacaaccttgtgaaagacataggggaagtactaatttttccccccattttacagatgaaggaactgagacacagaggttgagacttgtctaaagtaacatgaccagtaagtgcttgaattaatgcaggtaggtagtgatgggtatgttctaatttgccaagggcttttccttgctgtcatctggcttgagttctgaggatataaattcatatagccaaaatggtagggaaccagaaaggtaatgagtagatggactttaggactacactagggaaatggtgctgctgttctttttaatttcttcctttttgttctttttgtttggtttctaacttgttagtaatgataagcagataccgtctttggttgtttccgttagatgaatgaagcttttgttttaattgtagattatccctgaggaactaaggaaatagaaaatctggagagaagtctgttgggattctcacagggaatagctattagatcaactaagcaaatgaaaaagttaatagtatatggataaaccacatgtgtgtaattggaacttcttagattctaagatttttaaaatcttgtttaaaaactgtattatcaccttaatataaaaatcttagcgcttgagcgtacttacccaactgtggttttctttagatgaggaaactgaggtccagagaagttgaagttttcccaaggtcacacagcagagctggaactagagcttgcatttcctgacttccagattagtgttatttttacttcaaactattacttcttggtgagttattgtgggaaaaatcctgtatattgaagatgtctctacacagtatcgtttcctgtttaaattacagataacttcaagagttttcagaaaaaaagaaattgggacttttttggttaaatcatgccatctgaacagaaacagttattttgtgatgaaaaacaaactactttaaaaaaagattatgatgtgaaaaatgagatagttgataggtcggcacctaaaccaaaaatttcaggaagtattcattatgcactaaaaaatgtgaaaattgatttgccaaaaataaatattccaaatgaagtcctattgaaacatgaagttgacaaatacagaaaattatttcagagtaaacagcagactgcaagaaaatctatcagtataaagactgtaagctgtgtagaggagtgtacattgcttcataagtctgagagagctgaagaagagggtgtaaaaatgtctgcaaaaatactcaatttcagctgtttaaaatgccgagacaacactcgatatagcccaaatgatttgcagaaacactttcaaatgtggcaccatggcgaattaccttcatatccttgtgaaatgtgcaacttttcagcaaatgactttcagtatttaaacaacacagacgaacccatagaagcactttagtaaaatgtgacatttgtaacaatgagagtgtatatactttactgaacttgacaaagcatttcacatccacacattgtgttaatggtaattttca

SEQ ID NO: 188262 - DNA, 1913 bp, Homo Sapiens
  misc_feature (131)..(177): n is a, c, g, or t
  misc_feature (1490)..(1506): n is a, c, g, or t
  misc_feature (1525)..(1539): n is a, c, g, or t
ttgggataaacagtaatggcggaggctgcaactcccggaacaacagccacaacatcaggagcaggagcggcagcggcgacggcggcagcagcctcccccaccccgatccccacagtcaccgccccgtcccnnnnnnnnnnnnnnnnnnnnnnnnnnnnnnnnnnnnnnnnnnnnnnntggactaaacaggtcacctgcaggtattttatgcatggggtttgtaaggaaggagacaactgtcgctactcgcatgacctctctgacagtccgtatagtgtagtgtgcaagtattttcagcgagggtactgtatttatggagaccgctgcagatatgaacatagcaaaccattgaaacaggaagaagcaactgctacagagctaactacaaagtcatcccttgctgcttcctcaagtctctcatcgatagttggaccacttgttgaaatgaatacaggcgaagctgagtcaagaaattcaaactttgcaactgtaggagcaggttcagaggactgggtgaatgctattgagtttgttcctgggcaaccctactgtggccgtactgcgccttcctgcactgaagcacccctgcagggctcagtgaccaaggaagaatcagagaaagagcaaaccgccgtggagacaaagaagcagctgtgcccctatgctgcagtgggagagtgccgatacggggagaactgtgtgtatctccacggagattcttgtgacatgtgtgggctgcaggtcctgcatccaatggatgctgcccagagatcgcagcatatcaaatcgtgcattgaggcccatgagaaggacatggagctctcatttgccgtgcagcgcagcaaggacatggtgtgtgggatctgcatggaggtggtctatgagaaagccaaccccagtgagcgccgcttcgggatcctctccaactgcaaccacacctactgtctcaagtgcattcgcaagtggaggagtgctaagcaatttgagagcaagatcataaagtgagactcctccccagtcttcatttgtgctttctcttttggggaagaatttagtaacttgtgccaactttcaaccagatggaccgcatttaaatgcatgcattttatcttgaaactgggatattctaatggggatttcttctttgtatttcagctagcttctaggttagttggtctatctacttttatttgaatgaggaaaccctgtgtatcagttagaatcttcgtgctttttctgaggagattgtgtttaatggattattagccagtttaggctcagtgaacaaactgatctagctctgaatgtatgtttcctgacgttttacatttccactttcctattccattcattaagctagccaacaatccaccatcctttaaagattgttctcataactgaacaaaaaccacataatctaaacagagcaaagctacaagaaataaatttatttaaacgaaagaaaaaggagtctgtgtgaaatgtcttcnnnnnnnnnnnnnnnnnacctaagttatatttttcnnnnnnnnnnnnnnngaactggctagcccttgagttggatttataaaggaggttgccttgcttgaaagaaatggtcagttgtgtgacagtatgtggaaccctttcaggaaatgcccacgtgcctttcagttaagtctttaagtctggaggggacacaccagggtgtgtccttgaagagtgggcctgtaaaaggggaatttgcattgcagcctgttcattgtttcccaggtcctgcccagaatgccggatcacatctaactttgtcattccaagtgagtactgggtggaggagaaagaagagaagcagaaactcattctgaaatacaaggaggcaatgaggtatgagcactgcagccttttctcaagcgaagagcccacagagcttgggt

SEQ ID NO: 188263 - DNA, 1171 bp, Homo Sapiens
  misc_feature (1001)..(1047): n is a, c, g, or t
gtaaaaacagttccctccaaatgggcagctcccacgtccttcatcaaaatacctgcacgctttgttgctcattgcctcttgtatttcagaatgagtttctgcttctcttctttctcctccacccagtactcacttggaatgacaaagttagatgtgatccggcattctgggcaggactttatgatcttgctctcaaattgcttagcactcctccacttgcgaatgcacttgagacagtaggtgtggttgcagtggagaggatcccgaagcggcgctcactggggttggctttctcatagaccacctccatgcagatcccacacaccatgtccttgctgcgctgcacggcaaatgagagctccatgtccttctcatgggcctcaatgcacgatttgatatgctgcgatctctgggcagcatccattggatgcaggacctgcagcccacacatgtcacaagaatctccgtggagatacacacagttctccccgtatcggcactctcccactgcagcataggggcacagctgcttctttgtctccacggcggtttgctctttctctgattcttccttggtcactgagccctgcaggggtgcttcagtgcaggaaggcgcagtacggccacagtagggttgcccaggaacaaactcaatagcattcacccagtcctctgaacctgctcctacagttgcaaagtttgaatttcttgactcagcttcgcctgtattcatttcaacaagtggtccaactatcgatgagagacttgaggaagcagcaagggatgactttgtagttagctctgtagcagttgcttcttcctgtttcaatggtttgctatgttcatatctgcagcggtctccataaatacagtaccctcgctgaaaatacttgcacactacactatacggactgtcagagaggtcatgcgagtagcgacagttgtctccttccttacaaaccccatgcataaaatacctgcaggtgacctgtttagtccannnnnnnnnnnnnnnnnnnnnnnnnnnnnnnnnnnnnnnnnnnnnnngggacggggcggtgactgtggggatcggggtgggggaggctgctgccgccgtcgccgctgccgctcctgctcctgatgttgtggctgttgttccgggagttgcagcctccgccattactgccaa

SEQ ID NO: 188264 - DNA, 515 bp, Homo Sapiens
caactttgtacaaaaaagttgggaacgattgtggacactatggccagtgcctcctgctccgcaaacacagctacctgtatgccagctgcaactgcaaggcaggctggcgtgggtggagctgcacggacaacagcacagcccagacggtggcccagcagagggcggccacactgctgctcacgctcagcaacctcatgttcctggcccccatcgccgtctcagtgcggaaattcttcctggtggaggcctccgtctacgcctacaccatgttcttctccacgttctaccacacctgcgaccagcccggggaggcggtgctgtgcatcctcaactacaacacactgcagtactgcgacttcttgggctccggggcggccatctgggtcaccatcctgtgcatggcacggctcaagacaatcctgaaatacgtgctgtttcttctgggtacactggtcatcgccatgtccttgcaactggaccgcaggggcaagtggaacatgctggggccctgcctc

SEQ ID NO: 188265 - DNA, 1994 bp, Homo Sapiens
  misc_feature (1028)..(1084): n is a, c, g, or t
  misc_feature (1128)..(1160): n is a, c, g, or t
ttggggagaagtgaaggggaagcgggtgtccggtccccgccatggagggcatggacgtagacctggacccggagctgatgcagaagttcagctgcctgggcaccaccgacaaggacgtgctcatctccgagttccagaggctgctcggcttccagctcaatcctgccggttgcgccttcttcctggacatgaccaactggaacctacaagcagcaattggcgcctattatgactttgagagcccaaacatcagtgtgccctctatgtcctttgttgaagatgtcaccataggagaaggggagtcaatacctccggatactcagtttgtaaaaacatggcggatccagaattctgatgtcatctgggtgattctcagtgtggaggtgggtggacttttaggagtaacgcagcagctgtcatcttttgaaacggagttcaacacacagccgcatcgtaaggtagaaggaaacttcaacccttttgcctctccccaaaagaaccgacaatcagatgaaaacaacttaaaagaccctgggggctccgagttcgactcgatcagcaaaaacacatgggctcctgctcctgacacatgggctcctgctcctgaccaaactgagcaagaccagaatagactgtcacagaactctgtaaatctgtctcccagcagtcacgcaaacaacttatcagtagtgacttacagtaaggggctccatgggccttaccccttcggccagtcttaaacgggtgtcagcaagaagaaaaattaacaaaagacagaaggcctgactttggggggttagggcaaggggttcctctggattgcagaccacatcgcacagacccctggctctgaccccctctcatcccggaagaagaggaagaagcagaacagactagttttgagtaaactcagtatgcatgtgtgaatgctgaatcacaggaatggtgttgaggctaccaagaagaaatccatgcagccactttgggttttgttataggcatcagtctaacaagtcattaggtcactnnnnnnnnnnnnnnnnnnnnnnnnnnnnnnnnnnnnnnnnnnnnnnnnnnnnnnnnnttattttgcctacagaaaggttgtagttttgagcacatgttaannnnnnnnnnnnnnnnnnnnnnnnnnnnnnnnnaaataagggataacatattctttatagaatagtgcttgttctggaagagattcaggtgaaaagttggcgtggcatgtttgaggactctgcggatcagtgctacaggagtacatctgccctgccacatgactccagaagtctctgaccccatttgtttttaatggcatcagccaatgagttatcacccttttcctcctcttttctctttaatcttctgttgatttacacctttgacatttgtattcgtcaaccctgtggcttgttagcatcagaacctctctgaagaccaaacttccctgtgtggccagcagaggaagccttgaggatagatctcgggtgacgtgggattttctaagcctgagaggtgtccttctgcacacccttgtaacaattaaaattgcttttcttccatgtttctcttggcagagagaaatgccatcatgcttactgctcttttggattcttcatgcagtggcttcccatttgctctgggaacagtgcctctgtgctggttatatgtatgcaccacatgtgcacacacgggtgtcggtgcaactcaccagcaggtgtgcagtaggcaagcttgaaggtggcccatgcttctctgttgtcacacaacacctttccctgtttctcttcagttgtcctctgatattttcacagcctgttagtggcggctgatctgtagaggtatgaaaatacagccccaaagggggaatttgtcatggggaagggccagccactgactacttgatcttggagaccacatttagatggaaatgagaggacctccacagccccgcctccctgccaggatgctagattattggctgg

SEQ ID NO: 188266 - DNA, 1366 bp, Homo Sapiens
tcgaaatacaacatcactctttatattaaaaagtgcagaacacgaaatacaacatcactctttatattaaaaagtaaggaggtcctggggttaagtacacaaagcacctaagtccttcgggtagtttagtgtcagttctacaaagtaagctttggcttcctggcaccagtgaggctcaatcttctgaagtcttccagaaggcaggcgaggagagggatcaggcagccctccctccctcggtcacagtcacggggcggcctcgggccagacaggaggagatgacagacgacaaccagacggtaatatccaaggactatttacaggggggactgcttctgaggcatgactacgatcacttcatgaatgccacttctgggatctcgcccttggccttgagatgagtgaaggcctgggcagatctggtgtagtcccagttgttgtcctgaaggcacttctgggaccactcgaggttcatgccagactgggtagagaatgcttgcaacatttcctgctgctctggagagagggtgggcaccgggctggaggaaggcgtgggtgcaggcatagcgaaggctctttggatctcttcagaactggcattccgcacaaatagctcatcatttacaatacatagccctgaattgctagcaggaacagcaatgaatgtccgggtgaaggctcgcaaagaatcccgggactttccgtccacttccttgaagactccattgacagaaaaacacagcaatgtgcttgtctgggcgcttatgtctaccacgaaggaattgacgtcgtgctgggttttgggcaactcattgaggaaggcaacaacgttgagacgcgtgtgcttcagcagccggaaccgcaaggtagggtctttaagcttcttcacatttctgctatccttgaaatactcggctaagctgcttcgggcagggttctgaggaatgaaaggaatgctcagggaacagcaggccccatcatggtaggcatccaggggcccttgccggtctccagagtcgtaaattgcatagtactgttgcaggaagtgcaagaccagactcttcaagttttctgttccaaaatagcttcccttgcagggcggtaacgtcgtgggggcttcaacatcaaaggcaattggtgggggtagctcatggccatccaggcgtagtaacttgggaaatcgttcgcgaatggcgctgatgtaggtggactggtctcggaaggtgtcacacagggagtttccatcgagccagagctcttctagcttcagcccctttatcttgtccaattcccgctcagacttcaattcatttccagaaaggtttaggatcttcaggccaacttttttgtacaaagttggctatta

SEQ ID NO: 188267 - DNA, 1895 bp, Homo Sapiens
ttggagcgcttgggatttaggttgtttgccggcgtagcggccagcgcctgagcccgcccttgatcttcgctgtggcatggcggacgaggggaagtcgtacagcgaacacgatgatgaacgcgttaatttccctcaaagaaagaagaaaggccggggtcccttccggtggaaatatggtgaaggaaaccgtaggtctggaagaggcggttctggtattcggtcttcccgccttgaggaagatgatggagatgtggcaatgagtgatgcccaggatggtccccgagtacgatacaacccctataccacccgacctaaccgtcggggtgatacttggcatgatcgagatcgcattcatgttactgtgcggagagacagagctcctccagagagaggaggggctggcaccagccaggatgggacctcaaagaactggttcaagattacaattccttatggcagaaagtatgacaaggcatggctcctgagcatgattcagagcaagtgcagtgtgcccttcacccctattgagtttcactatgagaatacacgggcccagttcttcgttgaagacgccagtactgcctctgcattgaaggctgtcaactataagattttggatcgggagaaccgaaggatatctatcatcatcaactcttctgctccaccccacactatactgaatgaactgaagccagaacaagtagaacagctaaagctgatcatgagcaaacgatacgatggctcccaacaagcccttgacctcaaaggcctccgttcagacccagatttggtggcccagaacattgacgttgtcctgaatcgcagaagctgtatggcagctaccctgaggatcattgaagagaacatccctgagctattgtccttgaacttgagcaacaacaggctgtacaggctggatgacatgtctagcattgttcagaaggcacccaacctgaagatcctaaacctttctggaaatgaattgaagtctgagcgggaattggacaagataaaggggctgaagctagaagagctctggctcgatggaaactccctgtgtgacaccttccgagaccagtccacctacatcaggtcagttgtagcctgtgtctcccctcctggggaccttcaccccctgggaggctgagctaatgcatcctgaccagggcccgtctgcggagatgtgcagccctgagctggaaccacctgtcctttgagaggatcgcgtgctccccactttggtctgtctgtgtcttccagctttgtcctgagatgttctctcttctcttctgacttgactatctgtttgctgggtctgtggcctttctctttcttcctgaacacaaccttttctagaatctccctaccctgttgttccaggaaaggcatctcccctttctactctaaccagagggtatcttgtacataccctatagatggggttgccttgtgccaagagcctggtgtccatgggttgaggaagccctccctacctgggacttcctactgagatgggccttccctcctttgtactgtgatggcccctcttgcccttgcgccaagagggacccttttctcaggatccacttgcccagggctgttgctgtccatgctgaggttgaggcctcctaggggctggtggcatgcaatctgtctctcttgcccagtgctatgagctgggctctccctgaagaagaaacctgggttccccaagatgtgaccagagctggggccccgccagcagcgagggaatcccaaggcaggtgctgggcgtggaggccacggggggcataggctaccaaagagacagagaactgaccccctcgggggcgctgcctctccctctactcacacactgacgtcaccctgttttggcccggtgggatggctgggtt

SEQ ID NO: 188268 - DNA, 940 bp, Homo Sapiens
  misc_feature (667)..(740): n is a, c, g, or t
ttggcttgaaagcattgtccaatgaaaattaccaacggcagacacggagacagcgccggggcggagggtacgatggagaatttcacggcactgtttggggctcaggctgacccaccaccgcccccaaccgcactcggcttcggaccaggaaagcctccacccccgccaccgcctcctgcgggcgggggacccggcacggccccgcctcccaccgcggccacggctcctcctggcgcggacaagtcaggagctggctgtggccctttttacctcatgagggaactgccaggtagcacagagctgacaggcagcacgaatctgatcacacactacaacttggaacaagcctataataaattctgtgggaagaaggtgaaggagaagctaagtaacttcctgcctgacctgccagggatgattgatctgcctggttcccatgataacagcagcctccgctctctcattgagaagccccctattctcagtagctctttcaatcctatcacagggaccatgctggccggcttccgcctccacactggcccgttgccggagcagtgtcgtctgatgcatattcagcctcccaagaagaagaataagcacaagcacaaacagagccgtacccaggatcctgtccccccagaaacaccatctgattcagatcacnnnnnnnnnnnnnnnnnnnnnnnnnnnnnnnnnnnnnnnnnnnnnnnnnnnnnnnnnnnnnnnnnnnnnnnnnntcgacatagtccagaccacccaggtatgggcagctcccaggccagcagcagcagcagcctacgctaataggaccactggactctttgccaggatggcttttcctgctgtactgaacctgctgataaaagctgccttccaggctcttggacactgccttgggagcatcctgcagctgggacagaggccagctcctgttggg

SEQ ID NO: 188269 - DNA, 1180 bp, Homo Sapiens
ttggccaatatgttttcttctgttagccactctggagaatcttcctttacctatagagcttattgtacagaatttatagaagccagtgaaatcagtgcattgattaggcagaagagacatgaactggaattgtcatggtttcctgatacattacctggaattggaagaattggttttataccctggaatgttgaaacagaagtccttcctctcatttcttctgtgttgccaagaactatttttccaacaagtaccatatctttcgaacattttggtacttcttgcaagggatatgcattagcacatactcaagaaggggaagaaaagaagcaaacttctggtacatcaaataccagaggatcaagacgaaaacctgcaatgacaactcctacaaggaggtctacacgtaacacaagagctgaaacagccagtcagtctcagagatccccaatatcagacaattctgggtgtgatgccccaggtaacagtaatccatctttaagtgttccctcttcagctgagtcagaaaagcaaacaagacaggctccaaaacggaagtctgtaagaagaggaagaaaaccacctttactgaaaaagaaacttcggagctctgtagctgcccctgaaaaatcatcttccaatgattcagtagatgaagaaacagcagaatctgacacatcacctgtgttagaaaaagagcaccaaccagatgtagacagtagtaacatttgtactgtgcagactcatgtagaaaaccagtctgctaattgcttgaaaagttgcaatgagcaaatagaagaaagtgagaagcatactgcaaattatgatacagaggaaagagtaggatcttcatcttctgagtcttgtgctcaagatcttcctgtgctagttggtgaggaaggggaagttaaaaaactcgagaatacaggtatagaggctaatgttttgtgtttggaaagtgagatttctgaaaatattcttgaaaaaggaggtgatccattggaaaagcaagaccagatatctggactttcacaatcagaggtaaagacagatgtatgtacagttcatcttccaaatgattttcctacatgtttaacatctgaaagcaaagtgtaccaacctgtatcttgtcccctaagtgacttatctgagatgtagagtcagtggttaatgaagaaaa

SEQ ID NO: 188270 - DNA, 867 bp, Homo Sapiens
ttggctcaacgtgaagcactacaagatccgcaagctggacagcggcggcttctacatcacctcccgcacccagttcaacagcctgcagcagctggtggcctactactccaaacacgccgatggcctgtgccaccgcctcaccaccgtgtgccccacgtccaagccgcagactcagggcctggccaaggatgcctgggagatccctcgggagtcgctgcggctggaggtcaagctgggccagggctgctttggcgaggtgtggatggggacctggaacggtaccaccagggtggccatcaaaaccctgaagcctggcacgatgtctccagaggccttcctgcaggaggcccaggtcatgaagaagctgaggcatgagaagctggtgcagttgtatgctgtggtttcagaggagcccatttacatcgtcacggagtacatgagcaaggggagtttgctggactttctcaagggggagacaggcaagtacctgcggctgcctcagctggtggacatggctgctcagatcgcctcaggcatggcgtacgtggagcggatgaactacgtccaccgggaccttcgtgcagccaacatcctggtgggagagaacctggtgtgcaaagtggccgactttgggctggctcggctcattgaagacaatgagtacacggcgcggcaaggtgccaaattccccatcaagtggacggctccagaagctgccctctatggccgcttcaccatcaagtcggacgtgtggtccttcgggatcctgctgactgagctcaccacaaagggacgggtgccctaccctgggatggtgaaccgcgaggtgctggaccaggtggagcggggctaccggatgccctgccc

SEQ ID NO: 188271 - DNA, 955 bp, Homo Sapiens
aggcagcactggatcaagtaccccacgctaaacattctgatgaaactttaatgcaataagagatgcaattatcttcataatgtttgcaacatctatgccttggtccatgtttgcatattgaatccacaaatttcctgactagaccaatcatattcattcttccgggtttttcctcatgttgctctctcttttgttccacttttgcatatgctgcctctggtgaaaaagaatgtgtgggaatttcttccttccctacaatgaacctaagtgcagaaaatgtaaatcctttcaagccatccttgcacctgaaaaagaacatgtacatggcagctgtgatgcaaaacaaaaggacttctccatttcttaatgttgtgatggttcctcttgctacacccattctgaatagtgtttctgtggccaagttggccatataaattgtgagcagccctctcctgctttttctttcaatgagaatggccacataagatgctggcagagcggcaccaaagccaggagtccatgagtagaattttccaagtatcttccttaaaatgcaaaagaaagccatatacaaggccccattagcagttagaaatgaagcggattgtaggatctcagggagtagtttgtgtaaataatagtctaatttccgtttccggagaattgctgcaatcaagtacagaggagcatagatcttcagggactcctccagggcgcccccggtgatctgcaggaaggagacccggcaggaagggtgccaagtgtggccgatctcatagcagttatgagggatggacttgctgagggccgccatgacgaggaacagcgcggagaagacaggagggggagagcctgagccctgcagggaggggcgcgagagcccagccgccagcctctcgcccggccagcactcggaggtgcggaatggaggggaaaggtcacgagagcgggccaa

SEQ ID NO: 188272 - DNA, 1249 bp, Homo Sapiens
aacagcaggagtggcgtgggttgagttctaatgagaaattctctggcacgtggtttgatgagattgtcaccaaactgttgagtgactggtgactgttgtgactctgccggctgcccatctgccctctttctaaggtaggagatgaagatggagacgatctgtgatgagatctgatgggcagagtgccatttatggtaggcaccaatgtgatgtcccctttgtgaatctgccgggatggcctttttgggtggtgctggtaagttgattcggccaccctgcagttataggatctagtgtctttcttctcgcggttacacctagttgcaaatagcaccataataaccagcaacactgcacaaattgctcctaaggaaataattattatcatggagacatccaaggatgcctggcttactgaagtcattgctgtacttgtcaccgactctgcatattcaaagatcatgcacttcagaaggactttggtatgtagctgaggattgcctttgtcctgaatgataactgacagctcccattctgtgtagggaacagaatccatgctaacgttggtatggatgtcacatgatcgtggatcaattatgaagatattctcctcattacctgctactatggcgcagctgagttcagcattcacaccagagtctctgtcaattgcccttattcttgtgacatgaaagccactttcagcccctttgggaatggtgatttctgccgtattattacgcaatgcaggccctataaccacaggaacgttgtcattttcgtcaatgatggtgagcacaactgtggtattgcttaccagttgcttcgggcttcctccatctcttgcttctaccacaaaagtgatctgactcacttcttcatgatcaaagattctgagggcatagatggctccattagatgggtcaatggttacatatgtagttatggaacttcctagaataaaactctccaagatggtgtatgtcacttgcccattttctccaagatcaggatctgtggcgtgtcacgacttccagataccttcggcatggagtccagtccttgcgtttgtttggtcgttcgtcctctttccaggcaggagagtgtcacctccgcgttttctcccttgtgtagtcggaatccatctattgcagggtgccggtggagtctgcagtgtgtctttcctgagcgattctttctccctttagctgctcggctgcagactaaacacccgggattgctgacccaa

SEQ ID NO: 188273 - DNA, 3082 bp, Homo Sapiens
  misc_feature (2673)..(2766): n is a, c, g, or t
ttggcgagaagcgagccggcggcctgaggaggcgactgactgagcagcgcacccggggagcaaggaggcgcggtgaactgagcggcccctgagctgacagatacactgcgcagctggaacggcgagcgagccgacgggcgagtgaggggcgcagccatgatcacctcggccgctggaattatttctcttctggatgaagatgaaccacagcttaaggaatttgcactacacaaattgaatgcagttgttaatgacttctgggcagaaatttccgagtccgtagacaaaatagaggttttatacgaagatgaaggtttccggagtcggcagtttgcagccttagtggcatctaaagtattttatcacctgggggcttttgaggagtctctgaattatgctcttggagcaggggacctcttcaatgtcaatgataactctgaatatgtggaaactattatagcaaaatgcattgatcactacaccaaacaatgtgtggaaaatgcagatttgcctgaaggagaaaaaaaaccaattgaccagagattggaaggcatcgtaaataaaatgttccagcgatgtctagatgatcacaagtataaacaggctattggcattgctctggagacacgaagactggacgtctttgaaaagaccatactggagtcgaatgatgtcccaggaatgttagcttatagccttaagctctgcatgtctttaatgcagaataaacagtttcggaataaagtactaagagttctagttaaaatctacatgaacttggagaaacctgatttcatcaatgtttgtcagtgcttaattttcttagatgatcctcaggctgtgagtgatatcttagagaaactggtaaaggaagacaacctcctgatggcatatcagatttgttttgatttgtatgaaagtgctagccagcagtttttgtcatctgtaatccagaatcttcgaactgttggcacccctattgcttctgtgcctggatccactaatacgggtactgttccgggatcagagaaagacagtgactcgatggaaacagaagaaaagacaagcagtgcatttgtaggaaagacaccagaagccagtccagagcctaaggaccagactttgaaaatgattaaaattttaagtggtgaaatggctattgagttacatctgcagttcttaatacgaaacaataatacagacctcatgattctaaaaaacacaaaggatgcagtacggaattctgtatgtcatactgcaaccgttatagcaaactcttttatgcactgtgggacaaccagtgaccagtttcttagagataatttggaatggttagccagagccactaactgggcaaaatttactgctacagccagtttgggtgtaattcataagggtcatgaaaaagaagcattacagttaatggcaacataccttcccaaggatacttctccaggatcagcctatcaggaaggtggaggtctctatgcactaggtcttattcatgccaatcatggtggtgatataattgactatctgcttaatcagcttaagaacgccagcaatgatatcgttagacacggtggcagtctgggccttggtttggcagccatgggaactgcacgtcaagatgtttatgatttgctaaaaacaaacctttatcaggatgatgcagtaacaggggaagcagctggcctggccctaggtttggttatgttgggctctaaaaatgctcaggctattgaggacatggttggttatgcacaagaaactcaacatgagaagattctgcgtggtcttgcagttggcatagctttagtaatgtatgggaggatggaagaggctgatgctctcattgaatctctctgtcgtgacaaggacccaattcttcgaaggtctggaatgtatactgtagccatggcttattgtggctctggtaacaacaaagcaattcgacgcctgctacatgttgctgtaagtgatgttaatgatgatgtcaggagggcagcagtagaatcacttgggttcattctattcagaacccctgaacagtgcccaagtgttgtctctttgttgtcagagagttacaaccctcatgtgcgctacggagctgcaatggccttggggatatgctgtgctggtacaggaaacaaggaagccattaatttgctagaaccaatgacaaacgaccccgtgaactacgtgaggcaaggggcactcatagcttcagctctcatcatgatccagcagactgaaatcacttgtccaaaggtgaatcagttcagacagctgtattccaaagtcatcaatgataagcatgatgatgtcatggccaagtttggcgctattctggcccagggcatactggatgcaggtggtcataatgtcacaatctccttgcagtccaggactgggcatactcatatgccttctgtggttggcgtccttgtatttacccagttttggttctggtttcctctttcacacttcctgtcattggcttatacccctacctgtgtcattggccttaacaaggacttaaagatgccgaaagttcagtataaatcgaactgtaaaccatccacatttgcatatcctgcccctctggaagtaccaaaagaaaaagaaaaggaaaaggtttctactgctgtattatctataactgccaaggcnnnnnnnnnnnnnnnnnnnnnnnnnnnnnnnnnnnnnnnnnnnnnnnnnnnnnnnnnnnnnnnnnnnnnnnnnnnnnnnnnnnnnnnnnnnnnncctgagccaaacttccagttattggataacccagcccgagttatgcctgcccagcttaaggtcctaaccatgccggagacctgtagataccagcctttcaaaccactctctattggaggcatcatcattctgaaggataccagtgaagacattgaggagctggtggaacctgtggcagcacatggcccaaaaatcgaggaggaggaacaagagccagaactctccagaaccatttgagtatattgatgattaagaccagaggatctcacttgcttatctgagagattgtccaggctcatattgggaatgcttatga

SEQ ID NO: 188274 - DNA, 1704 bp, Homo Sapiens
  misc_feature (1432)..(1455): n is a, c, g, or t
ttggcacatttagaattttagctcccaagatggtagggcagactgaccgtacagtaatttatttgtcgttagtgttaaagattaagcatagtaactgactcttaagtgttaaataatgtagaagtaaaaaaattttttttaaaggcttaatttgggaggggggacttatttctgtttacagtgtattaccttccttccctcctcttctccccccacacccaacaaaatacagtttggaattcactgaaacagtaccagcaagtcatgagattttttagtaaagatgagaaagatggttgaagaaaattagtgcataatttctcagtgaataaagttgtagctctcatatactaaatagacaagtttacatgctgttatttagaaaatgactaaaatattaaaaaccgtgttgtgttaatctgttttaagtcataccatgttcagagttctatgtaaggtgggttttatttttcttttaagggatagtttgtaatagtaagaactgtcccatatgttagtaaattacatatgtacaaattgaaactgtaaattgtgaacactggaaagcaccattgtgacatagagtaaacatcttagtaatatattaaagtgaatgtaaatggtggttaaaattacattactgtgaaattcatcttccaactctaagttaagctttggagatacatgttagtggttaactgttaagagctttgaaaacactgcacatatctgtacaagccagaattactatttctttgacttattattagcttggcagttgcttttgatttgattgttttatgacatggtatactactatatttactcagtttgaaactattcatttctacacactatttttaaaaattgcctactaggtgaaacataacaataaaactacctgtgctgaaatttgggggaagtttaggtcctttaaaaaaacatattaatcattgactacatctatgataaaagtgcttattttggtttactaagataatgcagttggtggaaatgataaacgttttaagtgttaacatcctttgaatgcgttggatttcagagaataaacattttgtaaaaatcacttggtaaggattataaacttaattactgcacttaaaatgaaacattactttttttaaacaatgtgtcacaaatgtaggtctgtattacttgtatgcttgtgtgacttactgttagtccagctctaaaaatttaaaggttgtaattgaaatacaagaaaagagccttcttttagaagaaagcaagtatatttttgcttttacttcaaatgttatttaaagtagaaatttaatttgtagatataacctttaaaaattttctcattaagacaatgtttttaatttaatttgcctcattacatctaatagttcccatttgatggcatgtatagggaagagtgagagannnnnnnnnnnnnnnnnnnnnnnnaatatttatatatattcacagtatgtatttagcatttattttattacagcagatttaaagtttgtatctaataatgcctatgagttgtgtgaagctcttggcttttttccaacgttactttgtaactaatgagggtggatgttcattgtagtttatttaattgggttctttagatggaggaatttaaaaaatcaaatttttctctccacctttatgacctgacatttccttgatctgttggaggctaaa

SEQ ID NO: 188275 - DNA, 975 bp, Homo Sapiens
taatggccaactttgtacaaaaaagttggcaggaaacgggaaagatggcgacggctccgcgacgttgaggccgcgttgggcggttcagactcagggtgatggcaggagagctggctgacaaaaaggaccgtgatgcatcaccttccaaggaggaaaggaagcgatcacggactcctgacagagagcgggatagagaccgggaccggaagtcttccccatctaaagatagaaagcggcatcgttcaagggatagacgtcgaggaggcagccgttctcgctctcgttcccgttccaaatctgcagaaagagaacgacggcacaaagaacgagaacgagataaggagcgggatcggaataagaaggaccgagatcgagacaaggatgggcacagacgggacaaggaccgtaaacgatccagcttatctcctggtcgaggaaaagactttaaatctcggaaggacagagactctaagaaggatgaagaggatgaacatggtgataagaagcctaaggcccagccattatccctggaggagcttctggccaagaaaaaggctgaggaagaagctgaggctaagcccaagttcctctctaaagcagaacgagaggctgaagctctaaagcgacggcagcaggaggtggaagagcggcagaggatgcttgaagaagagaggaagaaaaggaaacagttccaagacttgggcaggaagatgttggaagatcctcaggaacgggaacgtcgggaacgcagggagaggatggaacgggagaccaatggaaatgaggatgaggaagggcggcagaagatccgggaagagaagataagagcaaggaactgcatgccattaagagcgttacctgggtggcatcaaaaagcggcgccgaacgagacatctcaatgaccggaaatttgtttttgagtgggatgcatctgaggacacatccattgactacaactctctgtacaaagaacgg

SEQ ID NO: 188276 - DNA, 1221 bp, Homo Sapiens
  misc_feature (657)..(715): n is a, c, g, or t
  misc_feature (866)..(933): n is a, c, g, or t
tgggaggggcacatttttatttcctagtttcacattcattttcagtctaggagagaggcttctgctgtacaactctggactggcagagtagtgcccagctcccagaactcaactggcccctcaccctgccaagcatggcttgggcttggcctttcagaggaaggccctcccgggtctctgagtctctctttttccttggactcaatttccctgctcactcctgagttgtcaaggccacccccttccctacttgctcccctcctctgttgcccacccccaaccccacggtggaagtgggtgagcagtcattctggccctcagtgaatgggcacgaaagatgagggagagtgtgtgtgtgttaccgtgaccaaaacactgcactatctggcagtcagagggtgctttcgctgggtatcgggagtgggggacaaagaaaggaaatccaggctgtcttccagcagcggcagtagcagaggcggaggcggccgagccgggcctcatttgttagcgggtgtcgaggtaatggtcgccaccgaggcccgtcttctcctcggcagaggaaacaagacagatgggcctggacctggcgtgattaaagatgaaacgtggatccatcttcgccaaagctgaaaacgaggagctgcagcctcctcctannnnnnnnnnnnnnnnnnnnnnnnnnnnnnnnnnnnnnnnnnnnnnnnnnnnnnnnnnnagaaagaaagcaagagatttgaatcttgcttctggggggggcctccccgtggccctctattgtcatttctataaataaagcttcccctccccctcttctgcgtttattcgtatataaagtgtgggggagggcagatagatttttccggggnnnnnnnnnnnnnnnnnnnnnnnnnnnnnnnnnnnnnnnnnnnnnnnnnnnnnnnnnnnnnnnnnnnnaggttcgtggctcccgcgtgcgggggcactagagcgcgcgggggcctccattgggccggccagggggccctccggctgagcctgccgcaccacccgagcggatcttggtgttgggcaacttgtggtcttttttccacttcatgcgccggttctggaaccagatcttgatctggcgctcggagaggcagagcgcgtgggcgatctccaccctccggcgccgtgtcaggtagcggttgtagtgaaattccttctccagctccaagacctgctggcgcgtgtaggcgccaa

SEQ ID NO: 188277 - DNA, 1202 bp, Homo Sapiens
  misc_feature (475)..(508): n is a, c, g, or t
  misc_feature (530)..(771): n is a, c, g, or t
ttggatgaaatcagctttcataggcctatttttaaaaggaatctgaaatttaattctattttgataaaactaagactgaaaataaccacttgtaaacattcctatgattgttactaaaatgtattttcatgtttaaaatgtttttggatatttttgggttaataactactacattgaattgcatgttaaggtgcagaaataatacattaaaagattttcactttaaattaattagtaatattgagcgctcaccctgtgcgtggccttgtgctaaccattagcactgcatcatttcaattcttttataagggcattcaatactacaaaatcaacatgatttcataaggtgcaaataaaagttggtgacagatttaatataattttgatcacaatttacaaatgatctttgcaaatagtggtcagacggcattagtttttcccttagttaagctaaattaaagggactccatcctgnnnnnnnnnnnnnnnnnnnnnnnnnnnnnnnnnntttgaggtggagtttcactctnnnnnnnnnnnnnnnnnnnnnnnnnnnnnnnnnnnnnnnnnnnnnnnnnnnnnnnnnnnnnnnnnnnnnnnnnnnnnnnnnnnnnnnnnnnnnnnnnnnnnnnnnnnnnnnnnnnnnnnnnnnnnnnnnnnnnnnnnnnnnnnnnnnnnnnnnnnnnnnnnnnnnnnnnnnnnnnnnnnnnnnnnnnnnnnnnnnnnnnnnnnnnnnnnnnnnnnnnnnnnnnnnnnnnnnnnnnnnnnnnngtgtgagctaccgcgcctggccatgatgatattattaaacaccattattcacatttcaaataataacaatactttttgtttttcaaaaataaaatgcaatgttatataaagctataaactaagttctttatgatatttgagcaacaactcaggaatataacatataagggagatgttaatttaaaaatttccactacacttattatctattaaccaaagcttaaaattttgtattcttctgttagataagaccttttacccatttaatttgtctttaaggacagtcatttggcttctgaatgtttgaaacgattttaaaaaataagtagtgctatggttgtttctataattctaacctttgatagtaatcagaatgtattacatttcatttctgaatagcttttgaatttatgaaaaattattaacaatga

SEQ ID NO: 188278 - DNA, 2141 bp, Homo Sapiens
  misc_feature (1498)..(1741): n is a, c, g, or t
ttggcaaggtcttacattttatgtgtttttttaaattctgcactttgacagtggtagcaaaataaaagtaatccaaaagttatttttctattgagaagagagaagaggtgggttttatttttttccttttgattccaatcttttctcccagtgacaaagcataaatcatggacaccagagaataaggtggacctcaggaatccggaaaagactgagaagcttacattcttcctctagagggaagagtggggtgtttatagccatctctggaacctaaaacaaaaaacatgagttgtgtgccatggaaaggagacaaggccaaatctgaatcattggagctgccccaggcagcacccccacaaatctaccatgagaaacagcgcagggagctttgtgccctccacgccctcaataacgtcttccaggacagcaatgccttcacccgggatacgctgcaagagattttccagaggttgtctccaaacaccatggtgacacctcacaagaagagcatgctgggaaatggcaactacgatgtgaatgtcattatggcagcacttcagaccaaaggctatgaagctgtttggtgggacaagcgcagggatgtcggtgtcattgccctcactaacgtcatgggcttcatcatgaatctgccctccagcctatgctggggtccactgaaactgcccctcaaaaggcagcactggatctgtgttcgagaggtgggaggggcctactacaacctcgactccaaactcaagatgcccgagtggattggaggcgagagcgagctcaggaagtttctaaaacatcatttgcgaggaaagaactgtgaactcctgctggtggtaccagaagaggtagaggctcatcagagttggaggaccgatgtgtaacagttctgcccaacctccctctcgcctcagccccttcagtcctctgtgacgtgctgtggcctctacagtgggtctgcccttgccacttccccaaacatctcatcaagtttttccccttcagatctgacagtgcaataggacagacgtgtggactgttataagaactactcagtgttttgttcctgggcaaggaaggtaggagttctgtgcacttaaggccagtggtcacaaacccttgttttatttaagagacagaggagaaagtggagcggggagggaatcctagcttattttcccttttctatgaggacttgacacaggttctgctgagttgtcactgctgctccagactcacctagagatgctgcctccactttccatcctgtctgggtctgaaaacagtgggtctgcagatagtgcccacaaaccccatgtgactggtttgaaggacccagagcataaaggtctctcaggaaaccatgtccaaaaccctagcagcggtacagcatgctgtctccaacccttatccccaggtttaagggtggtttatggccatacgtggaggttttttgttgttgtttttgagactgagtttcactctnnnnnnnnnnnnnnnnnnnnnnnnnnnnnnnnnnnnnnnnnnnnnnnnnnnnnnnnnnnnnnnnnnnnnnnnnnnnnnnnnnnnnnnnnnnnnnnnnnnnnnnnnnnnnnnnnnnnnnnnnnnnnnnnnnnnnnnnnnnnnnnnnnnnnnnnnnnnnnnnnnnnnnnnnnnnnnnnnnnnnnnnnnnnnnnnnnnnnnnnnnnnnnnnnnnnnnnnnnnnnnnnnnnnnnnnnnnnnnnnnnnntgagccaccgcacccggcagagttttataatgaaaaattaactaatattctagtatgaagtgaggaggatactgaacaggatgtggctaaagccaacctgggacagccatggggtggcttggtttcttcactccagtgttgtccctaccatttcgcagcattgatttaggaggctctgggacaaaagagaagccaaagagcagttttcccagttcactcactctggcaaaatcaggaaaaaatagcctgcttttgacatcaaattccactaatttggggcagcgttgggtgaggaaagtattgtgaagacaggcttcttggagtaggggcagccacaattcactacacactctatgctcgaaggctgccactgtagttgccagctcaagttgggtggttc

SEQ ID NO: 188279 - DNA, 1694 bp, Homo Sapiens
  misc_feature (935)..(1010): n is a, c, g, or t
gagtttaattcacgagcaaatgcaatgagttttaattcttctcggagcttaaccagttcagtaaggtcaatctcatcacaataaccaaaatgaggtatcttcagggctgcagacatagtcttgaccattgctttttgaaagtttttatgggttctgttttgtctttgcctgtgaataccggaggttttgatactagtatagggacagtcatgtcttttggctttggtggaggtggcataatttcaactttgggtgaaggaggcaatatagctcctgtctgcttttccaaatagttgaggatatcttctttaagtattctgccatcttttcctgagccaacaacttcactcagcttaatattgttttccattgccagacggcgaactgcaggagttgccagtgtttttcggccctttatctcttggtgtgtatgttcatcatgagacactgcaggagtttcaacaacatcttcttctgaatcttttaaagcttccgtttctatgtctactaatggcttccccacataggcaatatcgtctagattataatagagttttttaatgactccatcataacgactagtgatggtaacagaagctttatcactttgaacttcacagatgctatcaaactgagacactgtatctccttcttttacataccattctttaacagttacttctctaatcccttctccaatgtctgagagcttgaactgaacaacctgtccacggagagcagcagttgttttcaggaagtgatgtggatgactatacttgaatgaaggataaccaaagaaacacacataatttggcttcaaaacatgaacattaccacatgtttgaaaatagcgaacacaaatcagcttccccgcattcctgctccaggttctcagcatacggactgcagacatcttacccgggaaatggcaactnnnnnnnnnnnnnnnnnnnnnnnnnnnnnnnnnnnnnnnnnnnnnnnnnnnnnnnnnnnnnnnnnnnnnnnnnnnnataaaattgtgccattaagttaggcattgaatagacttaaatatagctctcacgttcacgatgggaagaatgtgtctactggttactactggtattctattggttactgcaggctgcatttaaaaaaagatgaaggccaatcatttgaataattgagaaagagtatcgcttcagatatcacacagctgaaagccataagcaatacctggaagaaaaaattaggagtcccagtaacacttcccactctactgatcacatgtgcaataatattcacacaacagaagtaaggatctttgaaattatgataaacagggaatatatcttgattcaataagatgagtgcttggactaataagtgactttaaaaaatcttttccaactcagaaagtattgattattctttgtttagagctttcctaagagttgtctgcaatttcaggaagaaattacaccactaatggcaacacaacatgagtcaacaatgcacacaactgtataggcagcagacatactttctaaattacacgatgattctatttacagatagatgcaaacacttgatcttatgctttatggcatagttgtgccacatcattaaatactgaaataaattttattataaattacttcccttttatttttcttttatattgagagagaacagccaacttttttgtacaaagt

SEQ ID NO: 188280 - DNA, 790 bp, Homo Sapiens
ttgggtcagccagctactctctggagagcacagatgtgaaatctcttgcagctggtgtgacaaagcagagtacgtcatgccctgccttaccccccagggctccaaaactagtggaagagaaggtcgcctccgaaacatctcctttgcctctgaaaattgatggtgctgaggaagaccccaagtctgggtcaccagatctctcggaggaccagtattttgttaaaaagggcatgcaggacatcttctctgcctcctaccctttctcatctccgctccatctccagctggcccccagatcctgtggcgacggttccccatggcagccacctgctgacctatcaggactctctatagaggaagtgtccaagtcactacggttcattggtttgtccgaagatgtcatatcattctttgttactgaaaagattgatgggaacctgcttgttcagctaacggaagaaatcctctcagaggatttcaaattgagcaaattgcaggtgaagaagataatgcaattcattaatggctggaggcccaaaatatagccaaataacccccggccagcatggaacaaaactgatcaatgcgtgtgctagaaggggtgggctgggacacaatttcatgtttttgcactaaaaaccttctctgtaaatagggataagagaaactcttactatgcagattacgtttttgaatggtgaacaggctattttgtacatcaataaaaatgctgtacagaacacttggaggtgtgccttgtacgtcactcaacaaacactcagcagctgct

SEQ ID NO: 188281 - DNA, 977 bp, Homo Sapiens
ttgggtctgtcattaactgatatggtaaatcacctctcttctttgggtctcaattttttatttatctatatggtaaactcagagatcactccttaggggtgagtcctattgcaatatgaccgacaaagaagacaaaatagcattgaaactaacccatacaaaatatccaactctggattctgtgaataagtatcttgaccataaaaagtcattgctgttcttgtttctaatgtaaatagtgtccattagtaaaagtgaaattcagtcttaagtagggtgaattggatcaccatttacacaagagatggctttttcctttgcttgaataaacattttggatcacctccaaagaatgaaaaccagtagtacgttttagtcatattagtcaggatgagaaactataagatgtgtgtaacatttggaaatgcaccaaagtgagcgtttaaatcttctcattttattgaaaactaagagcagaaaatgtaaaatgctcatgaaggttttgaatgccaaaagatattttagaatcaatttataaaggggtaattcattaattacactttaaaattggaaagtgggataagaaatctaaagtaaaccagcttatctttgaaacaatattattttgaaattggctttaaaataaaaccattcggattgaaattctaattagctcatttgtggagtttgatcacacaattcataatgttgctgctttccattaactagtcttgaaatgcctttgtttgtaaaaataaaataatggtactttcattttataacaaggtgtttttttcaagaaataatccatgctaaaatggatatttgtgatcctgaaatgtttactaagcattgtaaatttatttataactgccatctccaactacatccttatgatgtttttaacaataaattaaaacaactgttaaactaaaaaccacaccgttttccagtactttgatctctgagctacaata

SEQ ID NO: 188282 - DNA, 1709 bp, Homo Sapiens
  misc_feature (1459)..(1468): n is a, c, g, or t
  misc_feature (1629)..(1643): n is a, c, g, or t
ttggcttgaagtatatttaagcttttttgttaagcttgaacagttggcaagaataatgtgagttcctatctgaaatagaatggtacattaccacttttaagttttaaaaattgatagatgttcagatgtatctcaaactcagttttatttttattccaaatattgtgaatgagaagccattgtcctaaactttggccatttttgtgctataaacatgcatttttaagttataaggtgaatcaaacaatatgtaatacagtattaggatgtaatctttgcttttgtagtactgttaaaatagagaattatgttgtttgcaccgtcttaattaaaattcttgatttttactagttgctttgcaaaaaacaaatgtttggctgcattgctaatatttgtaagtataagttgcttcaaggttgtgctgatgagtagataggatgtagtgatcttagtagtgattgaaagggagggtatttattatacaaactgtgaactgcaatgacatccttagttttggatgatgtgtattcttgtttttctttgcagcattttaatgaagattgctttgaagtgtttacgcagtagcacattagtataaaatttagtttagcacagtggacaaaaagtagttaaattaataacttaaaatcagtctctaatttatacatctgaagtatagcattcctgtatgcacacagtaaataatgggtagcctgggctctgtgttactttcttgtatttttatccaagttgtcagcttcttattgctgtgttgttgtgctaaactttgaaccttatttcttttattaaaaatcagtacactttctataatttagtaagatactggccataatcttccattgttataaccttaattttcactctgggtttacagtggctggtctgtataaataatttacacaaagatgactgaatgctaataccagttgcacttaaatgaacatgcccattctcagtagctgatgcagtaatatattcagtttatctatgcattgctggggtcttgatataagatggaaacagtgtttcttatctaaagttttgattatcagcaagttgaatggacactttagttatttaaataaagatttttgaccaaaatccagaaaatggtatgagagaaaaataaattccagctagtttaatagatttttaaatgtcaatctgattttagcctcttagagagtgctaactagctggtaatgtttacttttaattccttgttaaaatgaggcaataatttgcaagatttttgtatataagtgtaaattcttcatatctttttagatctaattcaatattttctgactacttctgccatgtataataccatttttgtgcatgcttgatgtgacattcataaattgtaccactatgactttatccatgtaaaatagctatttattgaattttcttttaaaagctggatttactgggnnnnnnnnnnctctcagtttaaacatcttaacagagaatttgttactgtttattaaaagaattgcatttggaagcaagaaaacaaccggatttgcaatcatgtgaagaaacaataatgcctttattatcaagtgttaagcacaattcttataacaaactgtgataaattcnnnnnnnnnnnnnnncctttgccccattattttcttatgaacaaaccaaaaattcatggtgagcagttgcagtgttgggct

SEQ ID NO: 188283 - DNA, 2289 bp, Homo Sapiens
  misc_feature (344)..(355): n is a, c, g, or t
  misc_feature (1423)..(1440): n is a, c, g, or t
agacatgggtagtttattttcaaaacactcatataagcaaaaaaacacatagaaaaataaagtttggtgggggtgctgactaaacttcaagtcacagacttttatgtgacagattggagcagggtttgttatgcatgtagagaacccaaactaatttattaaacaggatagaaacaggctgtctgggtgaaatggttctgagaaccatccaattcacctgtcagatgctgatagactagctcttcagatgtttttctaccagttcagagatgggttaatgactagttccaatggggaaaaagcaagatggattcacaaaccaagtaattttaaacaaagacacnnnnnnnnnnnngcaacacaatatacatcacagtgaaatgtgtaatccttgcaaattgcaagttgaaagaattaaattcagaggaggggagagaaagagtactcagtagggactgagcactaaatgcttattttaaaagaaatgtaaagagcagaaagcaattcaggctaccctgccttttgtgctggctagtactccggtcggtgtcagcagcacgtggcattgaacattgcaatgtggagcccaaaccacagaaaatggggtgaaattggccaactttctattaacttatgttggcaattttgccaccaacagtaagctggcccttctaataaaagaaaattgaaaggtttctcactaaacggaattaagtagtggagtcaagagactcccaggcctcagcgtacctcattagtaattgttttgttgtttcatttttttctaatgtctcccctctaccagctcacctgagataacagaatgaaaatggaaggacagccagatttctcctttgctctctgctcattctctctgaagtctaggttacccattttggggacccattataggcaataaacacagttcccaaagcatttggacagtttcttgttgtgttttagaatggttttcctttttcttagccttttcctgcaaaaggctcactcagtcccttgcttgctcagtggactgggctccccagggcctaggctgccttcttttccatgtcccacccatgagccctccactggacagctcagtaagcctggcccttcattctgcgctgtgttcttcctctgtgaaaatccaatacctcttacctcctctgcatgcaaagattctcaaggattgtcagacttcaaacgtaacagcagaaccaccagaaggtcctataaatgcagtagtgaccttctcaagctgtcaggtctttaaataggatttgggatttaatgctatgtatttttaaaggaaagaaataagagttgctagttttaaaaatgcatgtcttttagccaattcagaatttgcccccaaacttttttaaaaagtcaagacagataaagctttggggagacggacggnnnnnnnnnnnnnnnnnngaccagatctcgggctaaataagcgaggcataagttaggtgcagccagactaaaaatctggactaaaatgaagccctttagtgagtaattgctgcaaaaaggaacacaaaattttaaaaggagggaaggaagaattatgttgcctttcaggatacagtatatatgatagcctgaaaactccaggaaacttctgattctaaattctccagcccaagggaaaaaagttgagaagaggcctttccactttctactaataaaaaaatgcaacagcccctagcagcagtgtggagcccctccttaggcccctgtcttggacaagcggagattctcctggcccggccctccctcttgcagtggagttctgtttatacagcttgtcttaaaatcacagcgagtgcatcttgttctatttgggccaccctgtaaatacttaagttggcataccattttaaaaggaataaaaaggaataagaaaagctgatattttcatctcctcccacccatctccccctcccatgcaaatatgtgctgagcatgagggcgttctcttggagactatttgcccctctcttttacagggacagagagagccttggccatattccaaggccaacaggaggcttctggacttaagtttaattcagttggtgacatcctcatcctggttgtcctttctcctgttaggtttgctctttcagagttgatattcagtgacacaggaggatggagttgcagaacagaatccttgggtgtacagctcatccaaaatcatacaaagtgctggaaaataccacttgattttccctctctccccttcaaacaggtagccagaagcaaaaaaaatgccaa

SEQ ID NO: 188284 - DNA, 1206 bp, Homo Sapiens
gtttgaagccagcctgggcaacttcagacttcaactagggagactcccttctcacaaaaaagaaaagaaaacaagaaagagcagcaggcagatgggaagagggaagcaggaacaaacgtccttgggccgtggaatctgtgtgtgggaggactcctcgctctgagactgacgtggctcaaggccacgtcaacactcttcctggcactccggaatccccctttttaagccccacagccttgtgcccttggagcgccgtttctgtccttcagtgggcacctctgttcagctcacgggattgtgctcctctcgttagggacacacgcagtccacacagtgccgcgccacgtggctctgcagtgttggtgaacaggagttgcagggaactgaaagcccgggatcccagctggtaaagggagcctcagctaccgaccgagctgctgctctcatcttgagaacttctgattcccagccctgcggggaagacgtactggtatctgattgttcttacagaaactcaggatgaaaaccgaagaagaggcccggactcatacagagattgaaatgttccttagaaaggagcagcagaaacttgaggagaggctggagttctggatggagaaatacgataaggacacagaaatgaaacagaatgaactaaatgctctcaaagccacaaaggccagtgacttagcacaccttcaagacctggcaaagatgataagagagtatgaacaggtcatcattgaagatcgtatagaaaaggagaggagcaagaagaaggtaaaacaggatctcttggaattaaagagcgttataaagctccaggcctggtggcgaggcactatgatacggagagaaattggtggtttcaagatgcctaaagacaaagttgatagcaaggattcaaaaggcaaaggtaaaggcaaggataagaggagaggcaagaagaagtgaccaagttctcttttgtgttttctgctggtattctggaggtgggaaggacttggagagagttaagaaacacctggtacctcaaagatgactcatctacaggttgtttcctattgagactttcccagggaagcctgatttcactttgcctgttaatttcactctgcctgttaagtgggttttcaaaccctgatttaagattacaccattgacttaagggcttcctcataccttgctgggaagaagtttctagta

SEQ ID NO: 188285 - DNA, 1579 bp, Homo Sapiens
ttggcacctactaggtgccaggtgtttagacgtacatacaaccctctgcaaaatctttcagtgtagtcctctgtatgaaaagtttccagccaagaattgccactgcacctgagataagggggatcctggccattaaggaaaccttgccttcgaaactgagccgtgaggaactatacaaaatgggaaattgggacaaatcccagtggctcatgacactaagaagtaaaattacgaactcactgagctggaagtcattcaacgggaattgaataggtaactgcacttttgtgagattataaatataccacggagggtaacgaagctacagaagaatggaagaagacagcctggaagactcaaaccttcctccaaaagtttggcattctgagatgacggtgtcagtgacaggcgaaccacctagtaccgtagaagaagaaggaatacctaaagaaacagacatagaaatcatcccagaaatcccggaaactctagagccactgtcccttccagatgtgctgaggatctcggcagttctggaggacaccacagaccagctctctattctgaactacatcatgcccgttcagtacgaagggagacagagcatctgtgtgaaaagcagagaaatgaatctagaaggaacgaatctagacaaacttccaatggactcaacaatcacaaaaatacccagtccgttaataactgaggaaggacccaacttgccagaaatcagacacagaggccggttcgctgtggagtttaacaaaatgcaggatcttgtcttcaaaaaacctacaaggcagaccatcatgactacggagacactgaagaaaattcagattgataggcagtttttcagccatgtgattgcagataccattaaggagttgcaagattcggccacttacaacagtctcctgcaagctttgagcaaagagagggaaaacaaaatgcatttctatgacatcattgccagggaggaaaaaggaagaaaacagataatatcacttcaaaaacagctaattaatgtcaaaaaggaatggcaatttgaagtccagagtcagaatgagtatattgctaacctcaaggaccaactgcaagagatgaaggcaaaatccaacttggagaatcgctacatgaaaaccaataccgagctgcagattgcccagacccagaaaaagtgtaacagaacagaggaactcttggtggaagagattgagaaactcaggatgaaaaccgaagaagaggcccggactcatacagagattgaaatgttccttagaaaggagcagcagaaacttgaggagaggctggagttctggatggagaaatacgataaggacacagaaatgaaacagaatgaactaaatgctctcaaagccacaaaggccagtgacttagcacaccttcaagacctggcaaagatgataagagagtatgaacaggtcatcattgaagatcgtatagaaaaggagaggagcaagaagaagtaaaacaggatctcttggaattaaagagcgttataaagctccaaggcctggtggcgaggcactatgatactgagaagaaattggtggtt

SEQ ID NO: 188286 - DNA, 1698 bp, Homo Sapiens
tgtacaaaaaagttggcaaggaccaactgcaaaagatgaaggcaaaatccaacttggagaatcgctacatgaaaaccaataccgagctgcagattgcccagacccagaaaaagtgtaacagaacagaggaactcttggtggaagagattgagaaactcaggatgaaaaccgaagaagaggcccggactcatacagagattgaaatgttccttagaaaggagcagcagaaacttgaggagaggctggagttctggatggagaaatacgataaggacacagaaatgaaacagaatgaactaaatgctctcaaagccacaaaggccagtgacttagcacaccttcaagacctggcaaagatgataagagagtatgaacaggtcatcattgaagatcgtatagaaaaggagaggagcaagaagaaggtaaaacaggatctcttggaattaaagagcgttataaagctccaggcctggtggcgaggcactatgatacggagagaaattggtggtttcaagatgcctaaagacaaagttgatagcaaggattcaaaaggcaaaggtaaaggcaaggataagaggagaggcaagaagaagtgaccaagttctcttttgtgttttctgctggtattctggaggtgggaaggacttggagagagttaagaaacacctggtacctcaaagatgactcatctacaggttgtttcctattgagactttcccagggaagcctgatttcactttgcctgttaatttcactctgcctgttaggtgggttttcaaaccctgatttaggattacaccattgacttaagggcttcctcataccttgctgggaagaagtttctagtagtcctgtgaagattcattcttcttgctctttctcagcagaacaaaggagttcactggcttagctacagtgacgcattgaaacttgagtaattcctgtaatgtcagattttgattttacccaatttgtctgtagtgaaaaaactcttatgagcaaaagtattcagtaggaattacaatatgatgttattagctgtccagcataatatatacacagcaaagttttaataaatgttggttcctgcctgccttttagatttatcgtcactttggtgtttttattcaggtgaaaatggcatggaatacatatccagttgtaagctgcttcagcaacttttctaggaaacagggatacaaattataaatacaagctagaaataggatgttaggatatacaactttacaaactataaagatggggacacaggttctctggaaggctagtttggagatatttttgacaagtgaaacactagagccaccaatccccactttatggagtgttaagatgaaaagaaatcaggtgtgtgaaaatatctaacttgtgcctggcaaataggaaagctgtcactctccctcttctcctagaaaaaaaatgcacccaccagatcatgcttgccttgatgagtcaaaacaatgccttggggatgctaaaggtttccaagagcaaagttgtcctaatgtgtcacatacattttcatgaattaagccttctatctaactcccaataaagctcagtcttgatatctgtacttcctaaaaaatgaatctgatctccaaagtttgtcccgaagctcccattccactgacatccctctggaaatgaaatgctctttccttgattcccctttgc

SEQ ID NO: 188287 - DNA, 1309 bp, Homo Sapiens
ttggggcgcacaggaggggaggagaccgcgcgcgggacggggaggaatggcctgtccgcgttaaaccatcacaagccatggttgcggaagggccacgcgtcccccagtaggagaatgactccgattcgtgaccctcagcgccggtgcatgtcgatgtaagtgcgaggccggcgagcagagtgtgagtgggggttggtggtgaggggagattctgatgcaatcggcccggaaaggaggagagccaggcgagcgcggactggggcggccacgccactccgccagaaggtcgccaggagcctccgcccttcaccttcctcggaaatccgccaggccacgccaagctccctgcccaacccttactgacgggggccacattttcccggcctccgcagccagaccttgacacaaaggacatcaaactgccgagggtaaaaaccccggaagggcggacacctccacatcgccttttgccacctttccctttatttccggagatatttattgagtgtctactgtgtgccaggcactatatctatgtgcatagaaaaaccctggaaggccatacaacaatatatatagagtgatcgtctctgcttgctgagctaacaggggtgtcaagcttccattttggtatctacttctaaatacactcagaacaggagaaatttggactaattttcaaactacagacactttctaatcatgatgcatttcaaaagtggactcgaattaactgagttgcaaaacatgacagtgcccgaggatgataacattagcaatgactccaatgatttcaccgaagtagaaaatggtcagataaatagcaagtttatttctgatcgtgaaagtagaagaagtctcacaaacagccatttggaaaaaaagaagtgtgatgagtatattccaggtacaacctccttaggcatgtctgtttttaacctaagcaacgccattatgggcagtgggattttgggactcgcctttgccctggcaaacactggaatcctactttttctggtacttttgacttcagtgacattgctgtctatatattcaataaacctcctattgatctgttcaaaagaaacaggctgcatggtgtatgaaaagctgggggaacaagtctttggcaccacagggaagttcgtaatctttggagccacctctctacagaacactggagcaatgctgagctacctcttcatcgtaaaaaatgaactaccctctgccataaagtttctaatggggaaaggaagagacattttcagcctggtacgtggatggccgcgttctggtggtgatagttacc

SEQ ID NO: 188288 - DNA, 1014 bp, Homo Sapiens
ttggctaaaagaagactatagcaggctctttcagggacaaagggcagcaatgttaagtcttcttagatataatgctaacttaacaaaaatgaagaacactttgatctcagcatcacaacaactgaaagctaaattggagttttttcacaaaagcattcagcttgacttggagagatacagcgagcagatgacgtatgggatatcttcagaaaaaatgctaaaagcatggaaagaaatggaagaaaaggccatccactatgctgaggttggtgtcattggatacctggaggatcagattatgtctttgcatgctgaaatcatggagctacagaagagcccctatggaagacgtcagggagacttgatggaatctctggaacagcgtgccattgatctatataagcagttaaaacacagaccttcagatcactcctacagtgacagcacagagatggtgaaaatcattgtgcacactgtgcagagtcaggaccgtgtgctcaaggagctgtttggtcatttgagcaagttgttgggctgtaagcagaagattattgatctactccctaaggtggaagtggccctcagtaatatcaaagaagctgacaatactgtcatgttcatgcagggaaaaaggcagaaagaaatatggcatctccttaaaattgcctgtacacagagttctgcccggtcccttgtaggatccagtctagaaggtgcagtaacccctcagacatcagcatggctgcccccgacttcagcagaacatgatcattctctgtcatgtgtggtaactcctcaagatggggagacttcagcacaaatgatagaagaaaatttgaactgccttggccatttaagcactattattcatgaggcaaatgaggaacagggcaatagtatgatgaatcttgattggagttggttaacagaatgagttgtcacttgttcactgtccccaaacctatggaagttgttgctatacatgttggaaatgtgtttttcccccatgaaacc

SEQ ID NO: 188289 - DNA, 973 bp, Homo Sapiens
  misc_feature (220)..(232): n is a, c, g, or t
ttggcgggacttgcctccccgctgagcacggggaagattctggaccagaaagcatacagctgtgctaatcggctaattgtcctatgtatcgaaaacagtttcatgacagacgctaggaagtaatggccttctgatgattcttaaagagttttcaattttttcttatgtgaagagttgacactgaaatctaaaatgtttaattgttgtaaatattacaggnnnnnnnnnnnnnactacatattctttacaacagcaaccaaagaaaacatacctcaatacactcaaaactgaagacatagaggactcagatcaaagacaaaatctgatccatatattggtgctagattctgcaggaaaccccagcagtgtgaacgcatcccaacataggttaagagcaagttgaaaacaaaggccatggcattctgccactgcatccttcagacagttatatcctccttttaaaccattgttgttgagtgtaagatgtccttcatgttttcttataaagtcagtgtttagaaatgttaccctttctaagttatatacagatcaaatgcttttttctttcacgtacatccatcatttgcaactgctgttcgtacacagaaacaggactgctcaaatgatcctatttgtattttctgatgctatcagactctaatgtttttttccctaaaatattattgccatcatgctttaggaattttatatttttacacaatcatattttagtatggtgtctgtttatgtaactctgacttgctggaaaagttgaaactccaaataatctgaaactagaaaagaaatagcacataattactaccttccccttggcggctctcctccccaacccccaccccacaattttatgacttccatgtggcaattgttgaattataactgcgactgaaacaaacaggttcatagagatgaattttctgagaaacatatatctacatgttgtataatggga

SEQ ID NO: 188290 - DNA, 979 bp, Homo Sapiens
ttggatcattgtcgtcagtaccatatcccatgtccttatcaggcaaaagcaaaagctcgaccagaattggctttatttatgataaaatacctgatgacattaattgttggcatctctgctgtcttctgggttggaagcaaaaagacatgcacagaatgggctgggttttttaaacgaaatcgcaagagagatccaatcagtgaaagtcgaagagtactacaggaatcatgtgagtttttcttaaagcacaattctaaagttaaacacaaaaagaagcactataaaccaagttcacacaagctgaaggtcatttccaaatccatgggaaccagcacaggagctacagcaaatcatggcacttctgcagtagcaattactagccatgattacctaggacaagaaactttgacagaaatccaaacctcaccagaaacatcaatgagagaggtgaaagcggacggagctagcacccccaggttaagagaacaggactgtggtgaacctgcctcgccagcagcatccatctccagactctctggggaacaggtcgacgggaagggccaggcaggcagtgtatctgaaagtgcgcggagtgaaggaaggattagtccaaagagtgatattactgacactggcctggcacagagcaacaatttgcaggtccccagttcttcagaaccaagcagcctcaaaggttccacatctctgcttgttcacccggtttcaggagtgagaaaagagcacggaggtggttgtcattcagatacttgaagaacattttctctcgttactcagaagcaaatttgtgttacactggaagtgacctatgcactgttttgtaagaatcactgttacgttcttcttttgcacttaaagttgcattgcctactgttatactggaaaaaatagagttcaagaataatatgactcatttcacacaaaggttaatgacacaatatacctgaaaacagaaatgtgc

SEQ ID NO: 188291 - DNA, 1627 bp, Homo Sapiens
ttgggtcaggctgcgcccgcgtcttcagggcccagtccctcggacccatcgccgcttctagaccctactgcggtctcggatattgccggttggcagatgcactacctgaacactcccctgccaaaacctctgctgtgagcaatacaaaacctggccaacctcctcaaggctggccaggctccaacccttggaataatccgagtgctccatcttcagtgccatctggactcccaccaagtgcaacaccctccactgtgccttttggaccagcaccaacaggaatgtatccctccgtgcctcccaccggaccacctccaggacccccagcaccctttcctccttccggaccatcatgtcccccacctggtggtccttatccagccccaactgtgccgggccctggccccacagggccatatcctacaccaaatatgccctttccagagctacccagaccatatggtgcacccacagatccagctgcagctggtcctttaggtccatggggatccatgtcttctggaccttgggcgccaggaatgggagggcagtatcctacccctaatatgccatatccatctccaggcccatatcccgctcctcctcctccccaagcccctggggcagcaccacctgttccatggggcaccgttccaccaggagcctggggaccaccagcaccatatcctgcccctacaggatcgtatcccacaccaggactctatcctactcccagtaatcctttccaagtgccttcaggaccttctggtgctccaccaatgcctggtggcccccattcttaccattaagttaacaatggacgaagagatgacgctttgctttttgaagtacatgtatatgcacatgaatgcatatataaaaattgctggtttcactattagagggcattcatgaaagaacaactcttgcacctctcagagaagataactgcctcttgtacttggatgcgtagtacatcatatgtatacaatcagataaaagcatagaagtaaatcattcggatgtgatttttatttggttttcatggaaagttaaagtgataaagtatattgaatagttctttgacagaatttgtttaaactatgaaactacacacttaaaaatctaagatgtggattattgttagaatctgcaacttcattggcaaattatttcaagtatttttctataatcactttccccttctaaataaataaacttcgagaataacccatcataatccaaacaaatgatgcctcaacattttgagctgctctgtcggacaaataaacctggtcctcttgaggttatattttggatatacatttttaaactgtcagtaattattgtcagatgtggagttcaatagccagccagtgttcatttttatccttgagcttttagtaaaaacttcctggttttatttttagtcattgggtcatacagcactaaagtctgctatttatggaaactaacttttttgtttttaatccaggccaacatgtatgtaaattaaatttttagataattgattatctctttgtactacttgagatttgattatgagatgtgcatattgctttgggaagagctcgaggaaggaaataattctctcctttgttttgaa

SEQ ID NO: 188292 - DNA, 1286 bp, Homo Sapiens
  misc_feature (1052)..(1062): n is a, c, g, or t
gccaactttgtacaaaaaagttggattattgttagaatctgcaacttcattggcaaattatttcaagtatttttctataatcactttccccttctaaataaataaacttcgagaataacccatcataatccaaacaaatgatgcctcaacattttgagctgctctgtcggacaaataaacctggtcctcttgaggttatattttggatatacatttttaaactgtcagtaattattgtcagatgtggagttcaatagccagccagtgttcatttttatccttgagcttttagtaaaaacttcctggttttatttttagtcattgggtcatacagcactaaagtctgctatttatggaaactaacttttttgtttttaatccaggccaacatgtatgtaaattaaatttttagataattgattatctctttgtactacttgagatttgattatgagatgtgcatattgctttgggaagagctcgaggaaggaaataattctctcctttgttttgaacctcaaactagataaaccctaggaattgcttaactgcaacaagtaattttcattcccacaaaaacctgaggcagctcttttgcccagagcgttccctgtagccacccccaccccacttgcccttggttctttagaaggagcacacacatcccttgattcctccctgatgtggtaaactggcacactccaggggtctaaaacataaaacagttgtgtttagggaaccttaagtcatgcagacatgactgttctctttgtacaagtgtgaatcaaaatatgtatctctttttcagagtctggttaagctatgtcattgtctactgcatagtttcctgagtctgtttgtaaagtgcttatggctaacagttcagttctgtatttgttgacaggtaaataagtggagttgagtgccatctttgaaaaaattaccctctagctctaacactgaaaataataataaattgtagatctctgcaactaagtttaaaagcagtgtgactgtgttgcttaaatatcaagtattgtttataaccaccnnnnnnnnnnngccctggtagttttttggcaccttatgtttaaatcagattcttagatttggagtagacctgaccttgttatttattagataacattttgaatgtatccattggatttctaaaatgtattgtgaatttctcagacaaacaggatttatgctggaggctctgttttgcttagaaataaaatatttaatagtttatttctgctctaattaaaatgtcaggaattgcc

SEQ ID NO: 188293 - DNA, 931 bp, Homo Sapiens
ttggttggctcttgtggcctcccgcagaatgtggatgacgcccaaaagaagcaagatggaagtcgacgaggctctagttttccggcccgagtggacccagcgttatttggtggtggagcctccggagggcgatggggccctgtgcctggtctgtcgccgcctcatcgtagctacccgcgaacgcgacgtcaggcgccactacgaggctgagcacgaatactacgagcggtatgtggcggacggcgagcgcgcggccctggtggagcgtctgcgacagggcgacttgcccgtggcctccttcactcctgaagagagagctgctcgtgcaggcctcgggctctgccgcctcttggccttgaagggtcgcggctggggtgagggggactttgtataccagtgcatggaggtgttgctgagagaggtactgcccgagcatgtaagcgtcctgcaaggcgttgacttatctccagatatcacaaggcagaggatcctgagcattgacaggaatctacgcaaccagctttttaaccgagccagggactttaaagcctattctcttgccttggacgaccaggcttttgtggcctatgagaactacctcctggtctttatccgcggtgtaggccctgagttggaggtgcaagaagatcttctgaccataatcaacctgactcatcatttcagtgttggtgcgctcatgtcggcaatcctagagtccctgcagacagcagggcttagcttgcagagaatggttggactgaccacgacccatactttgaggatgattggtgagaactcaagactcgtctcatacatgagagaaaaggccgtaagccccaactgttggaatgtcattcattattcagatttcttcacttggaactgttgagctcctatgatgtaaatgttatcagatcataaataccatatc

SEQ ID NO: 188294 - DNA, 1721 bp, Homo Sapiens
ttggcgcatcgtcggctcggaggctgaggggctgccgcggccgggagcgcccctcgcctcgctcctcgctccgcttggtgtcatgtgattctctgagggagcagctgcgtgagtggagatgctttcagtggtggagaatggactggacccccaggctgccatcccggtcatcaagaagaagctggtgggatccgtgaaggccttgcagaagcagtacgtgtccctggacacggtggtcactagtgaagacggagatgccaacaccatgtgcagcgccctggaggccgtatttatccatggcctgcacgccaagcacatccgagctgaggccggaggaaaaaggaagaaaagtgcccaccagaagcctctgccccagcctgtcttctggcccctcctgaaagctgtcacccacaaacacatcatctcagagttggagcacctgacgtttgtcaacacggatgtgggccgctgccgggcatggctgcggctggccctgaacgatggcctgatggagtgctacctgaagctgctgctgcaggagcaggcccgcttgcatgagtactaccagcccaccgccctgctccgggatgctgaggagggcgagttcctccttagcttcctgcagggcctcacgtccttgtccttcgaactctcctacaagtctgccatcttaaatgagtggacgctcaccccattggccctgtctgggctttgcccgctttctgagctggaccctctctctacctctggtgcagaactacagcggaaggaatctctggattccatttcccattcttcaggctctgaagacatcgaagtccatcactcgggccataagatacggaggaaccagaagctgactgcctcctccctcagcctggacacggccagttcatcccagctgtcctgcagcctaaactctgatagctgcttactccaagagaatggctccaagagtccagaccattgcgaggagcccatgtcctgtgactcagacctgggcacagcaaatgctgaggactcagaccggtctctgcaagaggtattgttggaattcagcaaagcccaggtaaactctgtgccaaccaacggactgagccaagaaacagagatccccacaccacaggcctcgctctccctccatggcctcaacaccagcacatacctgcactgtgaggcacctgcagagccccttcctgcccaggcagcctctggaactcaagatggtgtccacgtgcaggagccgcgtccccaggcgcccagccccctggacttacagcagcctgtagagagcacctcaggccagcagccttctagtactgtcagcgagacagccagagaagtgggccaagggaatggcctgcagaaggcccaggctcatgacggagctggtctgaagctggtagtttcctcacccaccagtccgaaaaacaagagctggatctcagaggatgacttctaccggccttcccgggagcaacccctggagagtgcttcagaccacccaatagcttcttacagggggactccagggtcaagcctggtctccacaggcatttttctcaagaaccaagaaaaaactgctccctgggggcgttagaccaagcgtgtgtaccttccccaggaagaatgcaagcccaggcagccccatcccagggcataagagcttccgggtggtacaccggagacagatgggactgtccaacccattccggggtctc

SEQ ID NO: 188295 - DNA, 991 bp, Homo Sapiens
atcatctcccttttggggccattttcatatgacccactaatggcaagggcggccgacacttcccggcagtaccggagatggcagggcagtggggctccccagaatgcaaggggaaggcagccctggagaaagggggactggcgtgttcctgtgcggaagatctcatctcccacctcctctaccctgtcacaccgccccaccccacgtctcccacacagacccatgcccgctgccccgtccacaccctgagactccgagggagacagttgagagcctggggatggagatgtcaagttcacacactgggcgtggctcaggaaactggtacacaaagacaaaaagaaaagaccccaactctccttggaaaaaccaggacctgcctagggctgctccccaccccagatgagtggcaggaaaaggccctgcaggggacggggcaggggacagagtgtcaggagcacttccagacgcacacagccagggtgcccccgaagtacaggtagaggaggttcttcacctcgtgggtgatctcaaacccaaagccctcgccgatcaccacgtgccaggaggagccgaacttcttgtccattgtctctttgatcatcttggcggcgctctcgttgttgttggagaatttctcacaggctgtgacacatagctccatggtctccacgcgcatctcctctggcatgtccgagtgcctgaccagagggaaggtctgcagtcgcttataatcagcctcatctttcttcccttctgtttctcccatgatccttccactgtgaccactggaggagagtggggctttcaggaggtgctgggactggcagttaagacacacccaggagattcaggaagcaggccctgccaactcggtgggagcagaaaatgtctttccccggggggtgctgctcctgcgggggccggagccggggccgcagccagcgaacccccgccagggttgtcaaggagccaacttttttgtacaaag

SEQ ID NO: 188296 - DNA, 1123 bp, Homo Sapiens
  misc_feature (834)..(844): n is a, c, g, or t
  misc_feature (950)..(960): n is a, c, g, or t
ctttgtacaaaaaagttgggggagggttccttccctagctccccatctgcccccgctggtgagagttgggcttcttggtcttggaactccctggcattgggaacagagcatttccagcatttgttgttgttgttttactcacctaacccttagaaaatgaatgttagaaggtgcctgccgaggcgggacagagtgtttgctcgcgctggagaaggctctgctcagccctgagagtcccttcctgccccaccgatactggcactttaaaaaggaagctgaccgcacagtgtccagacgaattggcccccagaagatggggagttctgtcctgcccttctgtgtctgcgtgacctcacccagcctaggagggaggtgcattcagggtagatttgcctctcattcaaagttctggggctttgggcggaaaacagccagctttggcgctgttggggagactcctccagaccaggaaccccagaaggagacagagcctgccacatcctcccacgccaggccctgggccagggtgattggactgagaatttggccacaaccaaattgatgctggctggaaccagaggccagaaagcctggccttgtccccatgtgggagccctgtcctcagccctcttgtccccttgagctcagtgaattcccaccaggtgcccacagctcctggacttcaaattctatatattgagagagttggagagtatatcagagatatttttggaaaggagttggtctatgcaatgtcagtttggaatcttcttgaaagtttaatgtttttattggggggtttaaagaaaataaaggtttacaatttctttaggnnnnnnnnnnncctgtttaccgcccaaactggccccatggcatgtctatcaggatggagggggtccctgttttcctctgtctttagggaggtgataaggagatgggcggaggggtgnnnnnnnnnnngactcccctcctttttaacagaatgttgccccccctggttgagtgggctgtgtttgttcctttgtcccagcttctgttgtagaaaataacattgttaggggaactcaggctagggtcagcgtcttggtttggggggaaaaaattaaatgtttcggtttttgtt

SEQ ID NO: 188297 - DNA, 2107 bp, Homo Sapiens
ttggcaaaacaccactatttgatgtgtacagagttggactatgtgtatattggaaataaggaaaaacccttctcattgttaactggagttttgatgtatttctctttggatgaataggagacagtagtagccataaaaagtacttatactttagaaaacagtccttattcagaaacttttcggtcagtcttctgaagaatctcaaaaagcccacccaactttcagctgacatttccaccagccctctcatacttgttaacaattggtatctttgagtatttaccaaagagctgccaaggttacagtgaacagagttttgaaaggcattgctttaaaggaaaaaagtataggtatgtgtacatatataatacatacaaacacatgtacttctgtatacatttacatatttttacaattcatactttaatttctaggctataactcagaccaaattatacctaaaagttccaacaaagtccctttttcaatatcacattaccaaaaagatggctgcaaatgtaatttggacctttcattaattttgttttcaaaactagaataatctcaccacagaatcagaattttctaccgttccacacccaaccccttcaaatacacacaaccttgttacttttcactccagcaccttcatacgcttttctccaggaggaggttcttgcagctggaaacagcctattttgtggtcactgtcaagtggatggatattctagcgctcccaaaaaagcactatggccttatatgcagggaaggcacataccaccaagttcaatgagaaatattagagctaaccgtactctcttctctgcgtacgttcgagtatacgttgcccatatccctcccatattttctttttgctgcttttgctctggaactttgcttttagcagggaaagcagctgtcccctgagtgctttgaattgggaatatacccagtgtgtgttctcccccctcttacgaggctacataacacatctatgatgctgctttaagtttttagaggctatacctcaaagtagctgcggattttgtctcctgcactgccaatatgcaactgatcccgcttttattaattttttgaagaagtacacagaatttttacagaatgtagtattttgatatcattaagtaaaccaatcagaaaactccttgagcaatagttgtttctttgtcagtttcagttacaatcatctttacccattaagacttacattaacattccttttatataaagagttgtatatgtccacctaaattcctatgtccacacttaacctttaaagatgtacattgagggaatatcaaaaaatagcgttcatggctacgaatatgtagaatgttaaaagcacagcaaactgcactgcacttataaagcaaatctattagaaaaaaagcatttttctaaatgctcaaatgttatcaaaatactatatttatagaagtaatcttctctgttaacagccaagatttgctgttagaaataactcttgtgagttttatattgtgctttttggaggttctaatcatttcagcagtagcgtcttaaacagcagtattactataagcagttgcttcaaaatgtgaattaacttgttgaaactgtggctttaacatccatgtgactagtgtatatggtatttgctctccattagcaaaataattcattgttaggtaaacttcactagtgcaaattgcagatctgtgagcaatgtttcctattgaatataaactactgtctaaaatatacatatcagcagcccagcctttatcaggaaaattatacttggcaagttgctgaaaatgcacaaagttatgaaagttaaaggtatgctgcaaataactagccattattctatgtattattaaatatttactagttctgttaaaagcagagcagaagttagacactaaggatctctttgtgaactctgtgttctctatattagattgctgtttatatgtaagaattttattgcttatgtggcatacaatatttataactataaactttatagaagtacagtattaaagtcagtggtacacagacattctgtacatatcctgtgaaacgtgctgtcatatgaaataaa

SEQ ID NO: 188298 - DNA, 991 bp, Homo Sapiens
ttggctggagactgcccagctaaagcaatatgcatttaaatacagtcttccatttgcaagggaaaagtctcttgtaatccgaatctctttttgctttcgaactgctagtcaagtgcgtccacgagctgtttactagggatccctcatctgtccctccgggacctggtgctgcctctacctgacactcccttgggctccctgtaacctcttcagaggccctcgctgccagctctgtatcaggacccagaggaaggggccagaggctcgttgactggctgtgtgttgggattgagtctgtgccacgtgtttgtgctgtggtgtgtccccctctgtccaggcactgagataccagcgaggaggctccagagggcactctgcttgttattagagattacctcctgagaaaaaagcttccgcttggagcagaggggctgaatagcagaaggttgcacctcccccaaccttagatgttctaagtctttccattggatctcattggacccttccatggtgtgatcgtctgactggtgttatcaccgtgggctccctgactgggagttgatcgcctttcccaggtgctacacccttttccagctggatgagaatttgagtgctctgatccctctacagagcttccctgactcattctgaaggagccccattcctgggaaatattccctagaaacttccaaatcccctaagcagaccactgataaaaccatgtagaaaatttgttattttgcaacctcgctggactctcagtctctgagcagtgaatgattcagtgttaaatgtgatgaatactgtattttgtattgtttcaattgcatctcccagataatgtgaaaatggtccaggagaaggccaattcctatacgcagcgtgctttaaaaaataaataagaaacaactctttgagaaacaacaatttctactttgaagtcataccaatgaaaaaatgtatatgcacttataattttcctaataaagtt

SEQ ID NO: 188299 - DNA, 1022 bp, Homo Sapiens
tttctttttttaatacacagaagcatatgcttattctttcaaataccatactatacccaattttagtcaatttgtaaattataaattatattattgtgctacagtttgtgacatttaaatcttattagaagataagcaccaaacctattaaaataaaaaatagataaaatgctgtggttttcccagcagcaggatattgtgtacgtcctgtaggctgtaaacttatgctcccttctcctgaaacaatgtttttgataaacttgcccttctcccttgaaacttttcctgaaaacagacttctgctttaactgtagtttcggaaaatgtacaaaagagcaaaactgcccctctcggcgggacggccgcatgttacagaaaggcttcgtctctgctgctgatgccaccacgagccctgcccagcgctcaccaggagggcgggctgcggcccccggggctctggggagggtctcactcagagggtaaagctccacagaagagtcaccccagagcacctgtcggagaccctgcgtcccttccctcagggggctgtgaaaacaccttgacgtgcttgtctctgtattttaaaaacacgctctcttcacctccagtgctgaaagctgctcagggcctctggatgcttagtttttgaaccttgtctgttcacagatatgattgaatttcatggcgtggtgagctttcacctgagtgcggcagttacggccccagtagcagtcaggacgggatgttacggccactggcaactcggaagcaggaatgttctgccgatactgataggtcagctcacggaagctgcgcaggccacagcagtaacacagaacggtgtctcccgtgactctgtaatctggaagaaacacagccagttacccagcaacaccatcttcccaacagcagcgcacggacttcacagcagtgggagactaacgcactgaccataaatggggtgaagacaacgggcgacacattaggaaaataagaacaaagccaacttttttgtacaaagt

SEQ ID NO: 188300 - DNA, 1707 bp, Homo Sapiens
tgtacaaaacagttgtgtggaatcactgttcctggttagaaatttctgcattttatattattttcttggctatattcccaaagcttggattagcactgctatgaaccttcacatagatgagcaggttcataggccacttgacacagtgagtggcctcttaaatctctcgttactctaccatgtctggctgtgtggtgtctttctcctgacgacttggtatgtctcatggatactcttcaaaatctatgccacagaggctcatgtgtttcctgttcaaccaccatttgcagaagggtcagatgagtgccttccaaaagtgttaaatagcaatcctccccccatcataaagtatttagccttgcaggacctgatgttgctttctcaatattctccttcacgaagacaagaagttttcagcctcagccaaccaggtggacatccccacaattggacagccatttcaagggagtgtttgaatcttttaaatggtatgactcagaaactgattctctatcaagaagctgctgctacgaatgggagagtgtcttcatcttacccagtggaacctaagaaattaaattctccagaagaaactgcttttcagacaccaaaatctagccagatgcctcggccttcagtgccaccattagttaaaacatcactgttttcttcaaaattatctacacctgatgttgtgagcccatttgggaccccatttggctctagtgtaatgaatcggatggctggaatttttgatgtaaacacctgctatgggtcaccgcaaagtcctcagctaataagaagggggccaagattgtggacatcagcttctgatcagcaaatgactgaattttctaatccttctccatctacctctattagtgctgagggtaagacaatgagacaacccagtgtgatttattcatggattcagaataaacgtgaacagattaagaatttcttgtcaaaacgggtgctgataatgtattttttcagtaagcacccagaggcctccattcaggctgttttttcagatgcccaaatgcatatttgggcattagaaggtctgtcgcacttagtagcagcatcatttacagaggatagatttggagttgtccagacgacactaccagctatccttaatactttgttgacactgcaagaggcagtcgacaagtactttaagcttcctcatgcttccagtaaaccaccccggatttcaggaagccttgtggacacttcatataaaacattaagatttgcattcagagcatcactgaaaactgccatctatcgaataactactacatttggtgaacatctgaacaaactgaagacttggggtgagcaaagtattccagaaatgaatccctggtgctttgtgattcatgctggaaaaacaccaacagatcacaacaccttgagaaacagaaccagagagaaaaccacaaatgccaagcctgtttatatttagttttattcatgtttactgctttcctcttgtgaaatgatctagctaggcaggatgagggatactagcttagtaactaaactgtatttatatttatcacaattataaatgaactttagaagacacgagagattgctctgctgtttttgtatgcaatcaatgaatagtttaagacttccaatttaaattaaagttaaataaagttaaaaattcaatttgtcagtcaccctagccac

SEQ ID NO: 188301 - DNA, 2706 bp, Homo Sapiens
  misc_feature (807)..(840): n is a, c, g, or t
  misc_feature (1207)..(1504): n is a, c, g, or t
  misc_feature (1876)..(1953): n is a, c, g, or t
ttgggtggaggggccgttcgaagagtcgtgagggggtgacgggttaagattcggagagagaggtgctagtggctggacttgacctggaaagaatcttctgctgactctcaacttttcctggaaaaaatggatcattcccaccatatggggatgagctatatggactccaacagtaccatgcaaccttctcaccatcacccaaccacttcagcctcacactcccatggtggaggagacagcagcatgatgatgatgcctatgaccttctactttggctttaagaatgtggaactactgttttccggtttggtgatcaatacagctggagaaatggctggagcttttgtggcagtgtttttactagcaatgttctatgaaggactcaagatagcccgagagagcctgctgcgtaagtcacaagtcagcattcgctacaattccatgcctgtcccaggaccaaatggaaccatccttatggagacacacaaaactgttgggcaacagatgctgagctttcctcacctcctgcaaacagtgctgcacatcatccaggtggtcataagctacttcctcatgctcatcttcatgacctacaacgggtacctctgcattgcagtagcagcaggggccggtacaggatacttcctcttcagctggaagaaggcagtggtagtggatatcacagagcattgccattgacatcaaactctatggcgtggccttatcgattgcagtgggaagttgttgaagacttgaagacgtgattcctgctccaatcatcccttcttgctcctctttgtgcacgtnnnnnnnnnnnnnnnnnnnnnnnnnnnnnnnnnnccctgctcaacagaggtttagtttacagtctctgaactaaagtagtaacctcccaaattgttttttctaataagctgagattcccatttctcttaaggagaagccacccatgagatgtcttttccttctccatcatcttagagccaagttatatgttcttgtctaatccatgtagctttttgttcaatgacttgatcatctgcttcctttttgaatttttaacagatagtaagtaaatttggtggttttttcccctgggtcagtgatggaaaggggttaacttcagccaggattgatggcagctgagggaaattcttgcccaactaaacccagaactcaaacttaacattagaaaataaggtccagnnnnnnnnnnnnnnnnnnnnnnnnnnnnnnnnnnnnnnnnnnnnnnnnnnnnnnnnnnnnnnnnnnnnnnnnnnnnnnnnnnnnnnnnnnnnnnnnnnnnnnnnnnnnnnnnnnnnnnnnnnnnnnnnnnnnnnnnnnnnnnnnnnnnnnnnnnnnnnnnnnnnnnnnnnnnnnnnnnnnnnnnnnnnnnnnnnnnnnnnnnnnnnnnnnnnnnnnnnnnnnnnnnnnnnnnnnnnnnnnnnnnnnnnnnnnnnnnnnnnnnnnnnnnnnnnnnnnnnnnnnnnnnnnnnnnnnnnnngaaggtccagcttttggattcaatgagtgggaaatacattgtgcctttctctagatgtgatacgttataccaaaatctttgtagtgtgcagagcggtggtttgagactaaatacaggcttagaacttgcagagtgtgtattcttggatggctgatgcatcgacttgcattcccacttaacactttgattagcatgaacttgccaatcaaaaaatgacaatcaatttgagaaaatagaaatagatatttttaaataaaaccattcacagtttactttgtcttgataccttggtttgtcccagctgaagtgaagcaagagagtttgaattaatttttccattataatgttttcgcatgtctgcctctaaaactnnnnnnnnnnnnnnnnnnnnnnnnnnnnnnnnnnnnnnnnnnnnnnnnnnnnnnnnnnnnnnnnnnnnnnnnnnnnnnagcccccaaagtggcacttctgagttcctgctgatgttacaagggaccacacttttgagaatctgtgctttaagctaaggaaatattgcctggtgggttggctgcctggtattgggcatggaaatttgaattgctgattggtagatggtgtgtctggacttaactcacgtagtaaatactgctgatcaatacctaatcattccacatttattgagctccacctgtgtgtatgtgtacccaagcacacatgtgtgaagggctatagccaaagtatttttactagcctgtatgaaatcactagtccttatttttaaaggtctatggtttcttggaagtagtttgattgttgagagagacctttgatctgcagtgtaaatctaccagtcatgggccagaagggcaaaagcccagctttctctttggaaagactcaggctgtggtttgttgatggccaggttttcctcaggctccaacaactgtgcttataccaagcagatcctcatcctccatataatcatctttgttattcgtgggggtttaattacattacaagtggccaaaacccctgttctcagtgaagaaccacattggatttgtattctgttcagttgtagtctacactgcagtcttattcctggttcaaactacctctttaaattgatttgtcttgtgctggtctgttaaatcctgccctccttggtgctagatccagttgtgcctcacggcagaggaaacaaaacacagctatcctgt

SEQ ID NO: 188302 - DNA, 1357 bp, Homo Sapiens
  misc_feature (203)..(500): n is a, c, g, or t
  misc_feature (872)..(949): n is a, c, g, or t
ttggcatgtagctttttgttcaatgacttgatcatctgcttcctttttgaatttttaacagatagtaagtaaatttggtggttttttcccctgggtcagtgatggaaaggggttaacttcagccaggattgatggcagctgagggaaattcttgcccaactaaacccagaactcaaacttaacattagaaaataaggtccagnnnnnnnnnnnnnnnnnnnnnnnnnnnnnnnnnnnnnnnnnnnnnnnnnnnnnnnnnnnnnnnnnnnnnnnnnnnnnnnnnnnnnnnnnnnnnnnnnnnnnnnnnnnnnnnnnnnnnnnnnnnnnnnnnnnnnnnnnnnnnnnnnnnnnnnnnnnnnnnnnnnnnnnnnnnnnnnnnnnnnnnnnnnnnnnnnnnnnnnnnnnnnnnnnnnnnnnnnnnnnnnnnnnnnnnnnnnnnnnnnnnnnnnnnnnnnnnnnnnnnnnnnnnnnnnnnnnnnnnnnnnnnnnnnnnnnnnnnngaaggtccagcttttggattcaatgagtgggaaatacattgtgcctttctctagatgtgatacgttataccaaaatctttgtagtgtgcagagcggtggtttgagactaaatacaggcttagaacttgcagagtgtgtattcttggatggctgatgcatcgacttgcattcccacttaacactttgattagcatgaacttgccaatcaaaaaatgacaatcaatttgagaaaatagaaatagatatttttaaataaaaccattcacagtttactttgtcttgataccttggtttgtcccagctgaagtgaagcaagagagtttgaattaatttttccattataatgttttcgcatgtctgcctctaaaactnnnnnnnnnnnnnnnnnnnnnnnnnnnnnnnnnnnnnnnnnnnnnnnnnnnnnnnnnnnnnnnnnnnnnnnnnnnnnnagcccccaaagtggcacttctgagttcctgctgatgttacaagggaccacacttttgagaatctgtgctttaagctaaggaaatattgcctggtgggttggctgcctggtattgggcatggaaatttgaattgctgattggtagatggtgtgtctggacttaactcacgtagtaaatactgctgatcaatacctaatcattccacatttattgagctccacctgtgtgtatgtgtacccaagcacacatgtgtgaagggctatagccaaagtatttttactagcctgtatgaaatcactagtccttatttttaaaggtctatggtttcttggaagtagtttgattgttgagagagacctttgatctgcagtgtaaatctaccagtcatgggccagaaggcaaaagccc

SEQ ID NO: 188303 - DNA, 1860 bp, Homo Sapiens
ttggctctctgcccgactctctaatggaagcttcagtgcaccatcactcaccaactccagaggctcagtgcatacagtttcatttctactgcaaattggcctcacacgggagagtgttaccattgaagcccaggaactgtctttatctgctgtcaaggatcttgtgtgctccatagtttatcaaaagtttccagagtgtggattctttggcatgtatgacaaaattcttctctttcgccatgacatgaactcagaaaacattttgcagctgattacctcagcagatgaaatacatgaaggagacctagtggaagtggttctttcagctttagccacagtagaagacttccagattcgtccacatactctctatgtacattcttacaaagctcctactttctgtgattactgtggtgagatgctgtggggattggtacgtcaaggactgaaatgtgaaggctgtggattaaattaccataaacgatgtgccttcaagattccaaataactgtagtggagtaagaaagagacgtctgtcaaatgtatctttaccaggacccggcctctcagttccaagacccctacagcctgaatatgtagcccttcccagtgaagagtcacatgtccaccaggaaccaagtaagagaattccttcttggagtggtcgcccaatctggatggaaaagatggtaatgtgcagagtgaaagttccacacacatttgctgttcactcttacacccgtcccacgatatgtcagtactgcaagcggttactgaaaggcctctttcgccaaggaatgcagtgtaaagattgcaaattcaactgccataaacgctgtgcatcaaaagtaccaagagactgccttggagaggttactttcaatggagaaccttccagtctgggaacagatacagatataccaatggatattgacaataatgacataaatagtgatagtagtcggggtttggatgacacagaagagccatcacccccagaagataagatgttcttcttggatccatctgatctcgatgtggaaagagatgaagaagccgttaaaacaatcagtccatcaacaagcaataatattccgctaatgagggttgtacaatccatcaagcacacaaagaggaagagcagcacaatggtgaaggaagggtggatggtccattacaccagcagggataacctgagaaagaggcattattggagacttgacagcaaatgtctaacattatttcagaatgaatctggatcaaagtattataaggaaattccactttcagaaattctccgcatatcttcaccacgagatttcacaaacatttcacaaggcagcaatccacactgttttgaaatcattactgatactatggtatacttcgttggtgagaacaatggggacagctctcataatcctgttcttgctgccactggagttggacttgatgtagcacagagctgggaaaaagcaattcgccaagccctcatgcctgttactcctcaagcaagtgtttgcacttctccagggcaagggaaagatcacaaagatttgtctacaagtatctctgtatctaattgtcagattcaggagaatgtggatatcagtactgtttaccagatctttgcagatgaggtgcttggttcaggccagtttggcatcgtttatggaggaaaacatagaaagactgggagggatgtggctattaaagtaattgataagatgagattccccacaaaacaagaaagtcaactccgtaatgaagtggctattttacagaatttgcaccatcctgggattgtaaacctggaatgtatgtttgaaaccccagaacgagtctttgtagtaatggaaaa

SEQ ID NO: 188304 - DNA, 1109 bp, Homo Sapiens
ttggtgacaatgatgatccgtgtcagtgtctacccattcaccctcatccgcacccggttgcaagttcagaaggggaagagcctctaccatgggaccttcgatgccttcatcaagatcctgcgagcagatggtatcactggcctctaccgagggttcctggtcaataccttcaccctcatctctggccagtgttatgtcaccacttatgagctcacccggaagtttgtagctgactacagccagagtaacacagtcaaatcactggtggctggtggctcagcctcccttgtggcccagagcatcacagtgcccattgatgtagtctcccagcacctgatgatgcaacgcaagggtgagaaaatgggccgctttcaggtgcgggggaacccagagggacaaggggtagttgcctttggccaaaccaaggacatcatcaggcagatcctgcaggctgatggacttcgcggcttctatcgaggctatgtggcttcactgcttacctatatcccaaacagtgctgtctggtggcccttctatcacttctatgcagagcagctctcctacctgtgtcctaaggagtgccctcacattgtctttcaagctgtctcggggcccctggctgcagccactgcctccatcctcaccaatcccatggatgtcatacgaacccgtgtgcaggttgagggcaagaactccatcatcctgaccttcagacagctgatggcagaagaagggccttggggcctcatgaagggcctctcggccagaatcatctcagccacaccttccaccattgtcattgtggtgggctatgagagcctcaagaaactcagcctccgacctgagctggtggactcgagacactggtaaccagtggtggggagagaagcctgctgttttccacactaccgtgggtcacgggcagagtggagaggacagcaccctctccaggtgctcccaccacacacccagccctgccctgggccaagtggcctatctgggatagggatagagactttgaactgctcttgctgaagaggctccacgcctggatcccttgccccactatttaaaattctcttctgagctgggctccctcactcagtccc

SEQ ID NO: 188305 - DNA, 1379 bp, Homo Sapiens
  misc_feature (571)..(621): n is a, c, g, or t
  misc_feature (804)..(835): n is a, c, g, or t
  misc_feature (1040)..(1050): n is a, c, g, or t
  misc_feature (1161)..(1171): n is a, c, g, or t
  misc_feature (1260)..(1268): n is a, c, g, or t
ttggctcgtgtaaaatcggagagcaggtcaggatctcgtagtccatcaagggtttccaaacactctgaatcccattctcgatcaagatcaaaatccaggtcgaggtcaaggagacattctcatagacgttacactcgatccagatcccactctcactctcataggagacgatctcgaagtagatcatatacaccagaataccggcggcgaaggagccgaagccattctccaatgtctaaccggagaagacatactggcagcagggcaaatccagatcccaacacttgccttggagtgtttggcctcagtttgtacacaacagagagggatcttcgtgaagtattttctcgatatggaccattgagtggtgtcaatgtggtttatgatcagcgaactgggcgatctcgaggatttgcttttgtgtattttgagagaatagatgactcaaaggaggctatggaaagggcaaatggaatggagctggatggtagaagaattcgggtggattattctataaccaagagagcgcacacaccaacaccaggcatctacatgggcagaccaactcatnnnnnnnnnnnnnnnnnnnnnnnnnnnnnnnnnnnnnnnnnnnnnnnnnnnagacgtcgagattcttactatgatagaggatatgatcgtgggtatgacagatatgaagactatgattaccgatacagaagacgatcaccttctccttattatagtcgatatagatcacgatcaagatctcgttcctacagcccaagacgctattgataacggaatggttgcaattaaggacannnnnnnnnnnnnnnnnnnnnnnnnnnnnnnnaattctgagatttccccaagctgtggattcttcctactccttaagaaaaaaactttggtttatttagcatctacacttttgtcagttgtgttgctgttttccacccattttattatactcttaaaagatgtaattgttgtcattttgaacagttaaacatcttgagtataaaaagaaccccaatgttatgttatgctttgtaaannnnnnnnnnngcttttacctaaataaacttctagctaatcaaataaggaaagaaactgtctttttaaagcttcttttgtgttagatactgtattagagatctgcatttatcatgagttccnnnnnnnnnnnaactttatttttgggaaagtaacacatgaagtagttcagtcatgtcaggtttgtctggggtggaatggaacagtcaggtagttgaaagnnnnnnnnnagagatgaaaagcttgtgaactcctgtaaaacatgctgtatttgaaatacatctgttaaaacttaaaaactaagtgtgattttttttgttggtggttaagttattgaagtt

SEQ ID NO: 188306 - DNA, 926 bp, Homo Sapiens
ttggcttaaacttaaacatcccaatcctgagcagtttggggtccagcgccccatcagagagccatccctcagacttccagcgtggccctactagcacctcaatcgacaacattgatggaacccctgtacgggatgaacggagtgggacacccacccaggatgagatgatggacaagcccacatccagcagtgtagatactatgtccctgctttctaagatcattagccctggttcctcaacacccagcagtacaagatcaccaccccctgggagagatgaaagctacccccgagagctctccaattctgtatctacatatcgaccctttggtctgggcagtgaatctccctataagcagccttctgatggaatggagagaccatcttccctgatggactcttcacaggaaaagttctacccagatacttctttccaagaagatgaggattaccgagattttgagtattcagggcctccaccctctgccatgatgaacctagagaagaaaccagccaaatctatcctgaaatcaagcaagctgtctgataccaccgagtaccagccaattctgtccagttatagccacagagcccaagaatttggggtaaagtctgccttccctccatctgtaagggccctcctggactctagtgagaactgtgaccgtctctcatcttcccctgggctatttggtgccttcagcgtaagagggaatgaacctgggtctgaccggtcaccatcaccgagtaagaatgattcatttttcacccctgactccaaccacaatagcttgtctcaatctaccactgggcatctcagtttgccacagaagcagtacccagactctcctcacccagtcccacatcgttcccttttctctccgcagaacacccttgccgctctcacgggttcacccacccacgtc

SEQ ID NO: 188307 - DNA, 1197 bp, Homo Sapiens
ttgggtcccagactgcgccgaagcttcatgagacctctcctcgtctgtgcacggacgagtggccgactctggagcccaggctgttgcttcccagactggtggtgaatcctccatagtctgggacaaatatggccctgaaggctccatgagcagacgagaaggctggacttcgcaactgggtcaccttagatccggaactagagaatgacaccgttgtttccgggaggaaaaagaaaaagcgcttgacccggaagctgcgtgtcccatccccgcgcctgcgtctctgactggggtgaggccgcagcggactgccctttcccaagatggcgtcgaagataggttcgagacggtggatgttgcagctgatcatgcagttgggttcggtgctgctcacacgctgccccttttggggctgcttcagccagctcatgctgtacgctgagagggctgaggcacgccggaagcccgacatcccagtgccttacctgtatttcgacatgggggcagccgtgctgtgcgctagtttcatgtcctttggcgtgaagcggcgctggttcgcgctgggggccgcactccaattggccattagcacctacgccgcctacatcgggggctacgtccactacggggactggctgaaggtccgtatgtactcgcgcacagttgccatcatcggcggctttcttgtgttggccagcggtgctggggagctgtaccgccggaaacctcgcagccgctccctgcagtccaccggccaggtgttcctgggtatctacctcatctgtgtggcctactcactgcagcacagcaaggaggaccggctggcgtatctgaaccatctcccaggaggggagctgatgatccagctgttcttcgtgctgtatggcatcctggccctggcctttctgtcaggctactacgtgaccctcgctgcccagatcctggctgtactgctgccccctgtcatgctgctcattgatggcaatgttgcttactggcacaacacgcggcgtgttgagttctggaaccagatgaagctccttggagagagtgtgggcatcttcggaactgctgtcatcctggccactgatggctgagttttatggcaagaggctgagatgggcacagggagccactgagggtcaccctgccttcctccttgctggcccagctgctgtttatttatgctttttggtc

SEQ ID NO: 188308 - DNA, 931 bp, Homo Sapiens
gtacaaaaaaagttgggtaaaccctgtgtcttgggtctgtagttcaaaagtcagaaatgattctaatttaaacaaaaagatactaaatatacagaagttaaattcgaactagccacagaatcatttgtttttatgtcagaatttgcaaagagtggagtggacaaagctctgtatggaagactgaacaactgtaaatagatgatatccaaacttaatttggctaggacttcaattttaaaaatcagtgtacctaggcagtgcacagcacgaaataagtggcccttgcagcttccccgtttaacccactgtgctatagttgcgggtggaacagtcagcctttctagtagtttatgatattgccctctttgtattcccattttccacagttttttccgcagacttctttctgcaaattattcagcctccaaatgcaaatgaatgatataaaaataagtagggaacatggcagagagtggtgcttcccagcctcacaatgtgggaatttgacataggatgagagtcagagtataggtttaaaagataaaatctttagttaataattttgtatttatttattctagatgtatgtatctgaggaaagaaatctggtatttttgctttccaataaaggggatcaaagtaatggtttttctctcagttctctaagctggtctatgttatagctctagcagtatggaaatgtgctttaaaatatgcttaccttttgaatgatcatggctatatgttgttgagatatttgaaacttaccttgttttcacttgtgcactgtgaatgaactttgtattatttttttaaaaccttcacattacgtgtagatattattgcaacttatattttgcctgagcttgatcaaaggtcatttgtgtagatgagtaattaaaaaatatttaaatcacattataaatctatt

SEQ ID NO: 188309 - DNA, 2371 bp, Homo Sapiens
  misc_feature (1725)..(1742): n is a, c, g, or t
ttggggattaacatcccttatttatgttgtactaaagtgacaaatcggaataatataattggtatggccattaggttcagtccttgaagataagaaacttgttctctgtttgttgtcttatttgtggtggcactcgtttaatggattaactgaggttgctcaatgttcagtttcttttccagaaatacaatgctaggtgttttgaaataaaacttatatagcaattgtttaaagttatcaattgtatataaaatcacagtagcctgctaaatcattgtatgtgtctgtagtattctattcccagaaactatttgaccatgataattcagtttatattcaccacatgaaagaaaaatgggtaacagaagaacccctaaaacaggttaatttggattgtaacgttcagtgaaagaaatttcaacccttcatagccagcgaagaaatttgccttggaagccaagtcagtaccagcttacctatttgattcagttgctgttttctcactctctatatccatttgaaattgatttattttagatgttgtatacttacgttaggctttctgttaatagtggtttttctcctgttgacagagccaccggattatgacacaggatgaggaagattaaggataatcaattgactaatttcatttagaatattatcaaacatttcaactaggtatcagaaaaaggctttctttcataagactattttaaatagaaattatttcaacaattaaagtaatgttgaccatccccctctcagctgaataaagaaaaatttagttcaatttattgcaatttaattacaatactaccttcacaacattttcatgtgttttaaataaatattttttaattggctaaaggacattcaagcaaagaaatgctttctttacttaaaatgtctatctcatttgctgctttttcactaagcctttactttgttaataaaagtgtccattgtgtgatgtttttgattttacagtttgctaaatcttattttcttggagttgctttttggtaacagccccattgctactccccattttattgttttacatcaatgcatgcttcgttgtgatccctcaagatgtaacacttggtatgctcggttgaggatatgaaaaaatacttccgaaaccaggaattcagtgtatgtttgttttatactgtttgataagaaaagtaggtccagccttaagcagcacagatgcgctggtagatgcatagtcaggaactttttttatttcttttaggtctagggacaggagtgaatagaaagggaggagagctctattatgttctatacacagattaggagatgaccttactgggtacacccctctaaccagtgcttacaggttaatgcatgttaatgaatatttttgcagttgtaaagcataacaattacaactacacatctatttctaaagaataaaacaggaccatatttatttacttctgtcaactatagaaagaaagaccttcagctgtatttccacagatttctcccaaggaaaaggctaatattagtcactactgttatcacatccctttgtataagttttaaaaagagatggagggagatcttcatttctttgaggagatcagtattgtaacgtatgtgaatagatgataacaattaatattactaaaagtcccacatgagagtcctgacgccctctccatgccccacagtaatgtggcttctttcatgggnnnnnnnnnnnnnnnnnnagctgatctcatcctaagcatgctttatttttccttgaaagctaggtatttatcaactgcagatgttattgaaagaaaataaaattcagtctcaagagtaaaccctgtgtcttgtgtctgtagttcaaaagtcagaaatgattctaatttaaacaaaaagatattaaatatacagaagttaaattcgaactagccacagaatcatttgtttttatgtcagaatttgcaaagagtggagtggacaaagctctgtatggaagactgaacaactgtaaatagatgatatccaaacttaatttggctaggacttcaattttaaaaatcagtgtacctaggcagtgcacagcacgaaataagtggcccttgcagcttccccgtttaacccactgtgctatagttgcgggtggaacagtcagcctttctagtagtttatgatattgccctctttgtattcccattttccacagttttttccgcagacttctttctgcaaattattcagcctccaaatgcaaatgaatgatataaaaattaattagggaacatggcagagagtggtgcttcccagcctcacaatgtgggaatttgacattaggatgagagtcagagtataggtttaaaagataaaa

SEQ ID NO: 188310 - DNA, 2010 bp, Homo Sapiens
ttggatggaagtgcggaagaaggagatcgaagagctccaaagccaagcccaggccctgagtcaggaagggaagagcaccgacgaggtagacagcaagcgcctcaccgtgcagaccaagttcatggagttgctggagcccttgaacgagaggaagcataacctgctggcctccaaagagatccatcagttcaacagggatgtggaggacgagatcttgtgggttggagagaggatgcctttggcaacttccacggatcatggccacaacctccagactgtgcagctgttaataaagaaaaatcagaccctccagaaagaaatccaggggcaccagcctcgcattgacgacatctttgagaggagccaaaacatcgtcactgacagcagcagcctcagcgctgaggccatcagacagaggcttgccgacctgaagcagctgtggggtctcctcattgaggagacagagaaacgccacaggcggctggaggaggcgcacagggcccagcagtactactttgacgctgctgaggccgaagcctggatgagcgagcaggagctgtacatgatgtcagaggagaaggccaaggatgagcagagtgctgtctccatgttgaagaagcaccagatcttagaacaagctgtggaggactatgcagagaccgtgcatcagctctccaagaccagccgggccctggtggccgacagccatcctgaaagtgagcgcattagcatgcggcagtccaaagtggataaactgtacgctggtctgaaagaccttgctgaagagagaagaggcaagctggatgagagacacaggttattccagctcaaccgggaggtggacgacctggagcagtggatcgctgagagggaggtggtcgcagggtcccatgaactgggacaggactatgagcatgtcacgatgttacaagaacgattccgggagtttgcccgagacaccgggaacattgggcaggagcgcgtggacacggtcaatcacctggcagatgagctcatcaactctggacattcagatgccgccaccatcgctgaatggaaggatggcctcaatgaagcctgggccgacctcctggagctcattgacacaagaacacagattcttgccgcttcctatgaactgcacaagttttaccacgatgccaaggagatctttgggcgtatacaggacaaacacaagaaactccctgaggagcttgggagagatcagaacacagtggagaccttacagagaatgcacactacatttgagcatgacatccaggctctgggcacacaggtgaggcagctgcaggaggatgcagcccgcctccaggcggcctatgcgggtgacaaggccgacgatatccagaagcgcgagaacgaggtcctggaagcctggaagtccctcctggacgcctgtgagagccgcagggtgcggctggtggacacaggggacaagttccgcttcttcagcatggtgcgcgacctcatgctctggatggaggatgtcatccggcagatcgaggcccaggagaagccaagggatgtatcatctgttgaactcttaatgaataatcatcaaggcatcaaagctgaaattgatgcacgtaatgacagtttcacaacctgcattgaacttgggaaatccctgttggcgagaaaacactatgcatctgaggagatcaaggaaaaattactgcagttgacggaaaagaggaaagaaatgatcgacaagtgggaagaccgatgggaatggttaagactgattctggaggtccatcagttctcaagagacgccagtgtggccgaggcctggctgcttggacaggagccgtacctatccagccgagagataggccagagcgtggacgaggtggagaagctcatcaagcgccacgaggcatttgaaaagtctgcagcaacctgggatgagaggttctctgccctggaaaggctgactacattggagttactggaagtgcgcagacagcaagaggaagaggagaggaa

SEQ ID NO: 188311 - DNA, 1089 bp, Homo Sapiens
gattcttgttagcttgtttagaaggtggaagagaaggtctcctttcaggctttgcagacacagacacactgctggagatgcttcctgttcgagacccgtaatcatcatcttcttcctcctcttctccatcatgattgaatttttttactttaacaactgaacttaccacaggcaactttctcttccgaaagttttcatcctccatactcattttctccgagttgtttctaaagaacggactatacgtttcttctaagctgttaagcacctctggttcacacaaacgtcctgtttcatatacccaactactctgcatatcaagctgcttggcagcatgaatactattctgctgctgttgaaattgcaacctgtttaaatgaacaccactatctgcatttctacttgcaggtggtcgataaatttcaatagaagggcgagaagaaccatatgtaagtgtcactgtaggttttttctgagataagggattctcctgcacaaagttgaggtcttcgtcaatgagatcatctggttctggcttaatatcaatcacatcttcagagggtgctggctccctcaaaggtttcactgttgacattagtcgggttgcagctccatcatcgtaagtctgtctgacatttgtggtttttgactcctgcgaacttgtagaaactctggaatctcttttttcaggtctcgcgctaggaatggcaagtggtggcactgcagcttcatgcctcctctcatctccccgactgaaattgctcttgtttgaaggcacgttactatcaaagatgttggtatcagaagacttcagactagagggttcagttgtaacagagcgaagtttatctaatacaccatgaagccatacggtgaatcgaattgtgttgttccctagaaacagggacagatcctctgtcatttggtcctgacttttcttgttggccaccatcaccataatgtaatcaggaagttcttcatcaacataagctcctaattcttgtaatttccccttaatggcactccggatcttgcggctgatctcggtgccgatctccatggctctgcggcgtgcgggaactcagccaa

SEQ ID NO: 188312 - DNA, 1671 bp, Homo Sapiens
  misc_feature (703)..(734): n is a, c, g, or t
ttgggttatatataattcctattctatgagaatttgttttatacctttgtgaattgaagagaacatacatgtcttgtgtgttttgtttttattgtttaggagaaaactgatgtggaaggaaccttatttgtttatacaaggtctgcttctccaaagcatggattcaccattatgaataggctgagcatggaaaataggacagaacctattactaaagacttggatttccaactccaggaccctttccttctctacagaaatgccagattgtccatctatggaatttggttttatgataaggaagaatgccaaagaattgcagagcttatgaaaaacctaactcagtatgaacagttgaaagcccatcagggaactggagcaggaatttccccagtgatcctcaattcaggagagggcaaagaagtagacattttacgaatgctcatcaaggccaaagacgaatacacaaagtgtaaaacctgttctgagccaaaaaagataaccagttcctctgccatctatgacaatccaaatctcatcaaaccaattccagtgaaacccagtgaaaaccagcaacagcgtatacctcagcccaaccagaccttagaccctgaaccccaacacttatccttgacagctctgtttgggaagcaggacaaagctacatgtcaggaaactgtggagcctccgcagactctccacnnnnnnnnnnnnnnnnnnnnnnnnnnnnnnnnagagaagcttccaattatgcagggggttgtacgctctctgtcctatgaggaacccagaagacactcaccccccattgagaagcagctctgtccagccattcagaaactcatggtcaggagcgcagacctccacccattgtcagagctgcctgaaaaccggccttgtgaaaatggcagtacccattctgcgggagaattttttacaggacctgtccagccagggtctcctcacaacattggaacttctcgtggtgtacaaaatgcttccagaactcagaacctgttcgagaaacttcagagtaccccaggggcagcaaacaagtgtgaccctagtacaccagcacctgccagctcagctgccctgaaccgcagcagagctcccacttctgtcacccctgtggctccaggaaagggtctggctcagccaccacaggcctatttcaatggctcccttccacctcagacagtaggacatcaggctcatggaagagaacagtccacactcccaagacaaacactccccatctctggtagtcagactggcagctctggagtgatctcccctcaagagttactgaagaagcttcagattgtacagcaggagcagcagctgcatgcctctaaccggccagccttggccgctaagtttcctgtgctcgctcagagctctggaacagggaaacccttggaatcctggatcaacaagacacccaacacagaacagcagactcctcttttccaggtcatctcacctcagcgcatccctgctacagcagctccgtctctgcttatgtcccccatggtgttcgcacaacccacctccgtcccgccaaagaaagggagagcggcctcttgcctgtgggaggccaggagccacctgctgctgccaccagcctcctcctgcccatacagagcccggagccctccgtgatcacca

SEQ ID NO: 188313 - DNA, 989 bp, Homo Sapiens
ttggcttctccttagagccccctccgtcaacagtcattcttgaactctttgtgtccattactcccctctcatccagttaaccctggtgtctgatactgcattgcctagcgctcttccctcattgctctcctattccctccccagcgtggtgatggtggatgaggcacacgaaaggaccctacacacagacattctctttggattgatcaaggatgttgctcgcttccgacctgagctcaaggtcctggtggcttcagccacaatggacactgcccgtttttccaccttctttgatgacgcccctgtgtttcgaatccccggacgcaggtttcctgtggacatcttctacaccaaggctccagaggctgactacttggaagcttgtgtagtatctgtgttgcagatccatgtgacccagccccctggggatatcctggtgttcctgacaggacaggaggagattgaggctgcctgtgagatgctccaggatcgctgccgccgcctgggctccaaaatccgggagctcctggtgctgcccatttatgccaatctgccctctgacatgcaggcccgtatcttccagcccacaccacctggggcacgaaaggtggttgtggcaacgaacattgctgagacatcactcaccattgagggcatcatttatgtgctggatccagggttctgtaagcagaagagctacaacccccgcacaggcatggaatcgctcactgtcacaccctgcagcaaggcctcagccaatcagcgagctggcagggcaggtcgggtggctgcagggaagtgcttccgcctgtataccgcctgggcctatcagcacgagcttgaggaaaccacagtgcctgagatccagaggaccagcttgggcaatgtcgtgttgctgctcaagagcttagggatccatgacctaatgcactttgatttcctggaccctccaccatatgagaccactgctgctggctttggagcagctg

SEQ ID NO: 188314 - DNA, 1595 bp, Homo Sapiens
gcatctaacccatcattcccactgaatattctctctcacatatacagcataatcatcattacccaagaaaaccagctcggttttgtacgtctggctctccgtcacaacagcaccagtagacatggagtaggcggcatcatccatgtcctccaccacctcctcgtcagaatactcgtcggacaccgtgtctgcatctgagagctccgtgacctgtatgtcggagtggtccagcagccacccgaccaaggcttccacaccaggcaagccggacgcattcccggaagcaccagtgagagacttcagggcaaactcgatgttccttctgggaaatcccatctccatgagctgcaccacgatcggcagagcgggaacgggtgactgcttgcgcctcttcactctggcagggcggatgtgctgcacgttgacaggcgtggtggcctcactggagctgcagtcttcaaatcctgggctcgaagggtgagtggactccacaacggccagtgcagcagtctcaagttcctgtttatcaaatatggccttcacaggagacggctgggtggccgaggccagcagctgctgcaagaggatcatggggggctgcggcccttcaggagacatgtccccaaggtcaggtgataccactgctccatcattgttttcatgtttccacagcaataaacatatacagctagccctccgtatccatgggttctgtgtgaacagttccagtctcctgaacagctggctgagacaggatctgccgcagtttatcctggtgggagaacagcgcccgacctgctttcaggatgtatagcttcaactgctggcgccgcagcaggtccaggtccacttgtcctgcaaaggcctgtttagtcgatttctttattttgtgcttttctaacttgcttccagcgaggttcaccaactgagcccagacagacagcatgggctctgtgaagggcaggttgttcacattaaaggccacggcagggagtggtttcagctgattcaatgggcaaacgcgacacgtccgcatgtcagagaactgcacggtgattttgcccttcagggtgatgcgagtcatggtgacttctccaaagtcatcgtgcacaacttggccacccaggcgcaggcgaccatcgatgcctccaaccacagccaggaccgccatgaggccccccacttcagggttctcggagtcggggaagtagtcctctaactgggcctctgagtaacggcacgtcagaggagcacatagtgagcaagctccccaagaagtcaaacagcttctccacgaggcatttcatgtccctcgccctttcggtcttgtcccatgacggaaggactgcttgcaacaaatgcacagctaagatctgcctctgcagcgaggtggcagtgaagggtgcgtgcccttccacgaccttcatgagcagcgtgatccactgcagggagctgagggcgccgcacacctgcagcgtgagagcgatgctctgcacaaaccccagcgtgcaccagctccggtgttgctccctgtacaccagcctgtttggagaagatttgcagcagtccgcataaagtcttggtggcttcaccaa

SEQ ID NO: 188315 - DNA, 1412 bp, Homo Sapiens
  misc_feature (295)..(303): n is a, c, g, or t
  misc_feature (1043)..(1051): n is a, c, g, or t
  misc_feature (1211)..(1223): n is a, c, g, or t
atcaaagggaaaaaactaaaaatacagatttatacccaaatggataacgattatataatcattcttactccaaaaagaactgtattaggtataaacaattataaacttcagataaataggtcatattctataaatactaatttgttatatacaacacataatcttctacaaatactagttttatgttattacttttcaaaatatttcaaactagttatttttttccttgtgcttcaattttctcatttgtaatttagggacttacccatttttatagatttactagaaattaagnnnnnnnnngctgacaagaatgtcaaatcaggcacactgggatttattcctttaaaaatacagtcatttttaatcttcctaataggtaatggtctaaagtcagagtccagttacaacatggagataagacacactgccaattggcaactcctcctctggcagtttttttctccaatgtttgagtagatcattgtttctttggtttgaacaccagataaaatgtgtagttggttggatttaggacccatattgtatgacaaatacccatctttaaacaccaggcttagacacagctcaggctatctacatgcttagagctcattggaaaggctgagctccaccttgagttccatcgaaggctcccacagagtggaatccaccctgtttaaatcacttttctctctcctttttttctaattattgctgagtgtatacttaaaattgcataagaatgtacacagtcaaatatatatagtatgctaaagtagaacagaaaggagattcactgccatatacaccaggagcacattcactgttatttttctctctgctaacaactctttaagggcagctattttggggacagagacataggctaggttcagaaaagctactaagtatgcctactcatattaaaagaaagcaaatgaatctttaggtaaggagacatttattaggtcatatccttatactaattattaaatttagacaaattttttataagctgttaatttagaactagtcttgtnnnnnnnnnttcttcaaacctttcatactactttatgcttcctgaatacagtgaaaactgcagagctggagagatggctagcaaaaaaatagatcatctcatttagagtagatacacagcaatactagctcaggtcaacatgttacttacttccctgttactgagaccnnnnnnnnnnnnnttatcgggacttacaatcttatgatacaaagaaaactgtaactatcaaattatagagtaaaaattcaaagaataaaaaataaccttcagtgttttagggaggtcatattttgctaacacaatgaaataagataatcaggaaagaagcgtctgcacttgctgcggcgatcggtgaagaatgttctcccaa

SEQ ID NO: 188316 - DNA, 904 bp, Homo Sapiens
ctgctgttttgaaagttttctcttcttccattaaccctcggatctgctcatctttctctttcaaaaggtctgcagtttcactactatttaatctagtggcaagttcttcttttatgtttttgatttcctttttagcagcatctctctctttgcaggctagttgaactttcttttctgcttctgcaattctttgagtaaactcatctttcaaggaagaaatgctactgctttcttctttcactctgaacatttcatctttcaggttatcaaaagcttcttctagaagtgctttttccttactaagagataataactgagcctcccttttttccagcttttcattcagaaattcaactgtcttgcaaacatcttccttctcagaaagtgcttctggctgactttcagcaggttcacactgctcagccaccttgtctaacacagtctgtccttcatttattggtgtggaagaaaccaagatatcaggctgttcacagttaacaggagttgcacttcgtccactttcttccatttctgcttcctcagtgggtataactaatgtttcatttacttcttcagattttccttcagcagattcaactgttttagactttggagttgaagaattaactataataggcactaaagcatatcccttgcctgacaattcatcatctgaattgatttcacttacactccggctatctaatgactgtacactaaatgagtctattctttcaaaagcatcagatgaacagcaactctcagtgagtttttggaaatcatctaaacgattatattcaggacaagcagatgcagagagaagctgaaaagatgtctgcatcaagtgaagacttgattttgaatctgtagtctcttgtctcgagctcgctgagctctcacccaa

SEQ ID NO: 188317 - DNA, 1183 bp, Homo Sapiens
acaaaaaagttggcaataagtaaactatattgaatattagaatgtggcagatgctatggaaaaagagtcaagacaagtaaagacgattgttcagggtaccagttgcaattttaaatatggtcgtcagagcaggcctcactgaggtgacatgacatttaagcataaacatggaggaggaggagtaagcctgagctgtcttaggcttccggggcagccaagccatttccgtggcactaggagcctggtgtttccgattccacctttgataactgcattttctctaagatatgggagggaagtttttctcctattgtttttaagtattaactccagctagtccagccttgttatagtgttacctaatctttatagcaaatatatgaggtaccggtaacattatgcccatttctcacagaggcactactaggtgaaggagtttgcctgacgttatacaaccaggaagtagctgagcctagatcccttccacccaccccatggccctgctcatgttccacctgcctctaatttacctcttttccttctagaccagcattctcgaaattggaggactcctttgaggccctctccctgtacctgggggagctgggcatcccgctgcctgcagagctggaggagttggaccacactgtgagcatgcagtacggcctgacccgggactcacctccctagccctggcccagccccctgcaggggggtgttctacagccagcattgcccctctgtgccccattcctgctgtgagcagggccgtccgggcttcctgtggattggcggaatgtttagaagcagaacaagccattcctattacctccccaggaggcaagtgggcgcagcaccagggaaatgtatctccacaggttctggggcctagttactgtctgtaaatccaatacttgcctgaaagctgtgaagaagaaaaaaacccctggcctttgggccaggaggaatctgttactcgaatccacccaggaactccctggcagtggattgtgggaggctcttgcttacactaatcagcgtgacctggacctgctgggcagggatcccagggtgaacctgcctgtgaactctgaagccactagtccagctggggtgcaggaggacttcaagtgtgtggacgaaagaaagactgatggctcaaagggtgtgaaaaagtcagtga

SEQ ID NO: 188318 - DNA, 984 bp, Homo Sapiens
ttggtgtatgcagatcctgactgccttccccgaacactggactttggcctcaacgtgaagcttttctgggagaagtttgttcccacagattgtcccccggccttcttcccgctggccgccatctgctgcagactggagcctgagagcagaccagcattctcgaaattggaggactcctttgaggccctctccctgtacctgggggagctgggcatcccgctgcctgcagagctggaggagttggaccacactgtgagcatgcagtacggcctgacccgggactcacctccctagccctggcccagccccctgcaggggggtgttctacagccagcattgcccctctgtgccccattcctgctgtgagcagggccgtccgggcttcctgtggattggcggaatgtttagaagcagaacaagccattcctattacctccccaggaggcaagtgggcgcagcaccagggaaatgtatctccacaggttctggggcctagttactgtctgtaaatccaatacttgcctgaaagctgtgaagaagaaaaaaacccctggcctttgggccaggaggaatctgttactcgaatccacccaggaactccctggcagtggattgtgggaggctcttgcttacactaatcagcgtgacctggacctgctgggcaggatcccagggtgaacctgcctgtgaactctgaagtcactagtccagctgggtgcaggaggacttcaagtgtgtggacgaaagaaagactgatggctcaaagggtgtgaaaaagtcagtgatgctccccctttctactccagatcctgtccttcctggagcaaggttgagggagtaggttttgaagagtcccttaatatgtggtggaacagggccggagttagagaaagggctggcttctgtttacctgctcactggctctagccagcccaggacacactatctatgtgagaggaagccctccaccctcatgttttcaaa

SEQ ID NO: 188319 - DNA, 831 bp, Homo Sapiens
  misc_feature (184)..(279): n is a, c, g, or t
ttgggactcagtacttttgccttacgcagacccttattatgactatgaaattgagcggttttggcgtggcggacagtatgagaatttcagggtgcagtatacttaaacttattcgtatcatatttaccgagaaagggagcgggagcgagagagagagaacagactgcgcgagcgtgagcgggannnnnnnnnnnnnnnnnnnnnnnnnnnnnnnnnnnnnnnnnnnnnnnnnnnnnnnnnnnnnnnnnnnnnnnnnnnnnnnnnnnnnnnnnnnnnnnngtgggagcgtgagcgagccaagcgggacgagaaggaccggcagcaccgtgaccgcgaccgggagaaggagcgggagaaggagaaggggaagcccaagccccgctccccgcagccgccaagccgccaagctgagccaccaaagaaggaggctgccaccacggggccgcaggtgaagagagcagatgagtggaaggacccttggcgccgatccaagtctcccaagaagaaactcggggtgtcggtctccccgagccgggctcgaaggcgtcggaaaacatcagcctcgtcagcctctgcctctaattcctccaggtcgtcttcgcggtcatcgtcctactctggctccggctcctcccggtcgcgatcccggtcttcatcctacagctcctactccagccgctcttccagacacagctcgttctcaggaagccggtccaggtcccggtccttctcttcgtccccgtccccgtccccaacaccttcctcacatagaccttccatcagaaccaagggagagtcggctctgtcgctcgggaaagcaggagagaagtc

SEQ ID NO: 188320 - DNA, 766 bp, Homo Sapiens
ttggctgaggatgatgaggagaaaggcgaaggcactcccagggaggaggggaaggctggtgttcagagtgtgggagaaaaggaatccctggaggctgccaaggagaaaaagaaagaggacgatgatggagaaatcgatgatggggaaatagacgatgatgacctggaagaaggtgaagtgaaggaccccagtgacaggaaggtgaggcctcgtcccacctgccggttcttcatgaaagggaactgtacctggggaatgaattgtaggtttatacaccctggagtgaacgacaaggggaactactccctaatcaccaaagccgaccccttcccgcctaatggtgccccgcctctcggacctcacccgctgatgcccgccaacccttggggtgggccggtagttgatgaaattttgcctccaccccctccagagcccccaacagagagtgcctgggaacgaggactccggcatgcaaaggaggttttaaaaaaagcaactattcgaaaagaacaggagcctgattttgaagagaaaaggtttacggtgaccattggcgaagacgaacgggaatttgacaaagaaaatgaagtttttcgagattggaattctcggatcccgagagatgtcagagacacagtactcgagccttacgcagacccttattatgactatgaaattgagcggttttggcgtggcggacagtatgagaatttcagggtgcagtatacagaaacagagccgtatcataattaccgagaaagggagc

SEQ ID NO: 188321 - DNA, 1822 bp, Homo Sapiens
  misc_feature (455)..(763): n is a, c, g, or t
ttgggtttttaaaattttgtcttctctgtggatgacaggaggctacagcaattaactttaagcctccttttagagatatttttaaagcttgtttaaaatttttgtgcaattcatatattaaattgcacttacttgcatacgctcatattctagggttttttctctatttttagggtatcatagtaaatcattagtaaatgagtctgtagttactaaaccctaatggaataattattaatgaaagatttttgaaatataaaaaataaattaggcccaatccaagaaattgagtgagaaggaaacacttgttttattcacagaggtaaagtgtcttttcaatataaccagcaatttaggtggcatctataaaataaaaaatttctactgtggacatccccttttccaactttctacataatggctagttctgactactaagaaatgttaagaaatannnnnnnnnnnnnnnnnnnnnnnnnnnnnnnnnnnnnnnnnnnnnnnnnnnnnnnnnnnnnnnnnnnnnnnnnnnnnnnnnnnnnnnnnnnnnnnnnnnnnnnnnnnnnnnnnnnnnnnnnnnnnnnnnnnnnnnnnnnnnnnnnnnnnnnnnnnnnnnnnnnnnnnnnnnnnnnnnnnnnnnnnnnnnnnnnnnnnnnnnnnnnnnnnnnnnnnnnnnnnnnnnnnnnnnnnnnnnnnnnnnnnnnnnnnnnnnnnnnnnnnnnnnnnnnnnnnnnnnnnnnnnnnnnnnnnnnnnnnnnnnnnnnnngttattcttagtaaggaacttcttgtttaatagcatttttgtttattttaaaaagtgatcagaagtagtaaactatctttgaggaaatactgtaaccccagaatatttcctcttgacttctttttgtaacaaggataatttagggatttataaagttgtaaggatttcactgttttcggactgcctataataatagcacattaaccttcacataataagaaatctggacaagttcagttacacagtatgatgaatacttgaattaggaacattgtggaaaatttgctttagagaatcaaggcagtagtttggtatttggtgcttattaaaaatgtggtttgttttgaactggaagcaagttgaccaaggacttatgactaatgtgatgctaagttccacttggccccttttaaaaacgtgtatgtgccttttgaagatacacaaaacactgaggattttagttttgaaatcaaagactattaaaggagctgtacagaggtaaaaaaataaatgtggaacattattaacttattttgtgtctaggaacaatggattttgtatctgatttaaaatgccaacactgttttgtctctgttcattttttctgtgaggatacttaaggttattattcctgtctgtttcctgtactcccctagtcatgagcacttgaagtacaaggtgtctccccctaggtgcaattaggttgtttctttgtttttagtttcaattctatgtgcatagcaggaatgctccacaggaatggcttctgacaataatctgtcctgttgattttgttttccttgcccatgacttgaacaactgtgttttaaagtactgtagtctagtaggtaactttgtggcaaaattttcaatataatacattctgaaacaatagttgctgccttgcaaaggtaatctctcattttaaaattggacagtattaatgaacgggaaatatacaatttatttctattgagtggtagaactatatgtctggtcccttgctgctcttgtttagccactatcatagatatatttcaaatattgtactactcagtg

SEQ ID NO: 188322 - DNA, 1358 bp, Homo Sapiens
ttggcaatcccttctagctctgaaccctggacactaaagagggaagatcttgatcctttcaaacttcagaactctgaacacagacctacctagtgtgaagaaatgggagggagcaggatggagagcaggatgaagtcagcaggacttgcccccaagctctgaggggagggggaaagtgccatgtagatgtggaggaggggaagggaagaccaggcccagtcacaagaaggctggtcactgccttgtgggtgggtttggactaggctttcaggggtccaggtctgggattccctatcatgcaatcatccatccccttggtccctgctgtatatcaccctcaggaacgggaaaggatgagttacgtttattgccccatcccttcactgaatgtttacattaacaaacaccagagagcaaactgggcttcctacactgggccatgcagaggacaggccaagaaactccacatcataacagcctcctgatgcctgggcttggctggagctcacatgaggtgctttgatttcttctgcagactctcggtgatggatgctacaactgacttatcatctttgtctgaaagagcaaaggaagtattcgttatattaatgatgctggcgaccagggaaattccaaactgctggacttcctatgcaggaaaccaggagctggaccctgggacccttaatcttgggttggcagagtgtgaaggggcaagagctgccatttatctagcacttaatatttgccagacattgtgccaggcagttgtgtactgtctcatttaagcctcatagtcctataaagaagatgagaaaacaggctcaatgaggtagcttactaaggtcacatggctggtcagtggcagagccagggccctgggcccatttgctgtgcttacaagcagatttgagttatcagggatctctttagctgtggaatgaaagctggatagcacccacagtgccttccctggcctagttcttttacacagctcagcagcctctctggagatattgtctcagtgccagacacttagctaagcactcgagagacagagcaacaggacaaggtcctttccccaaagaaaggtatctataactggataaaaaaggtctgtaaccatggagaccacagcaatggagtgtcatggaaggttcaggagtagcagaaggtgagatgagaggtgggggagggggaaaccttcttggttttgggattttaccattgagaggaaagctgggggaaatttaagcaacagaaaagcaaggcaggccagctttgcatttaaagttcatgctgctagctgtgtggctatgaagacagtagacctggggaaggaataaaatgcttccccc

SEQ ID NO: 188323 - DNA, 925 bp, Homo Sapiens
ttggggacgcctgggtccgcttcagtgctcagagccaagcccgggagcggctgtgtagggccgcccagtatgcttgctctcttcttggccatgcgctgcagaggcatggagccagtcctgagttacagaaacagattcgacaactggagagccacctgagccttggaagaaagcttctacgcctgggtaactcagcagatgcccttgagtcagccaaaagagctgttcacctatcagatgttgtcctgagattctgcatcactgttagtcacctcaatcgagccttgtacttcgcctgtgacaatgtcctgtgggctggaaagtctggactggctccccgtgtggatcaggagaagtgggcccagcgttcattcaggtactatttgttttccctcatcatgaatttgagccgtgatgcttatgagattcgcctactgatggagcaagagtcttctgcttgtagccggcgactgaaaggttctggaggaggagtcccaggaggaagtgaaactgggggacttgggggaccagggactccaggaggaggtctgccccaactggctctgaaacttcggctgcaagtcctgctcctggctcgagtccttagaggtcatcccccacttctgctagacgtggtcagaaatgcctgtgatctcttcattcctctggacaaactaggcctctggcgctgtggccctgggattgtggggctttgtggcctcgtgtcctccatcctgtctattctcaccctaatctatccctggctacgactcaagccctgaccttccggtacaggataaggaggggacctgaattggtgagatggaatcttagatcgtcccccatgtgccagcctcattccgattctactctttggttaaagttagaaattcagagatttacgggtggaggagagctttgggga

SEQ ID NO: 188324 - DNA, 1352 bp, Homo Sapiens
tttgtacaaaaaagttggcctcggacagaaattttatgaataagcatcagaagccagtgctaacaggccagcggttcaaaactcggaaaagggatgaaaaagagaaattcgaacccacagtcttcagggatacacttgtccaggggcttaatgaggctggtgatgaccttgaagctgtagccaaatttctggactctacaggctcaagattagattatcgtcgctatgcagacacactcttcgatatcctggtggctggcagtatgcttgcccctggaggaacgcgcatagatgatggtgacaagaccaagatgaccaaccactgtgtgttttcagcaaatgaagatcatgaaaccatccgaaactatgctcaggtcttcaataaactcatcaggagatataagtatttggagaaggcatttgaagatgaaatgaaaaagcttctcctcttccttaaagccttttccgaaacagagcagacaaagttggcgatgctgtcggggattctgctgggcaatggcaccctgcccgccaccatcctcaccagtctcttcaccgacagcttagtcaaagaaggcattgcggcctcatttgctgtcaagcttttcaaagcatggatggcagaaaaagatgccaactctgttacctcgtctttgagaaaagccaacttagacaagaggctgcttgaactctttccagttaacagacagagtgtggatcattttgctaaatacttcactgacgcaggtcttaaggagctttccgacttcctccgagtccagcagtccctgggcaccaggaaggaactgcagaaggagctccaggagcgtctttctcaggaatgcccgatcaaggaggtggtgctttatgtcaaagaagaaatgaagaggaatgatcttccagaaacagcagtgattggtcttctgtggacatgtataatgaacgctgttgagtggaacaagaaggaagaacttgttgcagagcaggctctgaagcacctgaagcaatatgctcctcctccagaaggttcaggaatactgctacgacaacatccatttcatgaaagcctttcagaagattgtggttctcttttataaagctgatgttctgagcgaagaagcaatactgaaatggtataaggaagcacatgttgctaaaggcaaaagtgtttttcttgaccagatgaagaaatttgttgagtggttacaaaatgcagaagaagaatccgaatcggaaggtgaggaaaattaaatggctcaacaagcacaatacctaggttaccacacaccactttttgattgggaatgctgaaccatttgagaagagaaacttggcttctgttttcgcaaagg

SEQ ID NO: 188325 - DNA, 895 bp, Homo Sapiens
tacaaaaaagttgggaagtttcatccccagttaagcagagtccatccttgacttaaatcccttattacagcacaactgtgtatctaatcttacgatttaggagaatgttacctaggacattttgatgtgttaagttgaagaaaggtaactcgtgtatgaaccccgagccatttccctgttgtcctgaggaggaactccaggcctcccatcgtgtgccctaaggcctcctgcgtcctggagccctgcctcccactgcctgacttcctgccacacggttaatgctgcagcaacaccgactgcttcatcttccctgtgctccacgtggcttcctacctctctcgcctttgttcttgttgaagggtctcttctcagctaattaactctgaatcatggttcaagacaagcctcaggcatcatgtcaatgggtgtttccctcaagcttagttggcagcactctccacacttctgtgactcagtgattactgctattactatatttacttgcatatgtcagaatgatgtgatagactatctctgtcactatgctgttgggttcctgaggacagtgatcatatctgattgatttccatgtgtccactgtctagcacagggcaataaaaaatacacccctaaatctatgtgtaattggcatctctcttgctttgtcctttctatactgccattctaaaaattttcagctgttggctgttttttttgttgtttgttcattttgtatcagtataatctacgattctgttagaagtatcttctcagccctgctactgtctgctgctcctacttagaagttgcagcaatatcctgtgcacatccacgccctcctgtgtgccaccttacagctcatgcagaactgtctacttgatctggagggcattga

SEQ ID NO: 188326 - DNA, 1147 bp, Homo Sapiens
  misc_feature (84)..(99): n is a, c, g, or t
  misc_feature (843)..(900): n is a, c, g, or t
aataactgggggctattttatcagcttgcctattaaaggactatggtaagtataaaatcttaatggttgccagttagtaattcnnnnnnnnnnnnnnnnactgtaaacacaattttggccctatcaaaaacgatgaggaaaaaaaattgcactccaggattaggaggtgtgaaaaattttagcttttttgtcttatctgcgtgggtattgctgctttattttaaaaaatcctgcctaaagtaaacactttgttttaaaatgatacagtatcagattttgttagatgctagaaatggatttattctaaaatttggaactgtcgtacacattctatatgtaagatagcacacaagtagaaatatttaaaagcagtcttattcacagattgcagtaattctgtatttctactaagataatctgctttgtgccaaaacagtaatttccaaacttctgttcaccatgaaaaggcaatcttaaagttcattatgtaaaactaattataaacaggacccaatttatattcatagatcctctcaagtattatacaatttaaaaactcttgttccaaagtcctgtcttaactattgaaacaccttaatctgtggttactaatccagcaaattcaaggaaccaggctatgactaagaatttaggtggaattgatgtctgggcaattaaaataaatggcataagagcttaaaaaccaaagttgtgccagtggctttcaactagaggcagtaacctgtcattccagaggatgctgagaaatgtgtaggggcacttttttggttgtcatatttactaggggcttctgttggcatttaagcctaaagacactcaccnnnnnnnnnnnnnnnnnnnnnnnnnnnnnnnnnnnnnnnnnnnnnnnnnnnnnnnnnntattttatttcaagggatagggcagattaccattagaagcaaaattaaaagtacaagctgggcaaactgacagaatactagataggagagactaattcccaccttctaatttggctagtaaagtgcaataaaaggcattgataagttctgttagctcaccatagcacttgtaaatcaagaattaataattgaatcagatttaaaggctctgtcctgctatacatatttaaagcagaaaaaaagttac

SEQ ID NO: 188327 - DNA, 2351 bp, Homo Sapiens
ctttgtacaaaaaagttggtgttggatggctcctgaagtcatggaacaggtgagaggctatgacttcaaggctgacatgtggagttttggaataactgccattgaattagcaacaggagcagcgccttatcacaaatatcctcccatgaaagtgttaatgttgactttgcaaaatgatccacccactttggaaacaggggtagaggataaagaaatgatgaaaaagtacggcaagtcctttagaaaattactttcactgtgtcttcagaaagatccttccaaaaggcccacagcagcagaacttttaaaatgcaaattcttccagaaagccaagaacagagagtacctgattgagaagctgcttacaagaacaccagacatagcccaaagagccaaaaaggtaagaagagttcctgggtcaagtggtcaccttcataaaaccgaagacggggactgggagtggagtgacgacgagatggatgagaagagcgaagaagggaaagcagctttttctcaggaaaagtcacgaagagtaaaagaagaaaatccagagggcccacccaatgctaatgaagactacagagaagcttcttcttgtgccgtgaacctcgttttgagattaagaaactccagaaaggaacttaatgacatacgatttgagtttactccaggaagagatacagcagatggtgtatctcaggagctcttctctgctggcttggtggatggtcacgatgtagtatagtggctgctaatttacagaagattgtagatgatcccaaagctttaaaaacattgacatttaagttggcttctggctgtgatgggtcggagattcctgatgaagtgaagctgattgggtttgctcagttgagtgtcagctgatgtatgtcccttgatgtcaccctgatctgtcatgccccaccgccacccctactcccttcaaccctccctctttctgcccatttcctcccaccccctcactcccatttcctagcaaaatcagaagattgtgaagaggccggcttcaacaaaatgggataaaaaaataattttttaaaacttacaacactccgagttctgctttattctctagcaatccacagtacaagaacaagcaaatgccacagctgcacgactgttgctcatttttccaaaagctatttaatattcttagcaatcaatttggatatcccttaagtgaaaagaatctgaaatacactcaggtggtcttatttattggcaacaaaaggaattttctatccagaagcctatttctcctttcattgttgttatttctgttataatactttaattgtacatctgacaatactgcctcttttatgttgtatttagaaattaatatacttataaaattaagatttattagccaaacttgaattctagttttaaaactgactgtgaattttatttttcatatatttatgcattacacaccttagctataagaaaaaaagggttttgattatatgcttcttgcagttaatctcgttatttaaacaaaaagttttgggtctgtctttggagtatttgtaacttctaaattttgaaatgactgaattaggaatttggatgcttattcttttagtctgtttgcctaaaaaccaatttacaatctgactgtctcttgggagagggaggtgccttgcaaactttcacattaagaatgtgcctgaggctgctttactctggaatagtctcagatctaaaatttcctctatataaggtggcatatgttaagttttgcttcattggaccgtttagaatgctatgtaaaatgttgccattctgttagattgctaactatatacccatctctgatttggctctccttaagtgataggatttgttattctaaaggtgataaacttgaaaatatcagaatctgagttttacttgaaattttgcagaatacccaggtggagtgaaaattggaagggttttgtgcaatgactaaaaggtaaaacgctgttaaggttcaagaatcaatactttcaacccaagtagccctctgcttgactgtatattatggaactagtaaaccttaggattttgaaaattggagtctaatctttcaaggaggtgggctcccaggatggtaccattgctctttcctagctaaccctagatatggcagctctttaatgtacttcaaaaagcaaatatatattactaaggaaaaaaagttatttataattgccttgtcataattgttaaggtgttctagagccatttgcatacaatttaatgtaatttcattccattctattgtttacacaacgattactcgaagatgactgcaaaggtaaaaggaaaataaaagtgtattg

SEQ ID NO: 188328 - DNA, 861 bp, Homo Sapiens
ttggctttgacatgttcaacttcctggcctcccagcaccgggtgctccctgagggggccacctgtgatgaggaagaggatgaggtgcagctcaggtcaaccagacgtgccaccagcctggagctgcccatggccatgcgttttcgtcaccttaagaagacgtccaaagaagctgtgggtgtctacagatcagccatccacgggcgaggcctgttctgtaagcgcaacatcgacgcgggggagatggtcatcgagtactctggcattgtcatccgctcggtgttgactgacaagcgggagaagttctacgatgggaagggcatcgggtgctatatgttccgcatggatgactttgatgtagtggacgccacgatgcatggcaatgccgcccgcttcatcaaccactcctgtgagcccaactgcttctctcgggtcatccacgtggagggccagaaacacattgttatcttcgccctgcgccgcatcctgcgtggtgaggagctcacctacgactacaagttccccatcgaggatgccagcaacaagctgccctgcaactgtggcgccaagcgctgccgtcggttccttaactgaggccgtggctgcccaccacgacccctcacacctcctgctgccgtcgctgccatcttgcccctagcctgggggctccctagcccctcccagagcatctcacccccaccttcatgttcagggtggatgtgggcatgcaggtgacaaggggccctgcctcacccctccagcccatccagcaatggccccctttctgccctgggggcctaggatgtaaatattgtaaaaaggtttctaaatccctccttttctatgcactttttattaaaag

SEQ ID NO: 188329 - DNA, 688 bp, Homo Sapiens
ataaaagccaactttgtacaaaaaagttggccccctcccctcatcttccccgccctgtccagcgccctggcaaaggctgacaactggctgtcttggggccgaacagcccctgccctgcctctgagggcccaccagcctgtgctgcatacccaccgcccagcttctccctgagggcccaccagcctgtgctgcatacccaccgcccagcttctccctgagggcccaccagcctgtgctgtacaccccgttagtccctgatcccaaccttctccctcctgccagcacaccgatgcacacaccggaagtggcgagcccaagccctggggacaggtgtagggagaaaagcagccccaggcctcagactcgcttcccatcctggcatacagtgggggatggctggagggtgtctataggtacagcccgctctggctgctgccaggtgggcccctgccaggggtcctcacccctgtccaccctgtgcctggctgtccctgcacccagatacagcaacatggcctgtacccagcagagtggtggcaccaccatggttacagcggatgccccgagactctgcttggtaaacgtggcagagcagaatgggaggctggaccctgaggaagggcccctctcctggcatctgtctcttgctacctaaacctgtgcctctcccctaagagctgcctccctg

SEQ ID NO: 188330 - DNA, 2277 bp, Homo Sapiens
  misc_feature (1346)..(1410): n is a, c, g, or t
cggcccggcacgggcggcgcgatgtgaggcgtccgagcccggagcctccgcctggcatcagctccacgtagcccagcgccggcacgcgcgaggcccggcagctgtgattagagaagccagggccaccccggagccagcctctgaggcttcacctcaccccgtttacactgctgtctcctctgcatagatttggctgactgaggacgcgacagcccttctgcagaggccgggctggaggagaagatggcggccaagcagcccccgcctctgatgaagaagcacagccagacggacctcgtgagccgcctgaagacccgcaagatcctcggcgtgggcggggaggatgacgacggggaggtgcatcgctccaagatcagccaggtcttaggcaatgaaatcaagtttaccattcgggagcctttggggctcagggtctggcagttcgtctctgctgtgctcttctccggcattgccatcatggcgcttgccttccctgaccagctctatgatgcggtctttgatggagcccaggtgaccagcaagacccccatccgcctctacggcggtgccctcctcagcatctccctgatcatgtggaacgctctctacacggctgagaaggtcatcattcgatggaccctgctcaccgaagcttgctatttcggggtccagttcttggtggtcactgccacgctagctgagacgggcctcatgtccctggggatcctgctgctcctggtcagccgcctcctttttgtcgtcatcagcatttactactattaccaagtcggccgaagacccaagaaggcctagttgcccgctgggcctggggccctgcccatgcctgggccagagtggcgctggggcctcggcttccctttggctcctggaaggcaggagggtcccctgccctgccccagtcctgccccagggaggcagggggtggggggccttcctttcctcctgggcaccccgtgtgctgtgatctcctgggctttcaggcttgacatgctggtctggggagagacagggcctctgctgccctgttcttcaccctcacagtgatacctcctttccttgggtctcttggcctccagaccccctcaatagacactgactaaagtcaagctggagtcatgagggtagtgggctaagtcgagggtccagcctcttctgccaggaagcccttcttgcttttgagagaggctgtgaccaccccccatccttctccctacactcccagccaacctagtgcccaagcagctaaacttggcttccttctaatcctggaaaaccctgtacccctcctcctcaatctggccctctccacatgcacaccctgaaannnnnnnnnnnnnnnnnnnnnnnnnnnnnnnnnnnnnnnnnnnnnnnnnnnnnnnnnnnnnnnnnccatgatgtgagcaaacacacacacgtgcgccttcatagcccagccaagggcatgcaggcagggtgtgctgcctgagatggcacctccctttcagccattcttcaagaatgggccacacacagctagaagtcctctcccagctagaagtcctgtccccactctcctggcctgacaagatgagctctcctgggaccttgctctagggcactctgcctctaccctaggacactggaatgccctgggagccccctccctgcaaccagcctgagttcagccccacggacaaagggacacacagcccccaatggagaccattgtaagtggtggggctgggagaggaggaacagaaggaaagccatagcgctctcttgccccttggcatgtaccccaaggcctgatggccactgggctcagcctgtcccccactcctgcctgcttcccggtgagctgccccccacacgtgcagcccgggctgcctccagggtctggctgagtgggatcaggtggccctccaactcagcacaggaaataagtagaaacatttcagcaggccacctcccctcatcttccccgccctgtccagcgccctggcaaaggctgacaactggctgtcttggggccgaacagcccctgccctgcctctgagggcccaccagcctgtgctgcatacccaccgcccagcttctccctgagggcccaccagcctgtgctgcatacccaccacccagcttctccctgagggcccaccagcctgtgctgtacaccccgttagtccctgatcccaaccttctccctcctgccagcacaccgatgcacacaccggaagtggcgagcccaagctctggggacaggtgtagggagaaaag

SEQ ID NO: 188331 - DNA, 973 bp, Homo Sapiens
ttggctcagttcttttctcagtggaaaaatttctgccgtttctggacatgttccaaaaagagagtgtgcgggtggaggtttgcaaatgcatcatggacgcctttatcaagcatcaacaagagcccaccaaggacccggtcatcttgaatgcccttttgcatgtttgcaagaccatgcatgactctgtgaatgcactcactcttgaggatgagaaaagaatgctgtcatatttgattaatggatttataaaaatggtttcctttggccgtgattttgaacaacagctgagtttttatgttgagtccaggtcgatgttttgcaatctggagcctgttcttgtgcagttgattcatagtgtgaaccggttggcaatggagacaagaaaagtaatgaaaggaaatcattccagaaagacagctgcatttgtccgggcctgtgttgcctactgcttcatcaccatcccctccctggcgggcatcttcacacgtctcaatctctacctgcattctggtcaggtggccttggccaaccagtgcctctcccaagctgatgcttttttcaaagccgctataagccttgttccggaagttccaaagatgattaatattgatgggaagatgcggccatcggaatcgttccttctggaattcctctgcaatttcttttctactttattaatagttccggatcatcctgaacatggggtcctgtttcttgttcgagagcttctcaacgtgatccaggactacacctgggaggacaacagcgatgagaaaatccgcatctacacctgcgtcctgcatctcctctccgccatgagccaggagacgtacctttaccacatagacaaagtggactccaacgacagcctctacgggggagactccaagttcctggcagaaacaacaagctgtgtgagacggtgatggctcagatcctagagcatctgaaaccctgaccaaggacgaggccc

SEQ ID NO: 188332 - DNA, 1503 bp, Homo Sapiens
ctataaaggcgcaactttgtacaaaaaagttggcacagagccgatcgcggagcggattctgcttttaggggtacccgccaacaagcgggaccgagcaggaatccgtatctgggaacagaatgaacggagaccagaattcagatgtttatgcccaagaaaagcaggatttcgttcagcacttctcccagatcgttagggtgctgactgaggatgagatggggcacccagagataggagatgctattgcccggctcaaggaggtcctggagtacaatgccattggaggcaagtataaccggggtttgacggtggtagtagcattccgggagctggtggagccaaggaaacaggatgctgatagtctccagcgggcctggactgtgggctggtgtgtggaactgctgcaagctttcttcctggtggcagatgacatcatggattcatcccttacccgccggggacagatctgctggtatcagaagccgggcgtgggtttggatgccatcaatgatgctaacctcctggaagcatgtatctaccgcctgctgaagctctattgccgggagcagccctattacctgaacctgatcgagctcttcctgcaggtgtattgcagacagggcccgatgcccagagggtgcccatggtagccttggcctctataggacatgctcatctagctggtttcagggtacaggattgcagcgtgcctggaagggaaagaaagcgaggaagggtgttgggaagtggggttgtggtaatggcaagaaaagggcttctctgtcctgtgtaattggaagaaagggtgataaaggactgtgtgtatgaatatgggcctttagttttggggctttctccccttctgttgcctttctgattctgcccagttgtcagctggtatgggatgttgggcttgggataccagggtttcgcatatctggagaaagcctggctcatggaccgtctttgtcttgcttagagttcctatcagactgagattgggcagaccctggacctcctcacagccccccagggcaatgtggatcttgtcagattcactgaaaagaggtgaggggaggtgagggacagcgcgaaccatgtctggacagcgagggagggctcaggatgtgcattgccctcctgaggagtttctcttctccccttactcaggtacaaatctattgtcaagtacaagacagctttctactccttctaccttcctatagctgcagccatgtacatggcaggaattgatggcgagaaggagcacgccaatgccaagaagatcctgctggagatgggggagttctttcagattcaggatgattaccttgacctctttggggaccccagtgtgaccggcaaaattggcactgacatccaggacaacaaatgcagctggctggtggttcaggtgtctgcaacgggccactccagaacagtaccagatcctgaaggaaaattacgggcagaggaggctgagaaagtggcccgggtgaaggc

SEQ ID NO: 188333 - DNA, 1307 bp, Homo Sapiens
  misc_feature (990)..(1090): n is a, c, g, or t
ttggctatgaatatagggaatgtggaaagaactttaattatgacccacaacttattcagcatcaaaatttgtactggtgatgaaacagaatatatgaaatgtgtagggaggcttttaattatggctcaaaacagaatttatcttgttaataattcctctagatagaataatgtagaaacattttatttgtggactacagcttattcagcctgggaaaaataatgttggagaaatactctatgaatagaatatactttggaagcccttaactaaacgcttacttctcttgacatcagataattcagtctagcaatatgatagataattcagtctgtcatactgaaaatgacagcacttttaacacctttctaaccttcttaacgtcaaagaatttttgtagaaatgtagtcctgtgattgtcattttttcccctaatttctctaattgttacattcttagtattttaatccatattaaatttatatggctataaatttcatctgtttacatcctgatttgtatactattttaaaaatacctttagtacctgggagaagtgacctctttatttttgaagatggcttattctttttgttctttataacattaaggctttcttattgtaaaaatgttcatgaacgacattttactcaatagagattcttcattatcttcatggtgttttgttgtgttactgtaatatcacttatgaaatcctattggtggatatcgtagtctcctctagatattttgccataatacatgccaaaatacaagtccctgctggacattctccctaagcacatctttgtatcatatcttttaattgcagaagtaatgtgtgaatatattttccttataaaagatgcaaacattacaaaaaggcaaatgtaccctttgaccatatcccaaaggatagtctttatcagttcattatttattgctgatcatttttctgttcatatatacatgcgtgtctcagtaaaaatnnnnnnnnnnnnnnnnnnnnnnnnnnnnnnnnnnnnnnnnnnnnnnnnnnnnnnnnnnnnnnnnnnnnnnnnnnnnnnnnnnnnnnnnnnnnnnnnnnnnnatacatactcactgaatgttagtcatcgttattatattcatcatcatcagtattattatttgtagaaaggctttttaacttctgcagaacttagtcaccattaggcaggggtgtttgactgaagaaagaccctttgaatgtaacaagttaagaaaatttcccatcatcatgtacttactattgaacatgaaataatcctagtgttgggggggaaagt

SEQ ID NO: 188334 - DNA, 1278 bp, Homo Sapiens
ttggcatccctctgttctcctgagccttcaggagcctgcaccagtcctgcctgtccttctactcagctgttacccactctgggaccagcagtctttctgataactgggagagggcagtaaggaggacttcctggagggggtgactgtccagagcctggaactgtgcccacaccagaagccatcagcagcaaggacaccatgcggcttccgggtgcgatgccagctctggccctcaaaggcgagctgctgttgctgtctctcctgttacttctggaaccacagatctctcagggcctggtcgtcacacccccggggccagagcttgtcctcaatgtctccagcaccttcgttctgacctgctcgggttcagctccggtggtgtgggaacggatgtcccaggagcccccacaggaaatggccaaggcccaggatggcaccttctccagcgtgctcacactgaccaacctcactgggctagacacgggagaatacttttgcacccacaatgactcccgtggactggagaccgatgagcggaaacggctctacatctttgtgccagatcccaccgtgggcttcctccctaatgatgccgaggaactattcatctttctcacggaaataactgagatcaccattccatgccgagtaacagacccacagctggtggtgacactgcacgagaagaaaggggacgttgcactgcctgtcccctatgatcaccaacgtggcttttctggtatctttgaggacagaagctacatctgcaaaaccaccattggggacagggaggtggattctgatgcctactatgtctacagactccaggtgtcatccatcaacgtctctgtgaacgcagtgcagactgtggtccgccagggtgagaacatcaccctcatgtgcattgtgatcgggaatgaggtggtcaacttcgagtggacatacccccgcaaagaaagtgggcggctggtggagccggtgactgacttcctcttggatatgccttaccacatccgctccatcctgcacatccccagtgccgagttagaagactcggggacctacacctgcaatgtgacggagagtgtgaatgaccatcatgatgaaaaggccatcaacatcaccgtggttgagagcggctacgtgcggctcctgggagaggtgggcacactacaatttgctgagctgcatcggagccggacactgcacgtagtgttcgaggcctacccaccgcccactgtcctgtggttcaaagacaaccgcaccctgagcgactcc

SEQ ID NO: 188335 - DNA, 1369 bp, Homo Sapiens
tccccgcaaaagtctctccccagggtgggcggcagcggggaggaaaggaagcgcgctcctctctctgctttcccatctgcctctgcttcctcccaacagcaatggtaaaatgtgctttctttagattattttaaaaacagagagaaagagaaaggggagaggagtgaacagcggctcgcgagggtgaagtgcgaatgctgggacggggtgggaggggtgggccctggcgggtgttcctgaagcaggggggtctggagaagaatccaggggctagtcagcttcctctcactgaccatcggccttagatttctttggagcagatttcatttctggagaggacatgggccgcttgttggctggcttggtgccagagctgtctttactggtttcctgcagccacctcacttgtgtggccgggccatagcccttctcattgcgggcggcgatgcggaagatgatggcgggcttggtggtgtagtcgatgtgggcgttggaaaggctggaggactgcaccaggcaggaggggctgggcccgcagtacacccgcatgaaggccagctgggccggggtggagctcttgagctcgcccccagcctgtgagctctggatggccaggtacacggagtactcgataatcttgccggaggtcacagagggtggctcccaggtgaggtgagcaccatccggacttttgctgattttaatggcacaaggggcccctgggaaaccaggcaggcacgtcttaaaggctgagatttcgctgaagggcccccggccacaggcattgattccggcaacacgaaacttataggctgtgcctggctgcagctcctgcttcttcagctggttatagtcagggacggtgcccaaatcatcgtctgatgggacagcatcatctggtggcaggaaatagtgtgtcaccattacattggtgcccttaatgactcccacatcaaaccactggttttccttcttcatgggggctttgctgggtgggggcggcaggtctggcttcacacccagggactcgatgccattggccacttcggtcagggtagctgcagcctgcagcttggctgggctggccaccacaaccggctggggggccacaaatgtgttggatggagccaggctctcagtggccgttgagggcagcagcgccacagtgctggggaccgtgccggccagctcattgaggcaattgctctcaatggctgggtcgttgagactgtcggcaggggccagggcctcagtggggaggtggtgatgctgctgctgggcctgggcctcctgcagctgctgctgctgcaccagggcagccagctcctgctgtgtcagcacaatgggtatggtggtggcctggccccaa

SEQ ID NO: 188336 - DNA, 2053 bp, Homo Sapiens
ttgggtcagaatttcagaaaagtttccttcaagtcccaaggctttggaatctgtcactaatgaaaacgcaattattcctttaccaacaatcaaatggaaacccttaattcattctccttccagaactcctgtcttggtaggatctgatgaatttgacaaatgtctcagtaatgataagttttctcatgaagaatatagtaatggtgcactttcaatcttgcagtatccatatgataatggttattatctaccatactacaagagggagaggaacaaacgaagcacacagattacagtcagattcctcgacaacccacattacaacaagaatatccgcaaaaaggatcctgttcttcttttacactggtggaaagaaatagttgcaacgattttgttttgtatcatagcaacaacgtttattgtgcgcaggcttttccatcctcatcctcacaggcaaaggaaggagtctgaaactcagtgtcaaactgaaaataaatatgattctgtaagtggtgaagccaatgacagtagctggaatgacataaaaaactctggatatatatcacgatatctaactgattttgagccaattcaatgcctgggacgtggtggctttggagttgtttttgaagctaaaaacaaagtagatgactgcaattatgctatcaagaggatccgtctccccaatagggaattggctcgggaaaaggtaatgcgagaagttaaagccttagccaagcttgaacacccgggcattgttagatatttcaatgcctggctcgaagcaccaccagagaagtggcaagaaaagatggatgaaatttggctgaaagatgaaagcacagactggccactcagctctcctagcccaatggatgcaccatcagttaaaatacgcagaatggatcctttctctacaaaagaacatattgaaatcatagctccttcaccacaaagaagcaggtctttttcagtagggatttcctgtgaccagacaagttcatctgagagccagttctcaccactggaattctcaggaatggaccatgaggacatcagtgagtcagtggatgcagcatacaacctccaggacagttgccttacagactgtgatgtggaagatgggactatggatggcaatgatgaggggcactcctttgaactttgtccttctgaagcttctccttatgtaaggtcaagggagagaacctcctcttcaatagtatttgaagattctggctgtgataatgcttccagtaaagaagagccgaaaactaatcgattgcatattggcaaccattgtgctaataaactaactgctttcaagcccaccagtagcaaatcttcttctgaagctacattgtctatttctcctccaagaccaaccactttaagtttagatctcactaaaaacaccacagaaaaactccagcccagttcaccaaaggtgtatctttacattcaaatgcagctgtgcagaaaagaaaacctcaaagactggatgaatggacgatgtaccatagaggagagagagaggagcgtgtgtctgcacatcttcctgcagatcgcagaggcagtggagtttcttcacagtaaaggactgatgcacagggacctcaagccatccaacatattctttacaatggatgatgtggtcaaggttggagactttgggttagtgactgcaatggaccaggatgaggaagagcagacggttctgaccccaatgccagcttatgccagacacacaggacaagtagggaccaaactgtatatgagcccagagcagattcatggaaacagctattctcataaagtggacatcttttctttaggcctgattctatttgaattgctgtatccattcagcactcagatggagagagtcaggaccttaactgatgtaagaaatctcaaatttccaccattatttactcagaaatatccttgtgagtacgtgatggttcaagacatgctctctccatcccccatggaacgacctgaagctataaacatcattgaaaatgctgtatttgaggacttggacctttcc

SEQ ID NO: 188337 - DNA, 1673 bp, Homo Sapiens
ttggcaaactcagaacttactcctagtgagagccttgctactactgatgatgaaacttttgagaagaactttgaaagagaaacccataaaataagtgagcaaaatgatgctgataatgctagtgtcctgtctgtatcatcaaattttgagccttttgcaacagatgatctaggtaacaccgtgattcacttagatcaagcattagccagaatgagagaatatgagcgtatgaagactgaggctgaaagtaactcaaatatgagatgcacctgcaggattattgaggatggagatggtgctggtgcaggtactacagttaataatttagaagaaactcccgttattgaaaatcgtagttcacaacaacctgtaagtgaagtttctaccatcccatgtcctagaattgatactcagcagctggaccggcaaattaaagcaattatgaaagaagtcattccttttttgaaggagcacatggatgaagtatgctcctcgcagcttctaacttcagtaaggcgcatggttttgacccttacccagcaaaatgatgagagcaaagagtttgtaaagttctttcataaacaacttggaagtatattacaggattcactggcaaaatttgctggcagaaaactgaaagactgtggagaagatcttcttgtagagatatctgaagtgttgttcaatgaattggctttctttaagcttatgcaagatttggataataatagtataactgttaaacagagatgcaaaaggaaaatagaagcaactggagtgatacaatcttgtgccaaagaggctaaaaggattcttgaagatcatggctcacctgctggagagattgatgatgaagacaaagacaaggatgaaactgaaacagttaagcagactcaaacatctgaggtgtatgatggtcccaaaaatgtaagatctgatatttctgatcaagaggaagatgaagaaagtgaaggatgtccagtgtctattaatttgtctaaagctgaaactcaggctttaactaattatggaagtggagaagatgaaaatgaggatgaagaaatggaagaatttgaagaaggccctgtggatgtccagacttccctccaggctaacactgaagctactgaagaaaatgaacatgatgaacaggtcctacaacgtgactttaaaaagacagcagaaagcaaaaatgtcccattggaacgagaagccactagtaaaaatgaccaaaataactgtcctgtgaaaccctgttacctcaatatcttggaagatgagcaacctttaaatagtgctgcccataaggagtcacctcctactgttgattcaactcaacagcctaaccctttgccgttacgtttacctgaaatggaacccttagtgcctagagtcaaagaagttaaatctgctcaggaaactcctgaaagctctctggctggaagtcctgatactgaatctccagtgttagtgaatgactatgaagcagaatctggtaatataagtcaaaagtctgatgaagaagattttgtaaaagttgaagatttaccactgaaactgacaatatattcagaggcagatctaagaaagaaaatggtagaagaagaacagaaaaaccatttatctggtgaaatatgtgaaatgcagaccgaagaattagctggaaattctga

SEQ ID NO: 188338 - DNA, 1753 bp, Homo Sapiens
ttggatattcccttatttattgatatttagtccagaacaccagttctaacgaagcatgcgtgtctcttcatctacaggatgcaataggctgattgtatttaaaaatcaaagtacccaaaactgagtccctttgggctcagaaatgtctgtggtattgggtcagactctgaccacaggttttatgctgtttagcacaatttctattgagtcttacctgcaacaatgaaccttaaagatttttttactcacgtacctgttacactttagcatacagatagatcatagatcacgttacaagcacttggctcaggtccagcaaggacagatgaacaaattcctgagtcagaagtctgttaatattgctgttttgaaggacaatcctttattttacttgagaccttacatctttgttctagctgacagtaaatctctgggtttctgttacgaactctaagagggctgaaacttctgatattcaggtggatcacctgaattctctcagctgtcaatggcttggagaacatctcatgggcccaagtcatcaaataacctgttcctctctgtaagggcagtgtgagggactgctgtgcagacccaagcaatcccaacctggtgctaggtcatttcacttttctgaaaacctcacatcaggctgcatcctcttctgtccctggcaccaggctttgtttacacttggagccaccttggtgtgggtcaccgggacagtgtactcctctcctgccagcctccccttccccgaggtgtggtggctgcagtctcaggaagagcttggtacttgtggggacttctgttttctccctgtggagatcagtgaagactgggaggaaagctgcttcaacctgagtccggctcttcagcaggctgcacaagtggaagcaactaattctggtgctcaggctgggctctccacccaagttaggcctgctctggcctaatggatcttactgtatgagcaggacggctgcattggattgtacaactgttttgtgatgcccccagacactgtcatcctgggccgagaagaacctgctagcttgacataccccatgggcttatccttaggttttggaattggtcaacagtgaggcagtctcccttcctgaccattcttctccacccagtcacagataagggaataaccttggccatatatttgctcaataaagattgaaggaagcatggtcatagttgccctgggttcagagcataatgcatatgtgaagcatggggtgacattcctactgtcatgggtttgggatttgtaacggcaaattcctgcccgacgacagggtgtcttatgcaaaggctgacttgcctgaacgctaagaacatgacttctgtctgagctaagctggcacccatcccagggctcctctggagctaatcctttaagcaaaatgtgcttgccttttaaagatccctgaccccagctttagctttctccaccagataaccagctaatcccaggaatttgctgccccccaccagtggcttctagggaaagcaaggacctcacatgccaggtgccctagtacttgcttagtgagccatgtcatcctcctttcatttttggatggtgacagcatttttcccctctgtgctggatacagacttctcccaggatcctctctttgggagcgaagccagaggatccctacagcactcaagcttcatggtggaattaatttctgccagctctttgttgtctgtctccttaaatccttttccccaa

SEQ ID NO: 188339 - DNA, 1898 bp, Homo Sapiens
  misc_feature (1638)..(1654): n is a, c, g, or t
acaaaaaagttggcgcgaaagcgatgagtcctcggctcttcctcctccttctccgggacccgctctctgcctccctctccaacgcccggatgatctgagccgcgagggcgccgacagccgggggcccggacgcagcccggctcctcccctcctccgccccttccccagcctgacctggcccgccgctgcagcggtgacccctcccccggctgccgccgtcgccgccgcggtgaccccctccccggctgccgccgccgccgcctcggccgaccagggacctgcccgcctgcggctgctccggacctagaggatcaagacataatgggagcatttttagacaagccaaagatggaaaagcataatgcccaggggcagggtaatgggttgcgatatgggctaagcagcatgcaaggctggcgtgttgaaatggaggatgcacatacggctgtgatcggtttgccaagtggacttgaatcgtggtcattctttgctgtgtatgatgggcatgctggttctcaggttgccaaatactgctgtgagcatttgttagatcacatcaccaataaccaggattttaaagggtctgcaggagcaccttctgtggaaaatgtaaagaatggaatcagaacaggttttctggagattgatgaacacatgagagttatgtcagagaagaaacatggtgcagatagaagtgggtcaacagctgtaggtgtcttaatttctccccaacatacttatttcattaactgtggagactcaagaggtttactttgtaggaacaggaaagttcatttcttcacacaagatcacaaaccaagtaatccgctggagaaagaacgaattcagaatgcaggtggctctgtaatgattcagcgtgtgaatggctctctggctgtatcgagggcccttggggattttgattacaaatgtgtccatggaaaaggtcctactgagcagcttgtctcaccagagcctgaagtccatgatattgaaagatctgaagaagatgatcagttcattatccttgcatgtgatggtatctgggatgttatgggaaatgaagagctctgtgattttgtaagatccagacttgaagtcactgatgaccttgagaaagtttgcaatgaagtagtcgacacctgtttgtataagggaagtcgagacaacatgagtgtgattttgatctgttttccaaatgcacccaaagtatcgccagaagcagtgaagaaggaggcagagttggacaagtacctggaatgcagagtagaagaaatcataaagaagcagggggaaggcgtccccgacttagtccatgtgatgcgcacattagcgagtgagaacatccccagcctcccaccagggggtgaattggcaagcaagaggaatgttattgaagccgtttacaatagactgaatccttacaaaaatgacgacactgactctacatcaacagatgatatgtggtaaaactgctcatctagccatggagtttaccttcacctccaaaggagagtacagctcaactttgttgaaacttttaacatccatcctcaactttaaggaaggggatatgacatgggtgagaatgattacatcagagaacttcagcagtacaacagctagcccagaactgannnnnnnnnnnnnnnnngtaaatttgagacttatgtaagcgtgatttcaaaccataattcgtgttgtaaatcagactccagcaatttttgttgtatgattttgtttttttgtaaagtgtaattgtccttgtacaaaatgctcatatttaattatgaactgctttaaatcactatcaaagttacaagaaatgtttggcttattgtgtgatgcaacagatatatagccctttcaagtcatgttgtgtttggacttgggggttg

SEQ ID NO: 188340 - DNA, 1675 bp, Homo Sapiens
  misc_feature (416)..(432): n is a, c, g, or t
  misc_feature (1438)..(1467): n is a, c, g, or t
ttgggaagaaggaggcagagttggacaagtacctggaatgcagagtagaagaaatcataaagaagcagggggaaggcgtccccgacttagtccatgtgatgcgcacattagcgagtgagaacatccccagcctcccaccagggggtgaattggcaagcaagaggaatgttattgaagccgtttacaatagactgaatccttacaaaaatgacgacactgactctacatcaacagatgatatgtggtaaaactgctcatctagccatggagtttaccttcacctccaaaggagagtacagctcaactttgttgaaacttttaacatccatcctcaactttaaggaaggggatatgacatgggtgagaatgattacatcagagaacttcagcagtacaacagctagcccagaactgannnnnnnnnnnnnnnnngtaaatttgagacttatgtaagcgtgatttcaaaccataattcgtgttgtaaatcagactccagcaatttttgttgtatgattttgtttttttgtaaagtgtaattgtccttgtacaaaatgctcatatttaattatgaactgctttaaatcactatcaaagttacaagaaatgtttggcttattgtgtgatgcaacagatatatagccctttcaagtcatgttgtgtttggacttggggttggaacagggagagcagcagccatgtcagctacacgctcaaatgtgcagatgattatggaaaataacctcaaaatcttacaaagctgaacatccaaggagttattgaaaactatcttaaatgttcttggtaggggagttggcattgttgataaagccagtcccttcatttaactgtctttcaggatgttccttcgttgtttccatgagtattgcaggtaataatacagtgtattcataagaatctcaatcttggggctaaatgccttgtttctttgcacctcttttcaagtccttacatttaattactaattgataagcagcagcttcctacatatagtaggaaactgccacatttttgctatcatgattggctgggcctgctgctgttcctagtaagatattctgaattccattttatcaataaagcttgatttaacaaacaagaaacttaatcatgtatgtgtaattcctcttttaccctggccttttaaaacactgtgccgttgtaatgagacgtttctcatagggaaagatgttagtctcttttaattggacaacactgtcactcaaggcatagatgaaactttccttccattagaaagactaaaagatttaattcttggttgtaccttaatctattttttaaataggtttctttcaggctgcttatttttcattaagatgtgtatcagcttggatttgcctactgtttaattaaaatatttattgtcaaagtttgacaatctaacactctatggtagggnnnnnnnnnnnnnnnnnnnnnnnnnnnnnnttgcctgtgatttttaattggcccatgtctttagaatcccagtggttaagatgtatttgtgatttgaaatatagcatgttgataatattttagctgttggcctttacaaataactttcaaagcttaagaatttgtagatataaaaataacctaaatttatttagggctaaaattcctctgattaagcatgtgaaagtaagttttaaaa

SEQ ID NO: 188341 - DNA, 1344 bp, Homo Sapiens
  misc_feature (100)..(122): n is a, c, g, or t
ttggctatattatgctgtctttcctcttcctcctagctggctttacatgaccctaacccaaaactaccctatggccccacacgggaatgtgttcaaacgnnnnnnnnnnnnnnnnnnnnnnnattcccaagcctccaacttagaacgtttgtgatttggcagatggtttgttaggatctgaaggatgaagagaagggtagaggtcacctggagaatgagttcaaactgccagggtcttcccttggtctttgtgcgtcaggaaggactccgagtaattattccctatgcagagacaggagagaggtcttgtttacatgagtgtgctggggcagggctggacaatccaggatatgattgtagccatcccatgtagaaagatcaaaaaccagaacgaaatgaagacagcctctcagaacctcatagaacaagcgtccaggtcatctgcttgtttggtgacttagatatacaggcttactggaactccattcactgtgacctgaagttaaataatcccaaagagaaaaagctacctggggtattggttgatgtttggggtgatagggctgaattttctgtgcatttgtccaacaaaggctttagagcacaaaaccaggttcattctccctaccaaatcttcagcttccttctcctcatccctccccaaaacaagaactgtgatttaattccgtacgttgcggatgtcactgctgacctatgtagctggagtactaatcaggcatctgacctgcactgtcatcccctgcctggacttttgcgatggactctttgggggaaaaactaacgctttttaattattgtgaaagcatcatgtgtgtattgtagaagttttaggaaaaaaaggacaaaatccaatccataagcttaccacccaagacaaacgtgtattcttttgaatataccttttagttctttttggtgtaaatgtacacacgcacacacagttgtggatttttttaaacaaaaactggatacactgaatatactctttaataacttttcaagtgtgtatttatattttagaatatgtaatcctacacagatacaaaattcaaaaagtacaaactgctctgtatcagaagtaaatcttctccctaccccgtctgccagcatctattccctctaattattttgcatcctatggagatgcttacattgtcaacatatgtatatattctttatcacacacaaatggcagcatattggacacttttttggtttttgctcccttctgttccttcacttaataatatcccaaacattttcggcatatccaactttctcaacaccatcttcctagtaaggatggaccctttttttatcatc

SEQ ID NO: 188342 - DNA, 1773 bp, Homo Sapiens
  misc_feature (489)..(511): n is a, c, g, or t
ggttttgtgctctaaagccttgttggacaaatgcacagaaaattcagccctatcaccccaaacatcaaccaataccccaggtagctttttctctttgggattatttaacttcaggtcacagtgaatggagttccagtaagcctgtatatctaagtcaccaaacaagcagatgacctggacgcttgttctatgaggttctgagaggctgtcttcatttcgttctggtttttgatctttctacatgggatggctacaatcatatcctggattgtccagccctgccccagcacactcatgtaaacaagacctctctcctgtctctgcatagggaataattactcggagtccttcctgacgcacaaagaccaagggaagaccctggcagtttgaactcattctccaggtgacctctacccttctcttcatccttcagatcctaacaaaccatctgccaaatcacaaacgttctaagttggaggcttgggaatnnnnnnnnnnnnnnnnnnnnnnncgtttgaacacattcccgtgtggggccatagggtagttttgggttagggtcatgtaaagccagctaggaggaagaggaaagacagcataatatagtagggattggggagaatgtggcagctgaaatagcttcttccttttcctcttctccagagagtgagctctaggtgagtaatggcaggcccctcaatatttctagcaccttcctgtagcccccgttgaaagcctttggggaactatgtgaatataacttacgctgctctcttctgggcccctcggctgtgattggatcctgccgtggtggggcatctgcttacataattaacccatatttaactttgtgtttcctttcggtcttaattgtgaccctttcccaatgctggggatgggtgatgaatgctaggtgagttgttgagatacatgctggctccatcagtaagtagaatgagcaatacacagacataactattggactcagctgcctttttctgacctgtcactgctctgactactagggattctggcctctggtcttttggggctttgagtaaatacataaggaggccatgtactatcactgacatcatgaacacttttcaggttaatacatattgtcctgttctcaaatggttataattgcccaatattatacttatagagaggcaactaagtatagcatagatactagccagagctctggagtcaggcaggcctggttcaaatcctagctatgccactaaaggccatgcaaccttgggataattaatttttctggttttcaatattcttacccatcaaatgggaacagtatcccagagtaactgcatgaaagaaatgagattatacatgtaaagatctgaagataatgcatttaataaatcctaactattcacattattgcatctgtatatattttaattttgtacaacattgtctttttcactagtcacacgaaaaatacatgaaagtgctctgataattttaaagcatcatataaattaaaggtgtcattggtaataatctcatgtgcatttcttaacccttccatttccttgaagactgagacgacatcccatgtcccacagcatattgcacaatgatgggcaaacaatatgccctcagtaagtgtttcttgtttgactgaagcaacatggcatagcataacgagcacagacatcaggagactaggctgggatgaaattagtttaaggcaggagagccagtctgcagtcataatttattcattcaacaagcatttgccaa

SEQ ID NO: 188343 - DNA, 1025 bp, Homo Sapiens
ttggcacaaagtgtggcacaagaatggctcaactctccaaatagagagaatttctatcagttgcaagtacgaaaatttcctgccgattatataaaatactgggagtttgcagtttatctggaagaatgtgaactggctaaacagctttatccaaaggaaaacgatttggtgtttttagctcctgagagaataaatgaagagaagaaagatacagagagaaatgacatacaagatctccacgaatatcattctggttatgttcataaatttcgccgcacgtcagtcatgcgtaatgggaaaactgagtgttacctttccatccagactcaagagaactttccggccaatttaaacgaacttgtgaattgtattgtaatcagttctctggtaactacacaaaggaagttgaaagccatgtctctgttgggtagtcggaaccaactggctagagctgttctgaatccaaaccctatggacttctgtacaaaagatttactgactacaacatctgagagaattattgcgtacttaagagatttcaatgaagatcaaaagaaagcaatagaaactgcatatgctatggtgaaacactcaccatcagttgccaaaatctgcttgattcatggaccacctggaacaggaaaatcaaaaactattgttggcctcctctatcgtctactgacagagaaccagaggaaggggcattcagacgaaaactccaatgccaaaatcaaacaaaaccgtgtcctcgtgtgtgcaccttccaatgcagctgttgatgaactcatgaaaaaaattatccttgaattcaaagaaaaatgtaaagacaagaagaatcctttaggaaactgtggagatataaatttagtacgactgggtccagaaaagtctattaatagtgaggttctaaagttcagtttggacagccaagtaaaccacagaatgaaaaaagagttaccttctcatgttcaggcgatgcataaaagaaaggatttctagattatcagctggatgagctttcccgg

SEQ ID NO: 188344 - DNA, 1514 bp, Homo Sapiens
  misc_feature (318)..(351): n is a, c, g, or t
  misc_feature (1168)..(1247): n is a, c, g, or t
ttggcttcaatgatgaggagtttggggagcaggaggagagtgtgaacgcaccttttgacaagacagccaacatcaccttctccctcaatgctgacgatgagaaccccaacgccaacctacttgagatatgctacaaggaccgcatccagcagtttgatgatgatgaggaagaggaggacgaggaagaggcccagggctcaggggagtctgatggagaagatggcgcctggcagggcagccagctggccaggggggcccgtctgggccagccacctggtgtccggagtggaggcagcacagacagtgaggacgaataannnnnnnnnnnnnnnnnnnnnnnnnnnnnnnnnngcattggctgtgcagcccgtggaggggccacccctctgtcctaccccagccctggccctcagcctccaggccccagctggacagccacctttgacccagtgcctacagatgccccgaccagcccccgagtctccggggaggaagagctgcacactgggcctccagccccacaggggcccctcagtgtgccccagggcctccccactcagagcctggccagccctcctgcccgtgacgccctgcagctcaggtctcaggaccccacacccccctcagcacctcaggaagccacagaaggcagcaaagtcacggagccctcagccccttgccaggccttggttagcatcggggaccttcaggccaccttccacgggatccgttctgcccccagctcctcggacagtgcaaccagagacccctctacctctgtcccagcctccggggcccaccagcccccccagaccacagaaggggagaagagcccagagcccttggggcttccccaaagccagagtgcccaggccctcacgcctcctccgatacccaatggctctgccccggaagggcctgcatccccaggctcccaatagctgcctggtgcggcagcggcggccaaatcttccgtcctcccgtggatctcccggggtgggggcagggcgggtcccacgatggcccccattgccctcatcaccctgacacccccacattctctcctctggacccccaggaggctggtgccagggagacaggcccaacccacccccatttgcactgagaagagaagttttggagcgttgcctcctagaataaagatacnnnnnnnnnnnnnnnnnnnnnnnnnnnnnnnnnnnnnnnnnnnnnnnnnnnnnnnnnnnnnnnnnnnnnnnnnnnnnnnntgaggacaccgaactgggctggcggctccaaagcacagccttccctgttccgtcccagcgggagctggtgttaggggtcccaaggttgccacccacgtgcccagctgtcccacgctgcagcgcagacggccacgcccacacccggccttttagctcagtccaccatgggggacggcccagcgtgggtgggggtgccagagggtcccgagtgggggtcgtgactttgcccagaccctgcactttcaaccaggccagtccggctctggg

SEQ ID NO: 188345 - DNA, 945 bp, Homo Sapiens
  misc_feature (124)..(136): n is a, c, g, or t
ttggcttggagtgtgtgataaatcagtcaagctgttgaagtctcaggagtctctggtagcctgcagaagtaagcctcatcatcagagcctttcctcaaaactggagtcccaaatgtcatcaggnnnnnnnnnnnnncagccactaagaacccctctgcttttaactctagaatttgggcttggaccagatctaacatcttgaatactctgccctctagagccttcagccttaatggaaggttggatccaaggagggtgtaatggagcatcaagccactcggcggcagcatggagctataactaagcatcctttagggttctgcctctccaggcatttagccctcacattagatctagttactgtggtatggctaatacctgtcaacatttggaggcaatcctaccttgcttttgcttctagagcttagcatatctgattgttgtcaggccatattatcaatgtttacttttttggtactataaaagctttctgccacccctaaactccaggggggacaatatgtgccaatcaatagcacccctactcacatacacacacacctagccagctgtcaagggcagaatgaatctatgctggataagaaatggtggaactgcgttatgaagagctaatttactggacaaagaattccaaagcaaaaccagaacagtatgaatttgagcacgtctcataggttgagcaatttccccctaaaccaactgaaggctaaaaagcaacaggccattgtgaaccaatgcaagacgccctctatcatggtgaaaagctccatcaaatgaggtatcttctttagtggtggtatgtaatgggacttagccatttttcaaagcaaattgaaatgcattgctctggatctgttccttggcagtggactcagaaagccaacatgtggctcctcccagccataaccagtatttttgctgctt

SEQ ID NO: 188346 - DNA, 1636 bp, Homo Sapiens
ttggcccagagacccccggcggcggcagcctgccttgctctgccaggaaccatgagtgaggcccgcagggacagcacgagcagcctgcagcgcaagaagccaccctggctaaagctggacattccctctgcggtgcccctgacggcagaagagcccagcttcctgcagcccctgaggcgacaggctttcctgaggagtgtgagtatgccagccgagacagcccacatctcttcaccccaccatgagctccggcggccggtgctgcaacgccagacgtccatcacacagaccatccgcagggggaccgccgactggtttggagtgagcaaggacagtgacagcacccagaaatggcagcgcaagagcatccgtcactgcagccagcgctacgggaagctgaagccccaggtcctccgggagctggacctgcccagccaggacaacgtgtcgctgaccagcaccgagacgccacccccactctacgtggggccatgccagctgggcatgcagaagatcatagaccccctggcccgtggccgtgccttccgtgtggcagatgacactgcggaaggcctgagtgccccacacactcccgtcacgccgggtgctgcctccctctgctccttctccagctcccgctcaggtttccaccggctcccgcggcggcgcaagcgagagtcggtggccaagatgagcttccgggcggccgcagcgctgatgaaaggccgctccgttagggatggcacctttcgccgggcacagcgtcgaagcttcactccagctagctttctggaggaggacacaactgatttccccgatgagctggacacatccttctttgcccgggtatcctccatgaagagctgtccacatacccggatgaagttttcgagtccccatcggaggcagcgctaaaggactgggagaaggcaccggagcaggcggacctcaccggcggggccctggaccgcagcgagcttgagcgcagccacctgatgctgcccttggagcgaggctggcggaagcagaaggagggcgccgcagccccgcagcccaaggtgcggctccgacaggaggtggtgagcaccgcggggccgcgacggggccagcgtatcgcggtgccggtgcgcaagctcttcgcccgggagaagcggccgtatgggctgggcatggtgggacggctcaccaaccgcacctaccgcaagcgcatcgacagcttcgtcaagcgccagatcgaggacatggacgaccacaggcccttcttcacctactggcttaccttcgtgcactcgctcgtcaccatcctagccgtgtgcatctatggcatcgcgcccgtgggcttctcgcagcatgagacggtggactcggtgctgcggaaccgcggggtctacgagaacgtcaagtacgtgcagcaggagaacttctggatcgggcccagctcggaggccctcatccacctgggcgccaagttttcgccctgcatgcgccaggacccgcaggtgcacagcttcattcgctcggcgcgcgagcgcgagaagcactccgcctgctgcgtgcgcaacgacaggtcgggctgcgtgcagacctcggaggaggagtgctcgtccacgcttggcagtgtgggtgaagtggccca

SEQ ID NO: 188347 - DNA, 516 bp, Homo Sapiens
tgtacaaaaagttggcccaaacctccccagaccagccaggccgcctgcccccacccagaaccttccggtttgccctgtatggaaagccactctcggaaatccctctttcctgagtcagcaatcgtggcaaggggacatgtgttccaacagcggctggggagtggacctctctgtcccttgcccaccttaagccccaaatccggaccccctctgacatcactggcattgcacctgggtgtgcccccctccccacgctatggacccatataggaggggttaggcatgggggaggcacagaatgctggagagatgcgtcctggtgaacgtggggcagcccctcccacgacccccaccatactgccttatgttttgtcagccccactccctttccttcccctctgcctcccacccactctgggggtccacatcaagatagctgggcccactgtggaagcccagcgtgtctgttctagcagaaaggacacaagcctggtgttctggagacctcggctcaag

SEQ ID NO: 188348 - DNA, 941 bp, Homo Sapiens
gcagccgatccaggtatgtgatggcaaagggagacagagacttgatgcccagcacaggcagcatgatccccagccacactttcagtccctcggtgaggttggcaaaactgcttgacccagggcccacatgatggtgagacactttgctggtcggctctggtgggacctcagcagttccaggaacttgcctaggtttgccgtggcaatcttgggcttgtcttgcaggatggcctggatacagatgcggtaaccatgtagtgactcccctggtgtcttatccagctcttgcaacatggtgaacagacagtggtcaaaaaagagctccagagaccctgctgccttcgccagcagccctcggatgatcccacgtagctcccggctcaccaggctgtagggataatcatgagtatgctggctcagcgtgggttcacttagaggagcttgtagcttgtagttgagatagctggccaggtccttcaaccatatggatgggtttccagagaacacactctggctcttgtccagttccttctgcaggtctgccacatccagagctttcagtgcttcctccaggctgcggaagcggccctgcttctggttttggttgggaggagttgccaccttctttggctgcttcttgttccctggtttcttaggttccacagcagggggtgggacctgctccttattctgccgcttcatgatattctcaaagccccgctcataaagggtgcttgtggtctggattgcaggggtcaggtcgtatttccacactccgtttgcttccccgagcgccctgcggttcctgccgcctcctcggccgccggcgccggcgccgaccccaggccgccgacccttcttcactacctcccaccgccccacgcccgccgtcttggccaccatggctcgcagccctccctcctcggccacttccccgccaa

SEQ ID NO: 188349 - DNA, 2125 bp, Homo Sapiens
ttggctagcaaaaccaagacagttgcataatacgttgtggggaatggtgtgtcctgccgagaccccagagggccatgctgtaggacttgtgaagaatttagccttgatggcgtatatttcagttggatctcaaccatctccaattctggaatttttagaagaatggagtatggaaaatttagaagaaatttctcctgcagctattgctgatgcaaccaagatttttgttaatggctgctgggttggaatacataaagatcccgaacaacttatgaacaccctaaggaaattgagacgtcagatggacatcattgtgtctgaagtttctatgatcagagatattcgagagagggagattcggatctatacggatgcaggccgtatttgtagaccacttctgattgtggaaaaacaaaagctacttttgaagaagaggcatattgaccaattgaaagagagagaatataacaactatagttggcaggatcttgtggccagtggggtagtggagtatattgataccctggaagaagaaacagtgatgcttgcaatgactccagatgatttacaggagaaagaagtagcttattgttccacatatacacactgtgagattcatccctcaatgatccttggtgtctgtgcatctattattccctttcctgatcataaccagtcccctagaaacacataccagtctgctatgggtaagcaggctatgggagtttacatcaccaacttccatgttcgcatggacacattggcccatgttctctattatcctcaaaagccacttgtgactacacggtctatggaatatctacgatttagagagctgccagcaggcatcaactcaattgtggccattgcatcatacactggatataatcaggaagactctgttatcatgaatcgttcagctgtagaccgcggcttcttcaggtctgttttctatcgctcatacaaagaacaggagtctaaaaaaggatttgatcaagaagaagtttttgagaagcctacacgtgaaacatgccagggcatgaggcatgccatttacgacaagctggatgatgatggtttgatagctccaggggttcgtgtatcaggagatgatgttattataggcaaaacagtcaccttgcctgaaaatgaagatgaattggagagcaccaatagacgctataccaagagagactgtagcacttttctcagaactagcgagacgggcattgtggatcaggttatggtaactctcaatcaggaaggatataaattttgtaaaataagggtacgctctgttaggattccacagattggagacaaatttgctagtcgacatggtcaaaagggtacttgtggtattcagtatagacaagaggatatgcctttcacctgtgaaggtatcacccctgatatcatcatcaatccccatgccatcccctctcgtatgactattggtcacttaattgaatgccttcaagggaaggtatcggctaacaagggtgaaattggtgatgccactccatttaatgatgctgttaacgtgcagaagatttctaatcttttatctgattatggctatcatctcagaggaaatgaggtcctgtacaatgggttcactggtcgaaaaatcacatcacaaatatttattggccccacttattaccagcgtttgaagcatatggtggatgataagattcactctcgtgctaggggacctattcagatcctcaatagacagcccatggagggtagatctcgtgatggtggcctgcgttttggagaaatggaacgagattgtcagattgcccatggagcagcccagtttttaagggaaagattgtttgaggcatcagatccatatcaggttcatgtttgcaatctttgtggaataatggcgattgccaacaccaggacccatacatatgaatgcaggggctgccgcaataaaacccagatttctttggtgcgaatgccttacgcatgcaaactattgtttcagaacttatgtctatgagtattgcaccgcgaatgatgagtgtttagctattttacaggagtcaacaagataattaaatatcttggtgtcttgtttctattgtgtggctttttaaaatgacaaata

SEQ ID NO: 188350 - DNA, 1445 bp, Homo Sapiens
tccgggcatcggggaacgcagaacactgcttgtgtcctcagtcactttttccagcataaatttgttcaattctgcggcaagtcctggttaagatattcaccttgtacactgtacccaagaaactgaatgctcatgtttccactgcttctcgagaaagacactggacagtcctctgagtgccatcaacgctgacagacaataagggcgaagccaggttccacgtgctggtcacatttagtttcgacccatcaacttccacctgtgcactccctcctacgaggtgtggaaggcaacaggtgcaaatgagtggagtttgatcccactggcgccaaaacggctggtcagttccagtgctcctgcactacagttcccgcctccttcgctcgtgtgctccctcccacaaggagttgagagctataggctgattaaaggaggcaccccgtggcaaagcggtccgagaacactgacccattgtttgatgctactacggtatgaactttatcatgcaattttactgagagctcccagttggctatgtctggtttaataacaggcattcttgaattttcttgaaaatgttgtgctcttaactggaatgccacaaacaatgatgatgctattgccaataactggttcttctcactcttggttagcatgtgtcctttgaagccatcaggatacacatcggagagaaatttagtgctgatgtctccttttacaaagcgtgagttgattatcacctctcgaagtaatgcaatattatgtgtaacacctcgaataacatagttatccagtgcatctgccattctcttcagtgcctcagttctatcagagccatatgtgattagttttgaaatcataggatcataataaatgctaatatcacttcctggttggatgccactgtccactcggacgaaatatacttggctttctattttctgaaaacatatttcaggacataaactgatgttctatgaaattcacagtgttgacaaaaaaccaggtagatgtaacggttcttggtactgagacaatctcccaatagatggtaaaccaaaagacttgtaggggtcctcagcataaacccgacattcaactgcccagccgttgatgcgaatatcagcttgtttgtgcctgagagggtagcccttagcaacacggatcatttcctggactaggtccaggccagtaatgcattctgtgacaggatgctcaacctggagtcttgtattcatttccaagaaataaaaattcttcttagagtccacaaggaactccacggtcccagcagaggaatattttactgctctggcaagagctacagcttgttctcccatcgctcttcgagtctccgcatccaaaaaaatgcttggtgcttcctccaccaccttctgatttcttctctgaattgagcactctctttcattaagccataaagccaa

SEQ ID NO: 188351 - DNA, 950 bp, Homo Sapiens
ttggagccactctgaccagaactgacagcatgaaggcactcctggccctgccgctgctgctgcttctctccacgcccccgtgtgccccccaggtctccgggatccgaggagatgctctggagaggttttgccttcagcaacccctggactgtgacgacatctatgcccagggctaccagtcagacggcgtgtacctcatctacccctcgggccccagtgtgcctgtgcccgtcttctgtgacatgaccaccgagggcgggaagtggacggttttccagaagagattcaatggctcagtaagtttcttccgcggctggaatgactacaagctgggcttcggccgtgctgatggagagtactggctggggctgcagaacatgcacctcctgacactgaagcagaagtatgagctgcgagtggacttggaggactttgagaacaacacggcctatgccaagtacgctgacttctccatctccccgaacgcggtcagcgcagaggaggatggctacaccctctttgtggcaggctttgaggatggcggggcaggtgactccctgtcctaccacagtggccagaagttctctaccttcgaccgggaccaggacctctttgtgcagaactgcgcagctctctcctcaggagccttctggttccgcagctgccactttgccaacctcaatggcttctacctaggtggctcccacctctcttatgccaatggcatcaactgggcccagtggaagggcttctactactccctcaaacgcactgagatgaaaatccgccgggcctgaagggctggccccctcaggcacctttcctcccctggacacccatggtctccatgagtgctccctctgctgcccctgatgcatgcttctgctgattcccgagcaccaactccttacaagggggccttgtggctctcagccatgccacatccctgt

SEQ ID NO: 188352 - DNA, 1981 bp, Homo Sapiens
  misc_feature (1772)..(1789): n is a, c, g, or t
ttggctcttctacatgacatggttagccttttagttcttcatgttatttttaataagcccatttttctcgtgaagttgaatttttctaaaagttcatattattgtattttgacatagctttataatcatgtacatttgagttttgggaattgctattcatagcgatggtagcgatatatacttactgacttgctaaatactttttagagtgaaagtatcttattttgtggtggtggtggtttttattctggcaactaatgcattgagggttgttaccaataggcaaatgaagaggattcttccagttctctagtgaaggatcacctttttcagcaagagacagttgttaccagtgagccttatagaagctcaaatataagaccttctccctttgaagatctgaatgccagaagagtctacatgcaaagccaagccaatcagataacatttggtcagccaggcttggacattcagagcagaagtatggaatacgtacagcggcaaatatccaaggaatgtggaagcctaaagtcccaaaatagggtccctttgaaatcaatcagacatgtcagctttcaagatgaggatgagattgtcagaataaaccctcgagatatcttaatacgtcgctatgcagactacagacatcctgacatgtggaaaaatgacttggaaagagatgatgctgattccagtattcagttttctaaaccagacagtaaaaaatcagactatctgtactcttgtggggatgagactaagttaagttcacccaaagactctgtggtatttaagacgcagccttcctcattaaaaattaagaagtcaaaacgaagaaaagaggatggtgaacgttctcgctgcgtatactgccaggaaaggtttaatcatgaagaaaatgtcaggggaaaatgtcaggatgctccagaccctattaaaagatgcatatatcaagttagttgcatgctctgtgcagagagcatgttgtatcattgtatgtcagactcagagggagatttttctgatccctgttcgtgtgacactagcgacgacaagttctgcttgcgatggttagccctggtagctttgtctttcattgtaccatgtatgtgctgctacgtccctttgagaatgtgccatcgctgtggtgaggcatgtggttgctgtggtgggaaacataaagctgctggatgaaatggtccagtgccaaaatgagcttaaaatctttgtttccaggaattagctaacttggatttgtggaagcttttggcaagcaatatggaatcttgcctggtatcattgagcccacacatggaggaagcagaactcatcagttcttggcgtttcacgccatgcctaacttttcccttgagtgcatggcatgttttgttacaggttgtagagtatttgcagaaggaaaccatttctggttatttggctataaaaagtcagcataaaatatgatccaactaaaagggattaatttttggcatttttgtatatttatgcattaggtgatgggacttttaaaggtttgaatttattaggacacgaactaaaaataaaagtgcactaggggacagttgatttcaatctaagaaaagttaacacttgggaattacaagaagtaaaacaagtgcaactaaatcatttattagttgttttttgaaagcagttttatgtataaataacaaatgtttatatttaactaaatgtaaggtacgaattattacatattaaacttttcttccccttcctagttctgaagtagnnnnnnnnnnnnnnnnnnctactgtcacattccatatattttgaatatttaactcatctagttaataatgtttttattccatgcgaatgatttgatattttcatccttatttctctttggctacaatttatattgagttatatctgtacattctggtaatctaaaatccttaaaaatactctaatagccttgagtgaccaactttttttt

SEQ ID NO: 188353 - DNA, 1479 bp, Homo Sapiens
ttgggtttgggtggaagactctgaacttagttgtggagtgctgggaagagagccaggtgaagtcccagcaggcaggaagccccacgcggcccaactacaggggtggccattcacagtgtattttctgtgagtggcaccccctggagttgtgcagtcacagcctcacactattgggaggggtccctctgcaggaaggaaaggaagcactggaaatcagagaggggtcaggcctagacatggagctgctggagtcttctgcacagctgtgggtttctcatcctgccccctctcttgtactgccatcccgggcttgtctctgttgagctcctctctctagctgtcatcttctcttccttccagttccctggctggtcccagggcacagaaggctcactgatcatcgccctggggaacgaggatgccctgggagaatactcctgcaccccctacaacagtcttggtaccgccgggccctctcctgtgacccgcgtgctgctcaaggctcccccagcttttatagagcggcccaaggaagaatatttccaagaagtagggcgggagctgctcatcccctgctccgcccaaggggaccctcctcctgttgtctcttggaccaaggtgggccgggggctgcaaggccaggcccaggtggacagcaacagcagcctcatcctgcgaccattgaccaaggaggcccacgggcactgggaatgcagtgccagcaatgctgtggcccgagtggccacctccacgaacgtctacgtgctgggcactagccctcatgttgtcaccaatgtgtccgtggtggctttgcccaagggtgccaatgtctcctgggagcctggctttgatggtggttatctgcagagattcagtgtctggtacaccccactggccaagcgtcctgaccgaatgcaccatgactgggtgtccttggcagtgcctgtgggggctgctcacctcctagtgccagggctgcagccccacacccagtaccagttcagcgtgctagctcagaacaagctggggagtggtcccttcagcgaaatcgtcttgtctgctccggaagggcttcctaccacgccagctgcacccgggcttcccccaacagagataccgcctcccctgtcccctccgcggggtctggtggcagtgaggacaccccggggggtactcctgcattgggatcccccagagctggtccctaagagactggatggctacgtcttggaaggccggcaaggctcccagggctgggaggtgctggacccggctgtggcaggcacagaaacagagctgctggtgccaggcctcatcaaggatgttctctacgagttccgcctcgtggccttcgcgggcagcttcgtcagcgaccccagcaacacggccaacgtctccacttccggtctggaggtctacccttcgcgcacgcagctgccgggcctcctgcctcatcccgtgctggccggcgtggtgggc

SEQ ID NO: 188354 - DNA, 1507 bp, Homo Sapiens
ttgggctgctttatcatcctggagaacatctttgtcttgctgaccatttggaaaaccaagaaattccaccgacccatgtactattttattggcaatctggccctctcagacctgttggcaggagtagcctacacagctaacctgctcttgtctggggccaccacctacaagctcactcccgcccagtggtttctgcgggaagggagtatgtttgtggccctgtcagcctccgtgttcagtctcctcgccatcgccattgagcgctatatcacaatgctgaaaatgaaactccacaacgggagcaataacttccgcctcttcctgctaatcagcgcctgctgggtcatctccctcatcctgggtggcctgcctatcatgggctggaactgcatcagtgcgctgtccagctgctccaccgtgctgccgctctaccacaagcactatatcctcttctgcaccacggtcttcactctgcttctgctctccatcgtcattctgtactgcagaatctactccttggtcaggactcggagccgccgcctgacgttccgcaagaacatttccaaggccagccgcagctctgagaagtcgctggcgctgctcaagaccgtaattatcgtcctgagcgtcttcatcgcctgctgggcaccgctcttcatcctgctcctgctggatgtgggctgcaaggtgaagacctgtgacatcctcttcagagcggagtacttcctggtgttagctgtgctcaactccggcaccaaccccatcatttacactctgaccaacaaggagatgcgtcgggccttcatccggatcatgtcctgctgcaagtgcccgagcggagactctgctggcaaattcaagcgacccatcatcgccggcatggaattcagccgcagcaaatcggacaattcctcccacccccagaaagacgaaggggacaacccagagaccattatgtcttctggaaacgtcaactcttcttcctagaactggaagctgtccacccaccggaagcgctctttacttggtcgctggccaccccagtgtttggaaaaaaatctctgggcttcgactgctgccagggaggagctgctgcaagccagagggaggaagggggagaatacgaacagcctggtggtgtcgggtgttggtgggtagagttagttcctgtgaacaatgcactgggaagggtggagatcaggtcccggcctggaatatattttctacccccctggagctttgattttgcactgagccaaaggtctagcattgtcaagctcctaaagggttcatttggcccctcctcaaagactaatgtccccatgtgaaagcgtctctttgtctggagctttgaggagatgttttccttcactttagtttcaaacccaagtgagtgtgtgcacttctgcttctttagggatgccctgtacatcccacaccccaccctcccttccctttcataccccttcttcaacgttcttttactttatactttaactacctgaga

SEQ ID NO: 188355 - DNA, 987 bp, Homo Sapiens
ggcagctgggatctagccccactcgctgtagcccccgttgcacatatttttcaatcttgagctcgtggaccctggggataccctgcacgcctggccgacggagctcgggccggggcccgtcggatgactgtctccagtgctgcacggtagcagtgagttcgaaggccagggccagctttctgtagccgctcagcatattcctccagggcatggcaggccccctcccgaagccggtagggcagttcatagccaggcagcccagccacccactgactcagtgggtagccgccagggtcactcagcttcatgtagcagcagcccactgaggccagggccaccacctcaggacagcaggagaagtgtctcagcaaggcaacactcagatccccacaggcgtggaggcctgtgagcagcaagcgggccctgccctgacacgggttctccagtggaagcagaagctcctcacacagggctgtggggtctacccacctaaccacgtggtgtggggagtgacgagggctggtttggaccacctgcgggttcctcttctcctctttctccagagcctgcagaagctcctggtccaggcgctgggctctctccaccagtctctgatccccttcgatgctcttcaccatcaaccccaggccaagagccatgaagcgggagagatggccctggcctgagcccacgtctacaacctgggtgcagcctgtgaaatcactcagcttcttcaccaactctcccagcctccggatctcatgctgcttcttgggcctgacatgtttccggaatggagctgttagtcgggagctctggctggggttctccaggaattctgagggggtctgaaagccaggcatccgggtaaaggccagggcacacgccgtggacttcagggccagcagggtgagtggccacactgacctgtacctgagatagtccagccgaggcctccagtgaatagtcccatgacatctgagccaa

SEQ ID NO: 188356 - DNA, 1441 bp, Homo Sapiens
ttgggccgtcttcatgtttgctttcgcttccctctacacgcaaatcccaggcctgtatggccccgagggcatcctacctgcaaggaggacgctgcggcctcagggcaaggggcgctggcagcagctgtgggagaccccgacgctgctgtgggaagcgccgagactggggctggacacggcccagggcctggagctgctgagcctgctgggtgcactagtggccctgggagccctgctgctgagcccactgcgccaccccgtcatctacttgctgctttgggccgcctacctgtcagcctgccaggtgggccaggtgttcctttatttccagtgggactccctgctgctagagactggcttcctggccgtgctggtggccccgctgaggccagcctcccaccgcaaggaggccccccagggcaggcaggcaggggccctgccccacgaagacctccccttctggctggtgcgatggctgctgttccgcctcatgttcgcctcaggcgtggtcaagctgaccagccgctgccctgcgtggtgggggctcactgccctcacctaccactacgagacccagtgcctgcccacgcccgccgcctggttcgcacaccacctgccggtctggctgcacaagctcagcgtggtggccaccttcctaattgagatcgctgtgccgcccctgttcttcgcccccattcgacgcctgcgcttggctgctttctactcgcaggtgctgctgcaggtcctgattatcatcaccggcaactacaacttcttcaacctgatgacgctggtgcttaccactgcgctgttggacgaccagcacctggctgctgagcctggccatggcagccgcaagaagacggccacctcctggcccaaggccctgctggccaccctgtcgctgctgctggaactagccgtctacgggcttctggcctatggcactgtgcactactttggcctggaggttgactggcagcagcgcaccatccactccagaaccactttcaccttccaccagttttctcagtggctgaagacactgacgctgcccactgtgtggctgggtgtggcctccctggtctgggagctgctgagtgccctgtggaggtggacccaggtgcggggctggctacggaagctcagtgctgtagtccaactgtcccttgtgggcactgcgaccgtggccttgttcctgattagcctggtgccgtactcctacgtggagcccgggacccacgggcgcctctggaccggggcccaccgcctgtttggtgccgtggagcacctacagctggccaactcctacggcctcttccgccgcatgactgggcttggtggacggcctgaggtggtgctggagggcagttacgacggccaccactgaacggagatcgagttcaatgtaaaaccctgggaacctgagtcggccgccccc

SEQ ID NO: 188357 - DNA, 2760 bp, Homo Sapiens
  misc_feature (1810)..(1847): n is a, c, g, or t
aaaaagttggactcacttctcaatagttctgaaacacagacaacatcaagggggaaagaaagtgaagattcatcttataagccaattttttcaacacttcctgaaaccaacattttaaatgtggttaagtttctaggcttgtgtacatctatacatccagaaggttaccaggatcgtgaaataatgttgctgattttaatgttatttaaaatgagtttggaaaaacagctgaaacagattcctttagtagactttcaaagcctcctgataaacctgatgaaaaacatcagagattggaacacaaaggtgcctgaactctgtctgggcataaatgaactctccagtcatccccacaacctcctgtggttggtacagctggcctaattggacatcacgtggaaggcaactgagacagtgcctcagtctagtgattatttcaaagcttttggatgagaaacacgaagatgttcctaatgccagtaatctgcaggtatcagtcctacatcgctatcttgtgcagatgaagccttctgatttgttaaagaaaatggtcttgaagaaaaaggctgaacaaccagatggcattattgatgacagtcttcatttagaacttgaaaagcaggcatattacctgacctacattcttcttcatttagtcggtgaagttagttgttctcattctttttcttctggacaacggaaacactttgtgctactctgtggggctttggaaaagcatgttaaatgtgatattagggaagatgcaagacttttttacagaactaaggtgaaagacttggtcgccaggatacatggaaaatggcaggaaataatccagaactgtcggcctactcaggggcagcttcatgacttctgggtaccagattcttaataggagttgcagcagcaaaaatatgaaccaagagaaattcaataagagcctttcatagaggagtagaaaggattattacagaatccaatgaatgccaagaaaatgtacagcaaatgtgccacttgaatatctagtatgaagctggtaatgaagaaattgccatttctgaagcagatatgaaatatgatctgcttaattgttaaggcaactgacctttcaaaagtgcagagtcttattaaaagaggggaggggtagaagcagaataatagtcatatgtctaacctgccccagttaactcctcttgttaaattataagccagttatcttttttagatagtatttttgtcacttggataatcacaggaaatatataagaaaagagcttggactaacttgagaagttggacatggaaagcaagaccaagttccagttgggtttaattttccctcttggttattttcggacacaaagggaatgcttaaaactgagtttagtaataaaaagcataaatctcttctgtaacttttataaaccacagggaggtttcaatccatgcattttccttcattactcaagattataaatctgtttttaaaatacatctaaacaaacagttgagaaacaaaagtttggcatgttgtcagatccccttaagaggaagaggttaagctgtaaagtagtggccctgttttgatgccagaacattcatatgctgtttgttctggatttcttttaaatgcatgtattttaaatactggttaaatcttagaatcttggctatatcttagaattctggctcttggtaaccatattacagaagtctatattgtaaaagcctaaagatctggacaagtttccaacaaccttgtttccatgagtatataattttggcagacacctgaattctttgggacacnnnnnnnnnnnnnnnnnnnnnnnnnnnnnnnnnnnnnncgcttgtatcttgaagttgttgcacttcaaaaccacagctgctgtaaattcttaaacactggagagccatcctttggtttaaatggtagagggttagtggaagtgcacacgttgtttttagcccaggggtagtaacaaactcttactagccaactagaaaattattttgttgacgagatgtcccttttaggagggtttgtttcctgaaagaatgccaactttttttgttgttctttcagtattggcttgagtgacctgttctcctgagtgctctagtgtctccagttgtgggggggaaagatgatggaggggaacagaaactggacttgatgtttgcggtttgagaggcaagaaaataaaataactttctacctctaaattgaggcttaggagtaaaaagcattttgtcctaaatttatcatttaaaatagcatcagtaacttttgagctcatgtcaatcaagcattggcagtcagagattttatagggaagactaagtaaatccagtttccaagaacctaaactgattgaggctccaagagtcagaccaacaaaagttttattctgtgttgtttactggtaagaatattattatcttgatactacctctcaagggtattgttacaaaatgccacttatggttaaagagatagatacaaagagttctatttgacagaagcttgaaactctggcatctatctgcccaacgatgggggctttcgttctgtaatttaatcctttgtagatacattatttgtgtgtaattttatacgtgttcatatttttctcattttgcattgtgtaaagtgtacaaaatctcaaagtataaaatactgcttatattgcttgtaatttacagtgtgtaaatattttctaattgtgtacattgatgggggggacaagtgggttattc

SEQ ID NO: 188358 - DNA, 2102 bp, Homo Sapiens
ttggctctcatgaaagtgaagagtgagatgattgacatcactagatcaattattaatatcattgtgccacttgctgaaagaactgaagcatttgtacaatttatgcagaacttcagggatgtttgtattcatcaagacaagaagattcatctcacagtggtgtattttggtaaagaaggactgtctaaagtcaagtctatcctagaatctgtcaccagtgagtctaattttcacaattacaccttggtctcattgaatgaagaatttaatcgtggacgaggactaaatgtgggtgcccgagcttgggacaagggagaggtcttgatgtttttctgtgatgttgatatctatttctcagccgaattccttaacagctgccggttaaatgctgagccaggtaagaaggtgttttaccctgtggtgttcagtctttacaatcctgccattgtttatgccaaccaggaagtgccaccacctgtggagcagcagctggttcacaaaaaggattctggcttttggcgagattttggctttggaatgacttgtcagtatcgttcagatttcctgaccattggtggatttgacatggaagtgaaaggttggggtggagaagatgttcatctttatcgaaaatacttacatggtgacctcattgtgattcggactccggttcctggtcttttccacctctggcatgaaaagcgctgtgctgatgagctgacccccgagcagtaccgcatgtgcatccagtctaaagccatgaatgaggcctctcactcccacctgggaatgctggtcttcagggaggaaatagagacgcatcttcataaacaggcatacaggacaaacagtgaagctgttggttgaaatcataattaatgcgttactgtatgaaccacaaaacagcactatttatttagccttacttctacttccagatgcagtgcctcttttggagaagacatgtttatttttcatgttctttctgacattactttagcaattcaacttgatgtgagaagaaaaaacaaatgtttcaacacaaaatctctgttttgtgagaatactgcactatggaataattgacaaattgaaatctcatatttgtcccaaaagttgttttgagttagttctacctggtgcccatgttctgattgtgtgtgggattgcatggtgtcctgattgcatctaggtggagcggatggaatgtgctgggccactgttgggtggagagcagcacattcttacagaggagatggagcgttatgagcatagtatgtggatagggatcttcacctgcccgcccctgagtcagcctccttgacttgatagcttgaagaatccttttccactgaaatagaggataattaattgacacatctgaaatccccaatcaatcaatcaagagaaaggtagaactaaaaactccttaacttactgttgcttacacccctgaaagtctgtttttaagcaaatgggtaatagtagaaaataggttagaatctatggcttgattaaaaatatgttattacattatcatgttcaggattaggattagtagtcagttgctgtaaactattttgaacaaacagaaaagaacacggaaacatttttaacagagcatttaattatgttggaatacaggatcctagctctgtctgggaacattagtttatttgagccagctctatcagggtcttcccatggtggttcagaatagatgagcatagcatggttttgtttgtttttgctttcaattttctaatttggcatggatccatatgtatttactatcctttttctaatatattaatatatgctacatttgtatttgcattactataatactttgagttgaaaaagagtttcattgtggagagaaaaagcaaatggtatgccacaagatcactctgatttgagaaaagggaggaggggaagatagtctgaatggaaatctgaaatacggaatgttttagagaaatatgtcacttgcatatagaatgttttaattgaggtataaattaatgagacaaagtgaaaaagaaattatattcagataggactgcactacattatttgtcacacatggatctgttaccatc

SEQ ID NO: 188359 - DNA, 1868 bp, Homo Sapiens
ggggccaatgtcctgtacagtagaagccgggggtttccgtgctgcacccgcagcaccagggcacgcaccgtggggaggcagccttgggctgtgcccgcgacagggcccctgcatgctgagcaacagcctcacatgagcaggcagcacggcctcctctgcgcgggagcctccaccgccggggctgtgagcttgagcaggggtgggtccccgcctgccctgaagccacagtcaggctggggggtcaccgtgtcaccaggcaggccaggctcagctgtctcagggctctcgggcccctcaggtgggggtcgctgcagcttggcagcagctcgctggcgcttcaggtcagccagggtgtggtgggccttgtcgtggaccagggtgtggggggtggtgctgtccagggggctcagctggtaggagacactccggtctagtcgcttggagtatagatgccgcactggggagccccctactcggccattgtgcggcctgaccacttcggggttgtcctcctccgggggcggcggcgtgagctctgcgcctgtctggcggtcatcgttgtcctcgggcggctccgggctggtgggcggcggctgttgccacacgatggcctcctgggcgtgctgcttgcggtacaggtcggtgcgctgggttaggctcacccgcctcaccaccttcccgcggctgccggcgctggaggtgcggcggcgcagcaaggagcgctggcggctctgggcgcgcaggagggcgtcgtgcttgtgcttcagctccagcagcttggcccgcacctcctcgtccccgcacacatcaaggggcgtctcgtccatcagggactttgcgttcaggtcggccccgtgcgccacgagcagctccaccaggggcacctggccccagtaggccgcggcgtgcagcggctcccagccgtcttggtccttagcgctcaggctggctcggtgttccagcagcagggcagccgcctcgctgaacccgttggcggctgcgacgtgcagcagcgtggccccgtggtccaggggggcatggaggtctgccccggcctgcagccggctccggatgtcgtccagcatgcgcagttctggcacggcccgggcggcctcgatgctgtcctgggtgatgccacggtcccatggcagtctccaggcagtccagcgtctgctcatcatcacacaggtcatagggcatgttcccgtcggtgttgaccgccaggagattggcgccactggcgatgagcagctccaccaggtgcaggtggccgcaggtggccgcagcatgcagaggcgtccagcactcactgtcacaggcattgatgttggccccagcctccaggagctgctgcaccatctctcggaaatcatcaatgcagcactggtgcagggccgtcaggccgtcctcgttggccaagtcagggctgaccccactcccaaggaactggcggacttcttccaggtcatttcgggcagcggcctccagaaggacaacactgggagggaagaggacctgcttcaggagcccttggctggctgcctccttccggggacgctccccaggacccttcttgccctgggcctccttctcagcctgggcccacatcttcacctgctgggcgcgccgcttctgggcatgcttcagccgctcctgtgtgctcatcctgcccaccatgggcatctctgccagcagctccaggtgctcggccatggcggcggctgcttgcccacagggctgctcggggcaccagagtggggagcttgggggccaggctgggcctgaggggtggggcagctagctggactggcaccctcgggggcatccccttcccagagcttcgtgcccttgggtgggtcaggagccaa

SEQ ID NO: 188360 - DNA, 1579 bp, Homo Sapiens
  misc_feature (127)..(219): n is a, c, g, or t
ttggggaagtttgtgtctccaacgaatcccctcagtgctccccagccccgcgcgctccggccgttcccgccgtccccgcctgtggctgccccctgcccaaccccgcgatgtgaccctacagccgaannnnnnnnnnnnnnnnnnnnnnnnnnnnnnnnnnnnnnnnnnnnnnnnnnnnnnnnnnnnnnnnnnnnnnnnnnnnnnnnnnnnnnnnnnnnncgcggcggaggaggaggcggcgataaagttggtgtgctggtcccgcgcgcagattgggggcgtcactgcgggccccggtccgagggggggtgtcggcgttggagttgtgaattcgctgcgtttccatgaaatcctgcggagtgtcgctcgctaccgccgccgctgccgccgccgctttcggtgatgaggaaaagaaaatggcggcgggaaaagcgagcggcgagagcgaggaggcgtcccccagcctgacagccgaggagagggaggcgctcggcggactggacagccgcctctttgggttcgtgagatttcatgaagatggcgccaggacgaaggccctactgggcaaggctgttcgctgctatgaatctctaatcttaaaagctgaaggaaaagtggagtctgatttcttttgtcaattaggtcacttcaacctcttattggaagattatccaaaagcattatctgcataccagaggtactacagtttacagtctgactactggaagaatgctgcctttttatatggtcttggtttggtctacttccattataatgcatttcagtgggcaattaaagcatttcaggaggtgctttatgttgatcccagcttttgtcgagccaaggaaattcatttacgacttgggcttatgttcaaagtgaacacagactatgagtctagtttaaagcattttcagttagctttggttgactgtaatccctgcactttgtccaatgctgaaattcaatttcacattgcccacttatatgaaacccagaggaaatatcattctgcaaaagaagcttatgaacaacttttgcagacagagaatctttctgcacaagtaaaagcaactgtcttacaacagttaggttggatgcatcacactgtagatctcctgggagataaagccaccaaggaaagctatgctattcagtatctccaaaagtccttggaagcagatcctaattctggccagtcctggtatttcctcggaaggtgctattcaagtattgggaaagttcaggatgcctttatatcttacaggcagtctattgataaatcagaagcaagtgcagatacatggtgttcaataggtgtgctatatcagcagcaaaatcagcccatggatgctttacaggcctatatttgtgctgtacaattggaccatggccatgctgcagcctggatggacctagcactctctatgaatcctgcaaccagcctcaggatgccattaaatgctacttaaatgcaactagaagcaaaagttgtagtaatacctctgcacttgcagcacgaattaagtatttacaggctcagttgtgtaaccttccacaaggtagtctacagataaaa

SEQ ID NO: 188361 - DNA, 1435 bp, Homo Sapiens
tcataaaagccagccaggaggtccagggcccgccccttggtgtagaagccgatgatgttcttcatgatctccggctcctttccgccagtccagggactgcaggtagttagcagccatgatgtagatttccttctgcctggacacgctcgcgaagaacgtgattttctccgtgtctccggatttgagcagcgccctcatggccttcagcttgttgccggcctgcgtgtacttcttggtggccaggtggtagctgccctggcgcatgcagcagtctgctatctgctccagcagctcccgccgcgactcctcaggcaggtccgaggagtccttggccacggtcatcttttccgccatctcctcggtgatgctcatgttctgccccaggcacagctgcagggcttcctgatacttcctggcagccagcagcagctctaccgccctctcgtactgactgtgctcgatgaagaagtcggagcagcgggccaggagcgcagggtctgacgtctcatccaggtcctctgctatgagctgtagggccacaaactgctgggtggcaaaggccagctccagggccttggagaagtggccagccttgtggtacagcatgaccgccctgtccatctgcacgcccttctcctcgtagtatcgggccacctcgatcatgtcctcgggggagctcagcagggccaagttcatgagctggtcgtccaggccgttctccttgcacaggcggatggcattcttgaaggcctgtgcccgggtgtagaagtgcaccgcctgcccgacctcctcctggctctcgtactggcgggcgaggtggtaggaggccgccaggtttcctgtctcgttggctatttgcgcagccttctggacattgccctggaagcagtggatgcggaccagggagaagtggtcccgggccagctcgtagtagtgcagcgcagcgtccatctcgccctggctctccaggtactgcgcccaccaccgccacagggtcttatccttcattttattcacgtagagctccagggacggcaggtcctccgacagcatcctgggcacctcgaagcggtgcgtgtccgacttctcgtagtaactgagggcccggctgcagtcggcgctggcctccaggtgcccggcatagcggtggtaggtgctgcgcaggtgcacgcgatcgtggtgctcggctacctggagggcctcctgccaccggcccgcagcctggtagaacttgttcaggaggtcgtggcgcttgcacttcctgtacagctgctcggcgtcctcctgaggaatgaggatgggcaggtgtcgtgcagcctccacacacccacgtctcaaacacactgttccacgccaggccaccggtcaccgcaccttcccacaccgccaagcacactgacacacggggccgctgtgggcacagcaaacgccccaa

SEQ ID NO: 188362 - DNA, 1378 bp, Homo Sapiens
ttgggttaagttgaggctttttccagctttctctggttcatttgattgcttgataaggcctcaggatctcagcattgcacaatgcctcatggaagcctttgagggtatcacacagacacccccaccttcctccagcctgtgcgcacctgccctccttgcagcccagcacacctgcaggtgtaagggacgattggagtttcttcccagagagtctgtcccagaaggactgtggcttgtgtgtgtccatctcgcctgttggctcagtgcttcatcccatttgcagagcctcagacacgtcttggtggtgaggctcagttacccctgggcttaggctgaggcgggccctgtgctgggggtggtagaaaggatgctgctgaggcagctggaggagtgggagtagctcagaggggagggctgttggatgtatggggagctggcagagcaggtggcagtcactgggacaaggagggacttgcctctcttctcattattgtgtcctttgctttagtgtcagtcctggacttgtgcaggcctgttttgtgtagatctgttttggaagatggcatggtctaggtggttgaaggatgtagtagaaggatggatggtggaaggtggggacgttggtggctggctgaggtgcatgggccccacacaggacagctggagaatgggccgtccacttggcctcgttctgcgaggggctcatgggtctgagagcccccacccactaggcttgattgcatccctgttgtgccctttaagagacatgtttccaccccacccccaaccttgtcccaagtgccctggactaaatttcctgtgccagtgactgcagttggccaagggacaatgtggaaaacccagtgtccatctttccaccctccctgatctccagaaccttcgactgacccccttgtctttatgctgatgttgagttttgggattgttactggttgaagtgggggcagatgcctgtcaccaaggtgttgactgtgtgagaaaagcagtttgggtgacaaatcctgtgtggcacaagttggatcgcttcctagaaataagcaacacctctcccaaaaagcagcccacaaggcaggggcccagcagcccagccatcactcatctttgaggaaatgagttggtagcctctgtgcactgtttggtggccacatcacaggtgatgtcctgttcacatacctgcttgtatttaaagccctcagtctgtcctgttgtgtggggcgaagtgatggactctgccaggtggacatgctgtgggtggatgttcccggcgtgtgccgggcctgaatggacaggggccacttcacagcatgtcagggaaaatcactgtcacacaattccaatggattttgtgctctttttg

SEQ ID NO: 188363 - DNA, 1304 bp, Homo Sapiens
  misc_feature (75)..(94): n is a, c, g, or t
  misc_feature (674)..(703): n is a, c, g, or t
ttggcaggaaggaactctgtggctggtctccgttaagtatagggctttttgacagctttttgagacctcttaagnnnnnnnnnnnnnnnnnnnntgaaaggaatcttttttagaaatagagatgctttatagtagatcacttaaatactggatcttttgctagtgtgaaaacattgggaatttaatgacattattgagctgaaagaaattacatgagtccagctaccctcatttctttttttatgtgacatggagcacaaagaactgaaaatatgttttgagggagcatgacatccttgacctcatttgaaattacttccattttcaaaaaccatcatgttttgcagatacattttgagaaaaaccatcatgttttgaggatacatttgtgaaagtgcaggcatgccaatgactactcagttttaggacttttgtggaagaaaaaattaaaagggagaagaaatcaattccactacttttgaagttctgcaacagatgagattttgtttgtaaagttttgtagtgtattaaccattggtttatcactctagattcaacatattaaaatgtattcaagctcacagatttttaatcagtaaggcctatctatattagttgtcttttatttcttctccttgtggacagttgttaatgaaaggagtaaggatttcccnnnnnnnnnnnnnnnnnnnnnnnnnnnnnnaaccaaattcttagagatactatagaatccaaatgagaactgaattggacctcaagtcttctattcctgctaatagagttctttgtgatggtaactgctgtgtcgtttgttttccacaagttgggatggattcatgtcgatacatccccatgcccttgacctcttctggctttctcctgtgctctgacaaactgagccagccttttagatctacatgaataaacaaactattttaccaagaaaaatctcagcttgcttactgcttaattaaaaacctacaatttacacacctccctgccttcaagactgtgagctttggatagccctgcttaaatgtttgtcaacaacaagagtcgtaatgtgtcagtacattgtagctcctttgaaatttaactctttctgtgttacatgaattgttttaaggagtccggcaaacatgtttcttcacttccatgaaaatggtgccaagtgtcagactctaatgagccctcagctcaggttttaatttctattgaatgctaacattcttctgattttttggtatcttttataatcatatcggtttctgctgtattaatgacaattattcatgaaaataaaa

SEQ ID NO: 188364 - DNA, 1674 bp, Homo Sapiens
ttgggtccacctgatcctgcccaagtgcctaccacagctgtgacaataacttcttcagctgagctgttcaaaaccataatatcaaccacaagcactacttcacagaaaggccccatgagcacaactgtagctggttcacaggaaggaagcaaagggacaaaaccacctccagcagtttctacaaccaaaattccacctataacaaatatttttcccctgccagagagattctgtgaagcattagactccaaggggataaagtggcctcagacacaaaggggaatgatggttgaacgaccatgccctaagggaacaagaggaactgcctcatatctctgcatgatttccactggaacatggaaccctaagggccccgatcttagcaactgtacctcacactgggtgaatcagctggctcagaagatcagaagcggagaaaatgctgctagtcttgccaatgaactggctaaacataccaaagggccagtgtttgctggggatgtaagttcttcagtgagattgatggagcagttggtggacatccttgatgcacagctgcaggaactgaaacctagtgaaaaagattcagctggacggagttataacaaggcaattgttgacacagtggacaaccttctgagacctgaagctttggaatcatggaaacatatgaattcttctgaacaagcacatactgcaacaatgttactcgatacattggaagaaggagcttttgtcctagctgacaatcttttagaaccaacaagggtctcaatgcccacagaaaatattgtcctggaagttgccgtactcagtacagaaggacagatccaagactttaaatttcctctgggcatcaaaggagcaggcagctcaatccaactgtccgcaaataccgtcaaacagaacagcaggaatgggcttgcaaagttggtgttcatcatttaccggagcctgggacagttccttagtacagaaaatgcaaccattaaactgggtgctgattttattggtcgtaatagcaccattgcagtgaactctcacgtcatttcagtttcaatcaataaagagtccagccgagtatacctgactgatcctgtgctttttaccctgccacacattgatcctgacaattatttcaatgcaaactgctccttctggaactactcagagagaactatgatgggatattggtctacccagggctgcaagctggttgacactaataaaactcgaacaacgtgtgcatgcagccacctaaccaattttgcaattctcatggcccacagggaaattgcatataaagatggcgttcatgaattacttcttacagtcatcacctgggtgggaattgtcatttcccttgtttgcctggctatctgcatcttcaccttctgctttttccgtggcctacagagtgaccgaaatactattcacaagaacctttgtatcaaccttttcattgctgaatttattttcctaataggcattgataagacaaaatatgcgattgcatgcccaatatttgcagggacttctacactttttctttttggcagcttttgcttggatgtgcctagaagtgtgcagctctacctaatgttagttgaagtttttgaaagtgaatattcaaggaaaaaatattactatgttgctggttacttgtttcctgcc

SEQ ID NO: 188365 - DNA, 1266 bp, Homo Sapiens
ttggcagctctgcccctgcgagcttccgccgagaccgccccccgggaagccgcgtttccttcctgcagtcgcggtccggcgtggggcacggaggggctcgcgctcccagaagccggcaggccttcccgcgggcgggcccgcagcgcgctccgccccggaaacacgcccatggccgccttggcgcgctttcaaacgctcaggtttcctaccttccggctgcttgggaacttctttcttgcccgccaagcccgcagccacccgggcgcggcgggactcctagacccggcgctgcgatgaagaggacccgcgacgaggtggatgcgacgctgcagatcgccaagctgaatgcggccgagctgctgccggcggtgcactgcctgggcttcggccctggggccagcggcgctgcagccggcgacttctgcctgctggagctggagcccacgctgtgccagcagctggaggatggacacagtcttgtgattcgtggtgataaagacgagcaagctgtgctgtgcagtaaagacaaaacatacgacttgaagatagcagacacttccaatatgttgcttttcattcctggttgtaaaactccggaccagttgaagaaggaagattcacactgtaacattattcacactgagatctttggtttttctaataattattgggaattaagaagacgtagacccaagttaaagaagctaaagaaacttttgatggaaaatccatatgaaggacctgacagtcaaaaagagaaggattcaaatagctcaaaatatacaactgaagatttgcttgatcaaattcggcaagtgaggaagaaataatgacccaattacaagttctaaatgcctgtaagattggaggttattggaggattcttgaatttgattatgagatgaaacttctgaatcatgtaactcagcttgtggattctgaatcatggtcttttggtaaagttcctttgaacacatgccttcaggaactcggaccattggagccagaggaaatgatagaacactgtcttaaatgttatgggaagaaatatgtagatgaaggcgaagtttattttgagttggatgctgataaaatatgtagagcagcagcacgaatgctacttcagaatgcggtgaaattcaatctcgctgagtttcaagaagtgtggcagcagagtgttcctgaaggaatggtaactagtcttgatcagcttaagggtttagcgctggtggatagacactcgagaaccagaaatcatatttttgc

SEQ ID NO: 188366 - DNA, 1063 bp, Homo Sapiens
ggagctttgggttgtgtatcagaatttactttcaggacaatgagtttggggctggttgggaagcaaagctggttgaggctgactatgaattagtgtcttgctgtacagcaggcacatgggcaacaggctgtaccaagggtgggatactaggtacttggggtaataaaggtgtagaagtaggtcctgctgcttggggaagaataggagtagaagctatcactgatggaatgaccaaaggatgcagcccaccaggctgagaaatataactagacactcctgctccaggagaggaagaggaagatggtgcagagagggagaaagccaatccagttgtactgctatgagatgtcttatctagtgagtgtgcgctaactaccacggtttcagctaaagtaggagtagaagtactgctgctaagctgaatggacagctgtgaagctgtgcttgggaatgaagtggtggtagaaactgatgttaatgtggctcccacagtagtgctgcctgctgcctgctgagatactacagctggaggcttaggacctggggtagcagtactgccccctgcagaggctgaagttgctgaaactgttactgaaggatacagtgctgtactagaaacaacgatctcagatgtggatgtggggacttgaagtgacggggatgtagtagatattgagacaactgcaggtattgtgatacttgaaactacgctggaaagtactggtgattcagacacaggtggtatggggagaccacctgaagttaccacacctgtgctggtggcaactccagcaatcccctcttcagtgggcactgtaacctcagactgaattactgatgtggaaatgtcattaggagggctgcttgttgcagggactggtgctgtggctgctgctgtggttgggactccagcaatgctacttaagaaaggaggtactactggaaatgttggtcctgtatgactaaagtttggaggtgctgtattgggtccttctgtcatttgggcacgtctaagttcagaaaaggcctgttgtagactaagggatgatgcagagtgagccaa

SEQ ID NO: 188367 - DNA, 1553 bp, Homo Sapiens
  misc_feature (1051)..(1082): n is a, c, g, or t
ttgggacttccccaggagtgtggagggggtggtgaggaggagcacctgggctctctacccctctcctcacagaagtacctgaaactaggtctggggcactcccaatgcagcgccttgtcagccaaggtgggcaggcagggactgtggcagcttatgtccaaagggagcccccatgcacaggaagccacagggttcctcttgtttcccccgctaacttcagcctctcatctgctgctccgggctgagggactagaggacatctcggtcgtttgaggggcatggccagtcgtggcaggccggccttcagcgtccggtcagggaagcgtgcagcccaaatgggcacttgcatgggagccacagaggagcgtccctggggattgttgggaccatgctgcccccactcccgcttttgttggggctctaagttctggaaggtgtgtgcacagagggtgctcatgggactcgcatgcagctctcagcactgggtgggagggcgttggcttgtccagaatggggacgtggggcagccacccctgcccagcgagagcgcagacaccgtgtgaggggacagcagcccttggtgcaaagccagagactgatcctggctctgacggctgaagagggaagacccaaggctgggtggtgtggctcgtgaatccacttagaattcttggcttgtgtcgcatactgggtgtcacggcacacatttactctgcattgtccccgtctttcccatcgcctagcgtttggggaggaacagggagagagcttcggggcgtctgtctccgtgctctcctgcctccaccgccttggttttgcttcctgctggaggcagggcacctgctgcgacccagattcttctgcaggatgtgtctgtctttgtcacggtggacagagggtgacatcataggagcagctcgctggccagaaggggatgggggcatccctgtgcctcactcagctcctgctgctcttagggaaaggaggcctgggtcaagccagcatccccttggtaaagacccccgcaggccaccaggcattctggacacgnnnnnnnnnnnnnnnnnnnnnnnnnnnnnnnnaaacttcacagcaggccagctgcagtgacttgtcatcaagagtcacctcagctgcgcccccctcccatcctttcctatgagaagccactgctttgggggcgccggctagaaaaagtagggtgcggtggccaggagggcccctgccgcgcggggggctgggtctggttgagtcgctgctttcccgagggcagcgcagggatccggggaagctgcggcagggagcgggcgccggcttcgtggctctgaggtgtaacgggggtgggctccctccctcggaggacatcgtctgtgtccaggtcagaaagtggcccaggaagggggcagtttctgtcgcggatccggtaggagcgcggccgcggtgcggtcggtgcagcgtggccaatgcgcggcgcgcgcgggggacagagcaggaggcggtctgtcacctcggccactgctgacctgggctggcctccccagccctcccgtggc

SEQ ID NO: 188368 - DNA, 1187 bp, Homo Sapiens
ttggtgatgacctgatgtccgttgtggtatttaaaattactggtgttaatggggaaattgacatccgaggggaagatacagaaatctgtcttcaagtgaaccaggtgacaccagaccaattaggcaatatcagccttcggcattacctttgtaatcgtccagttggttccgatcagaaagctgtaattcattccaaatcctctcctgagatttctctgagatttgaaagtgggcctggtgctgtaatacactctttacttgcagaaaaaaatggatttctgcagtgccacatagaaaacttcagcactgagtttcttacatcttctcttatgaatattcaacattttttggaagatgaaactgttgcaacagtaatgccaatgaagatacaagtttctaacacgaaaataaatttaaaagatgatagtccccggagtagtacagtatcccttgaaccagctcctgtaactgtacatattgatcatcttgtggtagagagaagtgacgatggctcttttcatatcagagattctcacatgcttaacactggaaatgatttgaaagaaaatgtcaaaagcgattcagtgctgctgaccagtggaaagtatgatctgaagaaacaacgcagtgtcacgcaagccactcagacaagcccaggggttccttggccttctcagtcagctaactttcctgagttctcctttgacttcactagggaacagctcatggaagagaatgaatctcttaaacaggaactggctaaagctaaaatggctcttgcagaggctcacttggaaaaagatgctcttcttcatcatataaagaagatgacagttgaatagcaggagtggcagtcaaaactgaaattatagctctggagtaggaaggttatatttataatgtggatgttaccagttaggggaagacttttattttcatgaaaagacaataaaacaaaatggaatgtgatgaagtggtgactatttcaaagccagtttagaaagtattagtacgggcattacaatcttttggttgttttgtgttttggggcttaaccctcttttaagctgttgtgatctggggaagtcaacacatagtgtaaaataattacatgcctaatgaaaagaagatgtcatttccttaattttgatatctcattttcggcattttttaaatgtaaaaggaaa

SEQ ID NO: 188369 - DNA, 1606 bp, Homo Sapiens
  misc_feature (614)..(635): n is a, c, g, or t
  misc_feature (652)..(753): n is a, c, g, or t
  misc_feature (799)..(910): n is a, c, g, or t
  misc_feature (922)..(935): n is a, c, g, or t
ttggggataaagttttcaatactttctactacctcagtttacttgagtactacattatagtttattctttgcttatctggtctaagagacttttaatgctagtagtaaagttggtttctgctttcattgactattttcatcataatttcatcattgattaaaaaaagaaaaccacttgtttattcagttattaaatatatttactatataacacatccattcttgctgtttaaattttcaatagttaatggaaagttgtctttgaccttgaatttacagcattgggtcacattttgccttgctgtgtatgtattcaagagacttccaactagacaaagaaaaaattgttgttttaatggaatgtaaacctgaaattggtgtgtctgcaatctgtttggcccatgaccttttacctagtcccagttattacctgagtctcccatggatgacttgctgccaaggagtgtttgtggatatattttctttggcttaattttcttattctgtgcattaacaaaattatccagttgtctgattttggaattctatgagtcaatctttttggcagaattcagaatattaaaaagttcatacatttgcgggccattgtaccnnnnnnnnnnnnnnnnnnnnnngacggagtttcactctnnnnnnnnnnnnnnnnnnnnnnnnnnnnnnnnnnnnnnnnnnnnnnnnnnnnnnnnnnnnnnnnnnnnnnnnnnnnnnnnnnnnnnnnnnnnnnnnnnnnnnacaagtgtgcgccaccacacccagctaattttttatttttagtaannnnnnnnnnnnnnnnnnnnnnnnnnnnnnnnnnnnnnnnnnnnnnnnnnnnnnnnnnnnnnnnnnnnnnnnnnnnnnnnnnnnnnnnnnnnnnnnnnnnnnnnnnnnnnnncagccttgtacnnnnnnnnnnnnnnattgtagctctgtatagcacttggataatgtctgggtgtctccttaaccatcaaactgttctttatttaaaatgtttaattaccgtttagaaattctagtcctcaataagtgggtggctcatgctattgttgttcctaaagctaagctttgctgggaaggaaatgacctatagtttcttaaagaatcattaatccttataggattcctgagttactgttttgttcctccccactgcttcccattcctgagttttgtaattcctaatccttctataatttctattaccttcaccatagtcattctttccttacgcaaagcccaaggaatgagctgctgctactttaaagtgtggtcattatgatgaatgtgaaaagagttttggcttgttctaaataatttttacaagttatggtacagacagttgttacatatcaaaaaaaacctgtttattgaaacaggaaataaaaaagggatcttttacattatagaataaaactaattttttcttgtatataaactaattggtttgattttaaatatttctggcttttattaatatgtcttaattttgagtttgaaaatgttaagtgcaataaaaacatactagtacagattttgttttgttccaattggcatactctggggatgatcacttaaaaaaacagatttt

SEQ ID NO: 188370 - DNA, 348 bp, Homo Sapiens
tgtacaaaaaagttggcttaattttgaccgtttctagaaaaatgttaagtgcaataaaaacatactagtacagattttgttttgttccaattggcatactctggggatgatcacttaaaaaaacagattttacataatgcctacttctggtagatgtcttatgagattgttctgctttttctaagttacttagatgttggatatgtacatagctgtttcttgttctgtatacatttctcaaatgtacacttgtattataataacctcccagttctaggggatatttgtgcaataaatacacatgtcaacttgaataaccgcaagaatttttctctcttatccaccttc

SEQ ID NO: 188371 - DNA, 1452 bp, Homo Sapiens
ttggccatggcggaggcggcggctgcagcgggtgggactggcttgggcgcgggcgcgagctacgggtctgcagcggaccgggaccgggacccggacccggaccgcgccgggcggaggctgcgggttctctctggccatctgctgggccggccccgggaggctctgagtaccaatgagtgcaaagcgcggagagccgcgtcggcggccacggcagcgcccacggccactcccgccgcgcaggagtcgggcaccatcccaaagaagcggcaagaagttatgaaatggaatggatggggatataatgattctaaattcatcttcaataagaagggccaaattgaattgactgggaaaaggtaccctcttagtggcatgggtttaccaacatttaaagaatggatccaaaatacccttggagtaaatgtggagcataaaactacctctaaagcatccttaaatcctagtgatacacctccttctgttgtaaatgaagattttcttcatgaccttaaagaaactaatatttcatattcacaagaggcagatgatcgagtatttagagctcatggtcattgtcttcatgagatatttttgctcagggaaggaatgtttgagcgaattcctgatatagttttatggccaacatgccatgatgatgtagttaagattgtgaatctagcttgcaaatataatctttgtatcataccaattggtggaggaacaagtgtttcatatggcctgatgtgtcctgcagatgagacaagaacaattatttctttggacacttcacaaatgaatcgaattctctgggttgatgagaacaatttgacagctcatgtagaggctggcataacaggacaagagttggaaagacagcttaaaaaaagtggttattgtacaggtcatgaaccagattccctggagttcaatactgtaggaggatgggtatctactcacgcatcaggcatgaagaagaatatctatggcaatatcgaggacctggtggttcatataaaaatggtaacacctataggtataatataaaaaagctgtcaaggacctcttatgtcaacaggccctgatatccatcacttcatcatgggatctgaaggaactcttggtgtaataacagaagctacaataaaaatcagaccagtccctgaataccaaaagtatggctcattacctttccctaattttgaacaaggagtaccctgtttaatacaaattgcgaaacagagatgtgctccggcatctattcgcctcatggacaacaagcagtttcagtttgatcatgctcttaaacctcaggtttcctctatttttacatcacttttggacggattaaagaagttttatattacaaagtttaaaggatttgacccagatcagctaagtgtgccctcattactgtttgagggggatcgtgagaaagttcttcaacatgaaaaa

SEQ ID NO: 188372 - DNA, 1782 bp, Homo Sapiens
ttggctgtgggccccggccccattcattgccgtggccggcgggcactggggccccgtgttttcagagtcatggaggcgctaattcctgtcataaacaagctccaggacgtcttcaacacggtgggcgccgacatcatccagctgcctcaaatcgtcgtagtgggaacgcagagcagcggaaagagctcagtgctagaaagcctggtggggagggacctgcttcccagaggtactggaattgtcacccggagacctctcattctgcaactggtccatgtttcacaagaagataaacggaaaacaacaggagaagaaaatggggtggaagcagaagaatggggtaaatttcttcacaccaaaaataagctttacacggattttgatgaaattcgacaagaaattgaaaatgaaacagaaagaatttcaggaaataataagggagtaagccctgaaccaattcatcttaagattttttcacccaacgttgtcaatttgacacttgtggatttgccaggaatgaccaaggtgcctgtaggtgatcaacctaaggatattgagcttcaaatcagagagctcattcttcggttcatcagtaatcctaattccattatcctcgctgtcactgctgctaatacagatatggcaacatcagaggcacttaaaatttcaagagaggtagatccagatggtcgcagaaccctagctgtaatcactaaacttgatctcatggatgcgggtactgatgccatggatgtattgatgggaagggttattccagtcaaacttggaataattggagtagttaacaggagccagctagatattaacaacaagaagagtgtaactgattcaatccgtgatgagtatgcttttcttcaaaagaaatatccatctctggccaatagaaatggaacaaagtatcttgctaggactctaaacaggttactgatgcatcacatcagagattgtttaccagagttgaaaacaagaataaatgttctagctgctcagtatcagtctcttctaaatagctacggtgaacccgtggatgataaaagtgctactttactccaacttattaccaaatttgccacagaatattgtaacactattgaaggaactgcaaaatatattgaaacttcggagctatgcggtggtgctagaatttgttatattttccatgagacttttgggcgaaccttagaatctgttgatccacttggtggccttaacactattgacattttgactgccattagaaatgctactggtcctcgtcctgctttatttgtgcctgaggtttcatttgagttactggtgaagcggcaaatcaaacgtctagaagagcccagcctccgctgtgtggaactggttcatgaggaaatgcaaaggatcattcagcactgtagcaattacagtacacaggaattgttacgatttcctaaacttcatgatgccatagttgaagtggtgacttgtcttcttcgtaaaaggttgcctgttacaaatgaaatggtccataacttagtggcaattgaactggcttatatcaacacaaaacatccagactttgctgatgcttgtgggctaatgaacaataatatagaggaacaaaggagaaacagggctagccagagaattaccttcagctgtatcacgagacaagttaattcggacagcagaagagaaactaaaaatgttgcatctggaggtggtggggttggagatggtgttcaagaaccaaccacaggcaactggagaggaatgctgaaaacttcaaaa

SEQ ID NO: 188373 - DNA, 1285 bp, Homo Sapiens
cctctcccaggccctgcagctgagactgtaccagctcctcccttagcacctccccttccctctgcacctccgctgcctggaacatcttcacccacagtggttttcaactcaggattagcagctgtgaaaattaagaagccaatcaagacgaagttcagaatgccagtgtttaactgggttgctctgaagcccaatcagatcaatggcacagtcttcaatgaaattgatgatgaccgaattctggaggatttaaatgtggatgaatttgaggaaatattcaagacaaaagcccaaggacctgccattgatctttcttcaaccaaacacaagatactacagaagggatctacaaagtgacattactagaagcaaacagggccacaaatcttgccataactttaaggaaagctggaaagactgctgatgaaatatgtaaagctattcatgtatttgacttgaagacactgcctgtggactttgtggaatgcttgatgcggttcctaccaactgagaatgaagtgaaagtgcttcggctctacgagcgggaaaggaagcctctggaaaacttgtcagatgaagatcggttcatgatgcagtttagtaaaatcgagaggctcatgcagaagatgaccatcatggccttcattgggaactttgctgaaagcattcagatgctgactcctcaactacatgcgattatagcagcatctgtctctataaagtcgtcccaaaaactcaagaaaattctggagatcatcttagcccttggaaactacatgaatagcagtaaaagaggagcagtttatggatttaaacttcagagtttagatctgctcttagatacaaagtcaacagacagaaagcaaacactgttgcactatatatccaatgtggtgaaagaaaaatatcaccaagtgtccctgttttataatgagcttcattatgtggaaaaagctgctgcagtctcccttgagaatgttttgctggatgtcaaggagctccagaggggaatggacttgaccaagagagagtacaccatgcatgaccataacacgctgctgaaggagttcatcctcaacaatgaggggaagctgaagaagctgcaggatgatgccaagatcgcacaggatgcctttgatgatgttgtgaagtattttggagaaaaccccaagacaacaccaccctctgtcttctttcctgtctttgtccggtttgtgaaagcatataagcaagcagaagaggaaaatgagctgaggaaaaagcaggaacaagctctcatggaaaa

SEQ ID NO: 188374 - DNA, 2987 bp, Homo Sapiens
  misc_feature (2369)..(2399): n is a, c, g, or t
ttggtctgatgagatctccgatatcaagacaacaagatcctcttatgattccagtgacatcttcatcaactcacccagctccgtctatatcttcattaacttctaatcagtcttccttggcccctcctgtgtctggaaatccgtcttctgctccagctcctgtacctgatataactgcaacagtatccatatcagttcattcagaaaaatcagatggaccttttcgggattctgataataaaatattgccagctgcagctcttgcatcagagcactcaaagggaacctcctcaattgcaattaccgctcttatggaagagaagggttaccaggtgcctgttcttggaaccccatctttgcttggacagtcattattgcatggacagttgatccccacaactggtccagtaagaataaatactgctcgtccaggtggtggtcgaccaggctgggaacattccaacaaacttggctatctggtttctccaccacaacaaattagaagaggggagaggagctgctacagaagtataaaccgtgggcgacaccacagcgaaagatcacagaggactcaaggcccgtcactaccagcaactccagtctttgtacctgttccaccacctcctttgtatccgcctcctccccatacacttcctctccctccgggtgttcctcctccacagttttctcctcagtttcctcctggccagccaccacccgctgggtatagtgtccctcctccagggtttcctccagctcctgccaatttatcaacaccttgggtatcatcaggagtgcagacagctcattcaaataccatcccaacaacacaagcaccacctttgtccagggaagaattctatagagagcagcgacgactaaaagaagaggaaaagaaaaagtccaagctagatgagtttacaaatgattttgctaaggaattgatggaatacaaaaagattcaaaaggagcgtaggcgctcattttccaggtctaaatctccctatagtggttcttcgtattcaagaagttcatatacttattctaaatcaagatctggttcaacacgttcacgctcttattctcgatcattcagccgctcacattctcgttcctattcacggtcacctccataccccagaagaggcagaggcaagagccgcaattaccgttcacggtctagatctcatggatatcatcgatctaggtcaaggtcacccccttacagacgctatcattcacgatcaagatctcctcaagcgtttaggggacagtctcctaataaacgtaatgtacctcaaggggaaacagaacgtgaatattttaatagatacagagaagttccaccaccatatgacatgaaagcatattatgggagaagtgttgactttagagacccatttgaaaaagaacgctaccgagaatgggagagaaaatatagagagtggtatgaaaaatattataaaggttatgctgctggagcacagcctagaccctcagcaaatagagagaacttttctccagagagatttttgccacttaacatcaggaattctcccttcacaagaggccgcagagaagactatgttggtgggcaaagtcatagaagtcgaaacataggtagcaactatccagaaaagctttcagcaagagatggtcacaatcagaaggataatacaaagtcaaaagagaaggagagtgaaaacgctccaggagatggtaaaggaaataagcataagaaacacagaaaaagaagaaaaggggaggaaagtgagggttttctgaacccagagttattagagacttctaggaaatcaagagaacctacaggtgttgaagaaaataaaacagactcattgtttgttctcccaagtagagatgatgccacacctgttagagatgaaccaatggatgcagaatcaatcacttttaaatcagtgtctgaaaaagacaagagagaaagggataaaccaaaagcaaagggtgataaaaccaaacggaagaatgatggatctgctgtgtccaaaaaagaaaatattgtaaaacctgctaaaggaccccaagaaaaagtagatggagaacgtgagagatctcctcgatctgaacctccaattaaaaaagccaaagaggagactccgaagactgacaatactaaatcatcatcttcctctcagaaggatgaaaaaatcactggaacccccagaaaagctcactctaaatcagcaaaagaacaccaagaaacaaaaccagtcaaagaggaaaaagtgaagaaggactattccaaagatgtcaaatcagaaaagctaacaactaaggaagaaaaggccaagaagcctaatgagaaaaacaaaccacttgataataagggnnnnnnnnnnnnnnnnnnnnnnnnnnnnnnnggcgtagataaagattttgagtcttcttcaatgaaaatctcgaaactagaagtgactgaaatagtgaaaccatcaccaaagcgcaaaatggaacctgatactgaaaaaatggataggacccctgaaaaggacaaaatttctttaagtgcgccagccaaaaaaatcaaactcaacagagaaactgggaagaaaattggaagtacagaaaatatatcaaacacaaaagaaccctctgaaaaattggagtcaacatctagcaaagttaaacaagaaaaagtcaaaggaaaggtcagacgaaaagtgactggaactgaaggatccagctcaactctggtggattacaccagtacgagctcaactggaggcagtcctgtgcggaaatctgaagaaaaaacagatacaaagcgaactgtgattaaaacgatggaagaatataataatgacaataccgcgccagctgaagatgttatcattatgattcaggttcctcaatccaaatgggataaagatgactttgaatctgaagaagaagatgttaaatccacacagcctatatcaagtgtaggaaaacctgctagtgttataaaa

SEQ ID NO: 188375 - DNA, 1633 bp, Homo Sapiens
taaacttgcccaaatgctgctgatactaaaaacagattagttatcatgggagaaaaatagataatctagattaaattgcatatccaaaggagcatataaaatgtttcttagcattaagtttttgttatagtactacgctcgagagaaacattaagaaaaaatctttctgattatcttcaatgttgttaaaaacaaacacctttcacgcgggtaattagtatgaatttggtcttacaaattacaaagtattctaatttaccaaattccatatttagattggggtggagagagaggctctctcgtccttcttcctaactttgcaaatccttgagctaggttgctcactaagctaccattcacaccaagggtgtgacaccatcgttaccatgctactctatcaagaacattctaaggtattttctataataaagataaatagaaaaaagttaatatacatgtcgctgtattttacaatgtttgcaacaaactgtaaactaacatagtttgaaccaacagtaccctcagttatacaaaacaatttcagcactgaggataggtgattcaaaaacactaaaaggaaggcatcaaattagactatgtctttttctcctcaaaatatattttcaaaactcagaattcagaagactgatactttcagaaattcctttgcttgagtttcccagatttttgctcagaaattgctactatttattataaatgttttaaaaaattcttcatcttaatgcaaatgaccagagcagaaaaactgtgacgtggacaacaggttcgaaaacccaactcacttagcttataaatttataatgtagtcctgcaagacaatggtctgttagtctagaggtccttgaaaaataagtctgatgtagccttgttcaccagccaactgatgtgcacaaaagggacaggctgcatgaaaagtatgagtaccatgaggaagtgggatctgggaccaataggcagttgtcttttctgaacacacatgcccacacgggctaaacgcatgggttggagggccggcgtccacataaaatccagcttcacatccaagccacagaggaacatagggaccaacagacctacacataggacattcacgatcttttccatcacgttcttctttgtttccccagttatgatagccatgtacatggccgcagtttagatatacccatggttgtttttcatctacaacgtctttcctcttcatactaggaaatgctagtgtgttgaaccctacagggcactgaggtcgtgctgcattgatttcctgtcttaaagcttctaaatgcttcacggtaggagtgtgggaaagcccttctgcagtacgccataacaatgttgcaccacagaggtcaattaacgagccatcttgtaactgattggtttcaatttccaccatttttcctctctgctgagccgatctggtttcacgtaggctaaatacatttccacacaccgatatttctctccatattccaggcttggagtcttctgtgaacccattgcgtggatgcatcacaagaacaccattagtggtcaagccatccatctgtccatctgatgtcttccatttggcagccttctccccaagaaagccaacttttttgtacaaagt

SEQ ID NO: 188376 - DNA, 2413 bp, Homo Sapiens
  misc_feature (1855)..(1910): n is a, c, g, or t
ttgggaattactttatatagataattcttgactgtaaaacattttgaccagtgttttacaacatgtacataagaatacacataattcaactagagatttgaagaattggcttgtatagttataacaaccacagtagaaacatttctactttgagagaatttcaatattctcttaatgttgtgtaattgattaggtaactaaaaagcgcaaattgttggcaggttttgctgcacattgttctatgtctttgttggctggtgtattttataaactaaagctgcctatgtttctttttaaagctcgcattcccagaatcagcttaggcttctatgaattcagcctgtttctaaaagctgaaaatctcagtttaaaaatcaaaatgttaacacaaagctaagattcatcagagcccaccctattctaaggaaccacaataacttactctggccccagtgttaaaacgatctttcagatttagagtgactatgtaagaatttaggatttcctcttttccaggcacattgtaaactgtgtctacagtttatccatataacttctcttctgaaaactgaggagtgtcctctgttcttccagttcacgagggcagggggtttaaaacaagaatgataggccaggaaggcagtggggatccaccatcacatggaactgtaaggccatataactacacaaaactgaccaatctgggttgccaaagcagccaggcttatgctgaaaccggggaagtctgacatatgcaggaaactcttttgaaataattttggtgcccaggccaagtagaatgagatgagactgagtttggcctctggctcggtttcctttctttggtctgatacttcatgtatttgaatatagttaaatcgtattatttttttcttaacagaaatatttttaaaaatgaaaaagtactcaaaagtgagaagagttaacttgtcaaagcagaatggttctctttgacccactctggtctattgtgtaaatatttatttagactattttaataatacatattatttaccccactgtaacatcatgtaaactaagtatgtttttaaacaatttttaagacttgtaattaccctgaaaataaggtttataatgcaaagaccagctcctttgcggtggcagtgctctagggctgccattacacggtcttgtgatgtgactaaaagccactttgtgactcccttcatgtaatcctcttttcctccccactcctccacagagggcagagctcaggacatttgccagttccagatctctttttcagcattttgatggaattaatttacacgtaatgagggaagtcctaggatggatagaaaaaaagcacttacattggggcacacaggaaatcccagtgtctagcaatggtttggtttgcagagaacacagcctgatacttaattttcttaaaactatttttaatgatccactaaacaaagcaggggatcctgaagctgatataaataagtctagctctataatccccaagttctaaaagttatggttagatgctattctgtgggttgctttgataattcttactaacacagattagggtataggcatctagagatgcactgtccactgtaaatactataatgagagccacatctgtaatttaaatgtttctagtaaccacatttttttaaaagtaaaaagaaacccatggtattgatttaaatatattttatttaacccaatagctcaaaaacactatcatttcaacataggatcaatataaaaattattaatgagttattttactttttttcatattaggcctttgaaattcagtgtgtattaaacacatctcaattcaaaccatcaccannnnnnnnnnnnnnnnnnnnnnnnnnnnnnnnnnnnnnnnnnnnnnnnnnnnnnnnatctatactcattccttcaaatacattactctgttaatctcaaagtgtggccaactcccatttacttagaggctgattatctagttttgtagttcctcaggcctctaatttattttttgctttctgctttattgatcttttgcatgtcccccaaagccagaatctgctcatggaggaaggaaggctaagaactgtccttgaggaacttcatcagtaactctggtaaagcatcctgtggagggagaggagagcccagtcatttgcttagatggtgtttgtgggatcacctgcagatttaaagcctactctgccacagactcgagtaagaaaatgttctcttgatgacacagtgctcctactctatccacattaagtagcacttttgtggtagaactgattcttaaggcagcctgaaaggccattactaatagaaacacagcctttccaatcctctggaacatattctgtctgggtttttaatgtctgtggaaaaaaactaaaca

SEQ ID NO: 188377 - DNA, 1516 bp, Homo Sapiens
ttggcaacaatcccttcaaggatccatcagttacacaagtgacaagaaatgttccaccaggacttgatgaatataatccattctcggattctagaacacctccaccaggcggtgtgaagatgcctaatgtacccaatacacaaccagcaataatgaaaccaacagaggaacatccagcttatacacagattgcaaaggaacatgcattggcccaagctgaacttcttaagcgccaggaagaactagaaagaaaagccgcagaattagatcgtcgggaacgagaaatgcaaaacctcagtcaacatggtagaaaaaataattggccacctcttcctagcaattttcctgtcggaccttgtttctatcaggatttttctgtagacattcctgtagaattccaaaagacagtaaagcttatgtactacttgtggatgttccatgcagtaacactgtttctaaatatcttcggatgcttggcttggttttgtgttgattctgcaagagcggttgattttggattgagtatcctgtggttcttgctttttactccttgttcatttgtctgttggtacagaccactttatggagctttcaggagtgacagttcatttagattctttgtattcttcttcgtctatatttgtcagtttgctgtacatgtactccaagctgcaggatttcataactggggcaattgtggttggatttcatcccttactggtctcaaccaaaatattcctgttggaatcatgatgataatcatagcagcacttttcacagcatcagcagtcatctcactagttatgttcaaaaaagtacatggactatatcgcacaacaggtgctagttttgagaaggcccaacaggagtttgcaacaggtgtgatgtccaacaaaactgtccagaccgcagctgcaaatgcagcttcaactgcagcatctagtgcagctcagaatgctttcaagggtaaccagatttaagaatcttcaaacaatacactgttaccttttgactgtacctttttctccagttactgtattctacaaatatttttatgttcaaaacacacagtacagacagcatggatatttcctgttcacttgtgcatgggctaaaaccaggaaaacttccttgtcttattactttacctaatagtttcttaatatttcagtgccccttgcagaaaaaatattacatgctaaataaatattctccatatttttgggggatgacattcagtgaattatttcagtggtgacccactgaaaattaataatggtacttatgattaaaaacgcatttaatactaactgcagtagttctttcaagaatctttagagataaggattgcacattggaaaagtaaaccatgtttcattcctttttctctatttatattgaaagaaataggccagcagagacttcgggattttaaattggcttgctttttagctgtttcagtcaccagtgaagagcctatgtgcattttgtagtagataatgtaaaatttgtcatc

SEQ ID NO: 188378 - DNA, 2352 bp, Homo Sapiens
  misc_feature (2206)..(2214): n is a, c, g, or t
ttgggtgtagtgtgggcaaaatttgtatgttgtcttttccctcagctggagttattggaaccactttgtagtcaagacgaaagcactgaattttgcttcaaagaactgtgtatgtacaagagaaatcctgcataaccccattaggagtagatggtgcccgggctatctgtcagggaggcaaaaaaggcttcatcccatccttgccaaaaaataagaaaactgtcttggagaatgggtcagaagccccaaacggcacacactttccaaattaaagtgggcaggggctgcttttagcagctgctgacctgcagatttgtcaaagccagtgactagagaaggaagggagaaaggctggctgttggcttgctctgagctgcaaggatggtctctaactgattaactgtgagcaggtgggcctgtgtcttcaggtgctttgccaaactcttaaaagaaagtgtccagtgaacttggaagtgggcccctgagctgagcacagggccaaagcagccatggcagacacctgacggagggcacggggctggctgacactaagtttggtgggacagtgaggggtgggaggggggtttccagggcctggtgttggagagtgcagagaaatatctacctccctggaggtgtgaagactaggtttttcttcttccttccaattagattttccttaattatagtgatgtcttccttattcatttttctctccctgcctctcactgccataagaatatcagcctgggggcagtccagacgcagccctttgtcatcctttctgtttgcctagtctcagcagactgtgatcacaaggcattgtctgtgggatttttcctttccctttcttgatctctcttgtggttctaggttgtttggttgttcattgttatggtggctttttattttaacgccccttgagccccatgatggctggtgtcaccctgttcttttacactgttgggccaggtgctgcttgtccttcttagggcatcatcaattgcaaatatttccttttgctccctttatgaagatgttcttatacccttgctttcccatatttttctggccaagcatgccatctcctttactctgggaacttacatcctgaatcccaagagggggtcacagtttggaaaaagtcatcagggattctggaactaagtctgataaaagattccagtgaagccctgttctgagaacgagcagactgcaggggaggccatgggattccccaggccagtgtctgtgctgatccttcaagggtctgcaggtatgcaggtggcctgggctgctcggcagatactttgctgattcccagctgaggggagcatggtggcgattgctcagccattttctgacagacacacagacctgccttttctcccccaagtataccgtaccctcctgtgagacagtgtgtgcaggcaccaccaccttaatcctgctgttgcctgacatgctgattctcatttattatgctgcatcaacacattagaggtacaggagcggctcagtcatgaaaaaagaaggtcttttgccccatttctttatttcagagatgtgggctttcagtgggaatttgctgactcctactttataggctgagtcaatgagggaagatgactggcgtttcctctgtctaaatgggaggttgccagagcgctggctgggactaggatgtgtaactaagatttcagtttgaaatcttagatttcagttcacggcgataaagaagtaggtgctgcacacaaatatgtaaagcaattgtaggaaatttgaaaggaaaaaaagaaaccgaagccagtattttaataattgctttttctgtgtattttgtattgggctgggggatagcatcaaaggttgaactttttgagctttctatgaaaaaccccaggaccttctttctttggccatttctatggaaatgcgatgtcagatggatggtaaatggtgccctccagtggctgtgagacctcattgcgcattgtctactggagctttagtcttctgagacggaggaaaactgctgaatactctggattcatctatgtctacaatgttgcatttatgaaaaactacactgtgctaggcgcattctaggacatgaatatgaccacaccctctttcaccgggtgtttctgtagcaagttttcatattcttttcaaacaatggtttctctgcgttaattattgaggnnnnnnnnngatggggtaagaaaactacccatgcatgatgtagagagctgttgatttgtttctgtttttttaaaggaaaactatttgtaagatgttgcactaaaacatttttatatacacttcagagacctgtagtaaattatgttg

SEQ ID NO: 188379 - DNA, 1656 bp, Homo Sapiens
ttggcatgaaggaaaaacatggcaaatctcctttagcattggaaacaccaaatcgggtatccttgggacagttatggttagagctgcttaaattctacacactggattttgctttggaggaatatgtcatatgtgtacggatacaagatattttaacaagagaaaataaaaactggcctaaaaggcgaatagccattgaagatccattttcagtcaagaggaatgttgcacggagcttaaacagccagctggtttacgaatatgttgtggagagatttagggcagcttatcggtattttgcctgtcctcagacgaagggtggaaataagtctacagtggatttcaagaaaagagagaaggggaaaataagcaataagaaaccagtcaagtcgaacaatatggcaaccaatggttgtattctgcttggggaaaccacagaaaaaataaatgcagaaagagagcaacctgttcaatgtgatgaaatggactgtacatcacagagatgtattattgacaacaacaatttgttggtaaatgaactagattttgctgaccacggacaggactcttcatctctttctaccagcaaaagcagtgaaatagagccaaaattagataagaaacaagatgatttagcgccttcagaaacttgtttaaaaaaagagctcagccaatgtaattgcattgatttgtctaagtcgcctgacccagataaatctactggaacagactgcacgtcaaatttagaaacagagagttcacatcagagtgtgtgcaccgacacatctgctacctcttgcaactgcaaagctacagaagatgcttctgaccttaatgatgatgataacctccccacccaggaattatattatgtgtttgataagtttattttaacctctggcaagccaccaacgatagtatgcaacatctgcaaaaaggatggccattcaaagaatgattgcccagaggattttaggaaaattgatttaaaacctctaccaccaatgacaaaccgatttcgggaaatacttgatttagtatgtaaaagatgttttgatgagttatcaccaccttgttctgaacaacacaacagggagcaaattttaattggcttggaaaagtttattcaaaaagaatatgatgaaaaggcaaggttgtgcttatttggctcttctaagaatggatttggatttcgtgatagtgatctggatatttgtatgaccctggaaggccatgaaaatgcagagaaattaaattgtaaggaaataattgaaaatttggcaaaaattcttaagagacatccaggtttaagaaacattttgcctataactactgccaaagtgcctatagtaaaatttgaacacaggcgaagtgggttagaaggcgatatcagtttatataatacgttggctcaacataacacaagaatgctagctacttatgcagctattgatcctagagtgcagtatttgggatatactatgaaagtgtttgctaagatctttgatggaaaacagattccacagagaatggttgatggatggaatgctttcttctttgataaaacagaagaactgaaaaagcgtttaccttcacttggaaagaacacagaatcattaggggagctttggctgggactgcttcgtttctatactg

SEQ ID NO: 188380 - DNA, 957 bp, Homo Sapiens
ttggctccattaccgcccaggcttggtcaccgcattaaggcattcccgctctccgcggaactgctctgccgtctcggcggtgaaagtgtgagagggtccgtagttgggtcaactttgactcctctcgcctgcccggatccttaagggcctcctcgtcctcccggtctccggtcgctgccgggtctgtgcgccggtccgcgcccgccctcgctctgccatgggcgcttccagctcctccgcgctggcccgcctcggcctcccagcccggccctggcccaggtggctcggggtcgccgcgctaggactggccgccgtggccctggggactgtcgcctggcgccgcgcatggcccaggcggcgccggcggctgcagcaggtgggcaccgtggcgaagctctggatctacccggtgaaatcctgcaaaggggtgccggtgagcgaggctgagtgcacggccatggggctgcgcagcggcaacctgcgggacaggttttggctggtgattaaggaagatggacacatggtcactgcccgacaggagcctcgcctcgtgctcatctccatcatttatgagaataactgcctgatcttcagggctccagacatggaccagctggttttgcctagcaagcagccttcctcaaacaaactccacaactgcaggatatttggccttgacattaaaggcagagactgtggcaatgaggcagctaagtggttcaccaacttcttgaaaactgaagcgtatagattggttcaatttgagacaaacatgaagggaagaacatcaagaaaacttctccccactcttgatcagaatttccaggtggcctacccagactactgcccgctcctgatcatgacagatgcctccctggtagatttgataccagatggagaagaaaatgaaaatggagaatttcagcccaatattgtggtgaccggctgtgatgcttt

SEQ ID NO: 188381 - DNA, 2596 bp, Homo Sapiens
  misc_feature (690)..(698): n is a, c, g, or t
  misc_feature (713)..(992): n is a, c, g, or t
ttggatcaggaaggaactgcagatttcttagaaagttgtagtgctctatgagggcacttagccagttgttttgaccgactaggcagataatcacactgagctgatacaatcgtggtgctaaagtatcataattattaaaatattagtcctatgtgttctcaacacatgtaaaggaagagtgaccagattgatcttaatcagaaatgtccagttacatgtcggccgacagcattgatttcacattttagtattctagttaaaatttgctaatgaatagctaatataatacctcgaactgtaggtggttcaggttacttgtttttgaccagccttgtttcttcagttactgtaggccttttgagacctgtctccatctagtattttactgagaaacaaattggtggggcatttgctatgtaaattactcatctaggaagatcttcctgttcctgagcttgctttctgttctttcctttggttcccatctgtagctgatgtgttctaccttgggcctgagtttttcttatgctttggttttgcatgcgtcacataacccacagccgttggtaggaatgaggtcgaaaatcttcatcagtatttgaggacttggttcttaagatatattcaagaatgctttccctttgcccaaaggtgaaagtatcattaaagttgtcttagtatggtaaggannnnnnnnnctctgcttggcagtnnnnnnnnnnnnnnnnnnnnnnnnnnnnnnnnnnnnnnnnnnnnnnnnnnnnnnnnnnnnnnnnnnnnnnnnnnnnnnnnnnnnnnnnnnnnnnnnnnnnnnnnnnnnnnnnnnnnnnnnnnnnnnnnnnnnnnnnnnnnnnnnnnnnnnnnnnnnnnnnnnnnnnnnnnnnnnnnnnnnnnnnnnnnnnnnnnnnnnnnnnnnnnnnnnnnnnnnnnnnnnnnnnnnnnnnnnnnnnnnnnnnnnnnnnnnnnnnnnnnnnnnnnnnnnnnnnnnnnnntcaaaggagttcaacatagtatctacctgattggaaaaaatgcaggggcagtttctttggaacaggctctgttgcatttggtgagcaacttaacttttggaaacacaggggcttacaccagtactttctccagtgacactattgctgtctcctctggtaacaatctttgtgtttcaggtagatgacattaatgctgataagaatatctcttctgcacagattgttggtcctggacccaagccagaagcctctgcaaagcttccttccagacctgcagataactatgacaactttgtcctaccagagttgccatctgtgccagacacactaccaactgcatctgctggtgccagcacctcagcatctgaagacattgactttgatgatctttcccggaggtttgaagagctgaaaaagaaaacataggtctcttaaaccaggcaactttcacgttttgggagttgagactgagcaatttctccttgtaacaaagaatctccatgaaattctgtttcatctgttaaccgtcactcagcacaacactccctctgggctctcttcctgctcctccagattctgctgctttccagttctctgttgatcctgagactaacaattggagactgaggccagagcaactggctcctggcagctgtgcttgtccgtttcctgtcagagtgatcccaggtttcctcctggcccgtcccatggtccctccacaggagtgtgagaggatgggggaagcactgtgggaagaccaccaaagatggctggacagtgggagagagcacgttgtgaagcatcccagcctcgtgttgaggttccagacttagaaacagacccctctgtacagggggattgtggtgagtgagaatcaaggccaccttgtgtgttttctcactctcgaatgcaagtgggagagggaaaatgactcgggacgccattgtaacggttcctggaagctgggccctctcattggcatatacagtactcctcgctgcagggcactgtcccaccgggatccagttgcaaagtttgtcttgacagttgaaggcctcgcttagttgtactggattctcagggagccctctgtggccttttgctttgcgtgctgtttcccttgtaccagagggcggcaccgtggaaattctgttttccctgtagcatattgtgttggattgcattactggcagagaaaggacaaggtgccattcaagtcctagggtgggcttccagctgccttaatagaagtactcaagtcttttgggtagtgagctggaaagcctacaggaaaagaggggtacctgttttcatttgaaaactttgattcatggaacctttaaaactaatctcaaaaaaatttttggtgcccatgcagctgtagttgttcactgctttcctggatggatgggactcttatgtcataacttctgttactcctttggcccatagctaaggtcatccttccccacaggggtggctttgggattggatgatacagcttttgcttctgtgtagtatacctgtacatacttgtttcaggcagcctttctttaatgttttcagttgtttgtattctgtaactcagtagctgctaataaagt

SEQ ID NO: 188382 - DNA, 1285 bp, Homo Sapiens
  misc_feature (627)..(918): n is a, c, g, or t
ccccatcctctcacactcctgtggagggaccatgggacgggccaggaggaaacctggggatcactttgacaggaaacggacaagcacagctgccaggagccagttgctctggcctcagtctccaactgttagtctcaggatcaacagagaactggaaagcagcagaatctggaggagcaggaagagagcccagagggagtgttgtgctgagtgacggttaacagatgaaacagaatttcatggagattctttgttacaaggagaaattgctcagtctcaactcccaaaacgtgaaagttgcctggtttaagagacctatgttttctttttcagctcttcaaacctccgggaaagatcatcaaagtcaatgtcttcagatgctgaggtgctggcaccagcagatgcagttggtagtgtgtctggcacagatggcaactctggtaggacaaagttgtcatagttatctgcaggtctggaaggaagctttgcagaggcttctggcttgggtccaggacctaattagggcaaggagcacaacgttacaaataccagagaaatgactcagatcccctttggcagtaaaaataaaatgatcaaaacacaggagaaaaccttagttcacaaacnnnnnnnnnnnnnnnnnnnnnnnnnnnnnnnnnnnnnnnnnnnnnnnnnnnnnnnnnnnnnnnnnnnnnnnnnnnnnnnnnnnnnnnnnnnnnnnnnnnnnnnnnnnnnnnnnnnnnnnnnnnnnnnnnnnnnnnnnnnnnnnnnnnnnnnnnnnnnnnnnnnnnnnnnnnnnnnnnnnnnnnnnnnnnnnnnnnnnnnnnnnnnnnnnnnnnnnnnnnnnnnnnnnnnnnnnnnnnnnnnnnnnnnnnnnnnnnnnnnnnnnnnnnnnnnnnnnnnnnnnnnnnnnnnnnntggtagctacatgaacatgattgctttacaaaattcactgagctggccgggcatgcagatagaagtccatggacatggaaacagtctctaagggaggaacaataatgagaaaacagcagagggttcagcactgagctctgcaggtttctgattgatactactcaccaacaatctgtgcagaagagatattcttatcagcattaatgtcatctacctgaaacacaaagattgttaccagaggagacagcaatagtgtcactggagaaagtactggtgtaagcccctgtgtttccaaaagttaagttgctcaccaaatgcaacagagcctgttccaaagaaactgcccctgcattttttccaatcccaa

SEQ ID NO: 188383 - DNA, 883 bp, Homo Sapiens
  misc_feature (135)..(232): n is a, c, g, or t
ttggctatctctcctcataacagaagacatttagtctctctctagatgagagaatggcttagtaaggaaaaatggacctagcgagccatggtggtatgtgcctatggtccttgctacacagaaggctgtatagannnnnnnnnnnnnnnnnnnnnnnnnnnnnnnnnnnnnnnnnnnnnnnnnnnnnnnnnnnnnnnnnnnnnnnnnnnnnnnnnnnnnnnnnnnnnnnnnngaaagaaagaaaggaccagcattatagaggtggttattagagtgttggcaaatgaatggagcctgggaaagaaaaactaatggaggcaagaaggcatggatagaaacaattttatatttttcttctcagaatcatttattctggcttcagaattcaagtccttcctctgatcgagttagtgcaataatctgggaggggaatgagtgcaaaaagatggatatgtctgtgttggaaataagtggcatcatcatgagcagggtcaatgcctatcagcaaggagtaggttatcagatgctgggaaatgttgtcactattggattagcattttttccattcttacatcgacttttccgtgagaagagccttgaccaactaaagtccatttcagctgaggagatcttgactctcttttgtggggcaccacctgttacacctattattgttttgtcgataattaatttttttgaaagattgtgtcttacttggatgttttttttcatgatgtgtgtggcagagagaacatataaacaggtcagtggagaaataaggaaaattttttacctgtttttgtatatgatattccattgagttgcttttgttctcttgatttggtctctcttcaagttgatgtgggcaataaaggattgataa

SEQ ID NO: 188384 - DNA, 895 bp, Homo Sapiens
ttggggaagaaatcaaaacaagatcacaagaatactgaaaaatgaagcctaaaatgaagtattcaaccaacaaaatttccacagcaaagtggaagaacacagcaagcaaagccttgtgtttcaagctgggaaaatcccaacagaaggccaaagaagtttgccccatgtactttatgaagctccgctctggccttatgataaaaaaggaggcctgttactttaggagagaaaccaccaaaaggccttcactgaaaacaggtagaaagcacaaaagacatctggtactcgctgcctgtcaacagcagtctactgtggagtgctttgcctttggtatatcaggggtccagaaatatactagagcacttcatgattcaagtatcacaggaatttcacctattacagagtatcttgcttctctaagcacatacaatgatcaatccattacttttgctttggaggatgaaagttatgagatatatgttgaagacttgaaaaaagatgaaaagaaagataaggtgttactgagttattatgagtctcaacacccctcaaatgaatcaggtgacggtgttgatggtaagatgttaatggtaaccctgagtcctacaaaagacttctggttgcatgccaacaacaaggaacactctgtggagctccataagtgtgaaaaaccactgccagaccaggccttctttgtccttcataatatgcactccaactgtgtttcatttgaatgcaagactgatcctggagtgtttataggtgtaaaggataatcatcttgctctgattaaagtagactcttctgagaatttgtgtactgaaaatatcttgtttaagctctctgaaacttagttgatggaaacctgtgagtcttgggttgagtacccaaatgc

SEQ ID NO: 188385 - DNA, 1757 bp, Homo Sapiens
ttgggttgtatattgtgttgatgacgtacgttatttccatggaagatagccgctgtggcagctgtcacatcaccacagctccctagggtctgccgagaaggcaggcagtctttgggttctgttctttgtcacgtcccctacaagtaaattttgtttctttgaacgtttattaaaatgccaagacccaaccatttcttccacctgcttgattgtgccagtgtttgctcaggcctctttcttagtgttgctttcaaatccttctctttcctgggttgggaaggccaggcagggacagagcaaatgacacttctcttcctcttgccctccctgcctctttggtgctcttaaaagccagcagctgagaacatagcacaggcccacgtggtgagggcacccacagcttaaagacgcttccttctaaacacggcgaggtcacctctcactcttctgtctttgcaaaccgagaagagtggcatgcttctggcatcccaagtcaggattttagctcagatgaggcagaatgaagggcctctcttacaggcagtttgtgtttgattctctcgatcctggcacatccatgataaataggagtttttgaaagttggttttattaggtgttccctaatttttaccgtaataggtcatctcagcttatatgaaagtcaagtggggaactgggaaagccaaagtcagtcttgagcagagggagcacattttgtggacctggttccacctttccattccaaaccacctgtttccccttccattagcagaaactctgggggaactttgtgtctcagtcctagaatctccccaagtgagtggaagtgacatgatgcagtcttcctcatggggcacctgaaagaaattagtgtgggtgcttcgatctaccttgtctgtcagagttgaatatctctttccctatcatgctgcttctgaaaattcagttttggagcaagtcctgtgagcaagataagaatctatagaaccaagatgctcattttcagaagaaatatgttcaacctgggatcagacttccatgctctggggaatccaagtggtagcacctgtaaccctgtgtactaagtgctttgaagagaagagcaggcctcagacaccttttaattgcttaggagaaaccattgtctctgactgcaggtttgaataagttgaagaccagagaaaagtacacactgggctacaaaggaatttggagatagccaaggaacaggatttcccctagcaagctaccttctgttcaaatcatgaaaaaagactatttccccttagaatagggaagcttgctattttaaagctcttgtagtgcttttcttttaagggagatgtagtaaaagggaaaatgtagctcttagtttacacttcaaagatgtgggggtctttcagagaactaagaataacagttttatgtgcagagagagtttgccagatctgaagcatatacctcattgactaggctgttactttgggataggttgcagtaccagccacagccagcagatagaggaaaagacacacataaactcgcttctgagcgtccacttctgcactctctgctctgctgttactcagcccctgagtctgactcatctctgcacaacctctctgtgccatgaagataagtcttccatggccaaatcggtcatccgcactgcccttgggacttccgaagtgaaccattccaccagaacctttgattctgcacaagatttccttgctctgggaacaacccccaaatg

SEQ ID NO: 188386 - DNA, 847 bp, Homo Sapiens
ttggctctaaggaatcacaaaggtaaactacccaaccacatgccacgtaatatttcagccattcagaggaaactgttttctctttatttgcttatatgttaatatggtttttaaattggtaacttttatatagtatggtaacagtatgttaatacacacatacatatgcacacatgctttgggtccttccataatacttttatatttgtaaatcaatgttttggagcaatcccaagtttaagggaaatatttttgtaaatgtaatggttttgaaaatctgagcaatccttttgcttatacatttttaaagcatttgtgctttaaaattgttatgctggtgtttgaaacatgatactcctgtggtgcagatgagaagctataacagtgaatatgtggtttctcttacgtcatccaccttgacatgatgggtcagaaacaaatggaaatccagagcaagtcctccagggttgcaccaggtttacctaaagcttgttgccttttcttgtgctgtttatccgtgtagagcactcaagaaagttctgaaactgctttgtatctgctttgtactgttggtgccttcttggtattgtaccccaaaattctgcatagattatttagtataatggtaagttaaaaaatgttaaaggaagattttattaagaatctgaatgtttattcattatattgttacaatttaacattaacatttatttgtggtatttgtgatttggttaatctgtataaaaattgtaagtagaaaggtttatatttcatcttaattcttttgatgttgtaaacgtactttttaaaagatggattatttgaatgtttatggcacctgacttgt

SEQ ID NO: 188387 - DNA, 1549 bp, Homo Sapiens
ttggggcatggtggctgcagtgagcacgccaactgtagccaggtaggaacaatggtcacttgtacctgcctgcccgactacgagggtgatggctggagctgccgggcccgcaacccctgcacagatggccaccgcgggggctgcagcgagcacgccaactgcttgagcaccggcctgaacacacggcgctgtgagtgccacgcaggctacgtaggcgatggactgcagtgtctggaggagtcggaaccacctgtggaccgctgcttgggccagccaccgccctgccactcagatgccatgtgcactgacctgcacttccaggagaaacgggctggcgttttccacctccaggccaccagcggcccttatggtctgaacttttcggaggctgaggcggcatgcgaagcacagggagccgtccttgcttcattccctcagctctctgctgcccagcagctgggcttccacctgtgcctcatgggctggctggccaatggctccactgcccaccctgtggttttccctgtggcggactgtggcaatggtcgggtgggcatagtcagcctgggtgcccgcaagaacctctcagaacgctgggatgcctactgcttccgtgtgcaagatgtggcctgccgatgccgaaatggcttcgtgggtgacgggatcagcacgtgcaatgggaagctgctggatgtgctggctgccactgccaacttctccaccttctatgggatgctattgggctatgccaatgccacccagcggggtctcgacttcctggacttcctggatgatgagctcacgtataagacactcttcgtccctgtcaatgaaggctttgtggacaacatgacgctgagtggcccagacttggagctgcatgcctccaacgccaccctcctaagtgccaacgccagccaggggaagttgcttccggcccactcaggcctcagcctcatcatcagtgacgcaggccctgacaacagttcctgggcccctgtggccccagggacagttgtggttagccgtatcattgtgtgggacatcatggccttcaatggcatcatccatgctctggccagccccctcctggcacccccacagccccaggcagtgctggcgcctgaagccccacctgtggcggcaggcgtgggggctgtgcttgccgctggagcactgcttggcttggtggccggagctctctacctccgtgcccgaggcaagcccacgggctttggcttctctgccttccaggcggaagatgatgctgacgacgacttctcaccgtggcaagaagggaccaaccccaccctggtctctgtccccaaccctgtctttggcagcgacaccttttgtgaacccttcgatgtaagcatggaagtgaagaagtgtggcagatgtgggatgggcccaggccctggtcacaccctccaccaccaaccctgctcttctaggactcactgctggaggaggacttccctgacacccagaggatccctcacagtcaagtgaccaggctggggctgaatcagaagcttgcacagggaag

SEQ ID NO: 188388 - DNA, 1249 bp, Homo Sapiens
ttggcgatcaacagaatggctacggggacctctttcctgggcataagaagactcgccgggaggcccctctgggagttgccatctcttccaatggactgcctccagcctcccccctcggtcagtctgacaagccttctggagccgacgccctgcagtccagtgggaagcactctctggggctagactctctcaacaaaaagcgtctggctgactccagccttcacttgaatggaggcagtaaccccagtgagtcatttcctctgagcctgaataaagaactgaagcaggagcctgtcgaagacctgccttgcatgatcactgggactgtcggctccatatcgcaaagcaacctcatgccagacctcaaccttaacgagcaggagtggaaggagctcatcgaggagctgaacaggtcggtgcccgatgaagacatgaaggacctgtttaatgaggacttcgaggagaagaaggacccagagtcttctggctctgccacacaaacccccttggcacaggacattaatattaagacggaattctctccagcagcctttgagcaagaacagttaggctctccacaagtgagggccgggtctgcagggcagacctttctggggccttcctctgcccctgtgagtacagattcccccagcctagggggctcccaaaccttattccacacctctggtcagccccgggcggacaatcccagtccaaacctgatgccggcatcagcccaggcccagaacgcacaaagagcccttgcaggtgtggtattgcccagtcagggcccaggaggggcctcagagctgtcctctgcccaccagctccagcagatcgctgccaagcagaagcgcgagcagatgctccagaacccacagcaggccaccccggcaccagccccgggccagatgtccacatggcagcagacggggccctcccacagttccttagatgtcccttaccccatggagaagcctgccagcccttccagctacaagcaagacttcactaactccaaactgctcatgatgcctagtgtgaataagagttcccctcggcccggaggcccctacctccagcccagccatgtgaacctgctgagtcaccagccaccgagtaacttgaatcagaactccgcgaataaccaggggtctgtgctggactacggcaatacaaaacccctttctcattacaaagcggactgtggcaagcagcccggggtctggccagagcaagccagccctga

SEQ ID NO: 188389 - DNA, 1048 bp, Homo Sapiens
actttgtacaaaaaagttggcccttgggttgagggctctgctgaagcaatccccacagcccagcaggcactgccagctccactgcctcttcgcacatcttcccccgggccactgcccagttcagctgacaggagggctccagcaccaccaggacctgagcaccccagtcctgcggtccgatgtagatgccctgcagcaggtggtggaggaagctgtggggcaggccctgcctggggccaccgtcacgctgaccggcggcttccgcaggagggtcaggaggcggggctgctgcctagagtgatgtgccgcctgcaggaccagggcctcatcctgtaccaccagcaccagcacagctgctgtgagtcccctacccgcctggcccaacagagccacatggacgcttttgagagaagtttctgcattttccgcctaccacaacctccaggggctgctgtggggggatccacgaggccctgcccatcctggaaggccgtgagagtggacttggtagttgcacccgtcagccagttccctttcgccctgctcggttggactggctccaagcttttccagcgggagctgcgccgcttcagccggaaggagaagggcctgtggctgaacagccatgggctgtttgacccggaccagaagacatttttccaagcggcttcagaggaagacatcttcagacacctgggccttgagtaccttcctccatagcagagaaacgcctgagcctgcctgtgtcccccacttccactcaggaaattgggctgcccccaacctggccactgaatgtctccaggcaaatatgctgccccctgacccccaccttcacccctccccgccaaggcctggctcttccggaggtcaattgtgcctgcaggatcagttgagccccagctggtgtgctgcagggtgtgatgaggtgggagccctcagtgccagcctcatcactgtgtgaccctgggtctgctcttagcctccccatggctcacgttcctgccctggatgggatgtgagtggggcccacatcaagtaagctgtg

SEQ ID NO: 188390 - DNA, 2315 bp, Homo Sapiens
  misc_feature (317)..(375): n is a, c, g, or t
ttggcctccattgaggagttgaagaacgtctggcttcctttctccattcgcatgaagatgaccaaaaacaaagggctggatgtttgcaattggactgatggggatgagatgcaggttgttgaaaaaccgggaagaggaaagggaataagggagagaaggtggggcagaaggtaaaggagggcaggggaaggtgaaacttagcagagggaaaaggaagagaataaggcctagtatttacctgttaggggattttccatagtcactcagttcagtgttggggtcctagatgggctaggatggagataacccaccctggnnnnnnnnnnnnnnnnnnnnnnnnnnnnnnnnnnnnnnnnnnnnnnnnnnnnnnnnnnnatccttaaacttagcttagcagcctgggtacccccctcacagtggggcccagccagggcagaggaggagcatggtgtctatgtgtatgacctgatggctactgtggtacacatcctggactcacgcacagggggcagcctggtggctcacatcaaagttggagagacctaccaccagcgcaaggagggcgttactcaccagcagtggtatctgttcaatgactttcttattgaacctattgataagcatgaagctgtgcagtttgacatgaattggaaagtacctgcaatcctttattatgtcaaacggaatctcaattccagatacaacctgaacatcaagaaccctattgaggcaagtgtcttgctggctgaagcctcgctggcacggaagcagcggaaaacacatactacctttattccactgatgctgaatgagatgccacagattggggacctggtgggtctggatgctgagtttgtcacccttaatgaggaggaagcagagttacgcagtgatggtaccaagtctaccattaaaccaagccagatgtcagtagccaggattacctgtgttcggggccagggacccaatgagggtatccccttcattgatgactacatctctacccaggagcaggtggtggattacttgactcaatactcgggtataaagcctggtgacctcgatgccaaaatttcctccaagcacctaacaactctcaagtctacctacttaaagcttcgttttctcattgacattggagtcaagtttgtgggtcatggcctgcagaaggacttccgggtcatcaacctgatggtttggcagggctcttttaagagtcttcttgtgagagtgggcccctcagggtatacattgtgcctttagagaatggggaattataggtcccctaccttaagtctccccctcttttatccttgccaggtgcccaaggaccaagtccttgacactgtctacctgttccatatgccccgaaaacgaatgatttccctgcgattccttgcttggtactttctggacctgaagattcaaggggaaacccatgacagtattgaggatgcccgcacagcccttcagctgtaccgaaagtatctggagctaagcaaaaatggcactgagcctgagtctttccacaaggtgctcaagggtctttatgagaagggcagaaagatggactggaaggtgcctgagcctgagggccaaacaagtcccaagaatgcagctgtcttctcctcagtgctggcgctctgactacccttcccaaagaaccacggccctctccctttactgttctatagccccagaactgggagatggcttcctaagttggctataccttgtccacttccagtactggacgtgctcagggtctagggtcacagatggtgctattaattgaactggaacacagcagaattgttgcaaaggttctaggagccagattcattccttcttcattctttgcaaaacagtggtacagacatggagtctagaattgacccagatggaaagtaattggtattcttaatatcctgggtgactaatatccaggcagagaagctcctggaaccataactgtaagttcctagctggctagggattgaagtcctggacagtgacagaggataccacagtagttcaagacttagcacaagtcaccaactgcttcagggatacctggaggggccagcaagtagagtgttggtggcccaagcaaaccagtgttgccaataccattgccaaaagggcctttggatcctggacaaagcttggctgccggcttcatttattcctgctgatggctgagaagcatctgtcttccatcccacttgcctgtcccaagttttgttccattttttaaaaatttgttgtaaactgcatgttttataaaataaaaataaaatatcgtttggttattt

SEQ ID NO: 188391 - DNA, 1594 bp, Homo Sapiens
  misc_feature (137)..(147): n is a, c, g, or t
aaagcagaaccctgaagggctcgtccaccaagagtcaggcagttctagccctgagagaggtagaggggccccaacaatttgagctcctactaaaggctaaaggcccctttctggactttggcaaaaaaaggaagtcnnnnnnnnnnnctccttaagttaggggtaggaaaatacatccatcatgaatgtttgaaaccacaccgtagccctcacattcaagttgacctcaataggccatctgtcagagcccagtccaacaagtgactggactggactcttttgtaggcctggtaagtcacttgggttaagacagctaaccttgagcttttcctcccccgcagagaggcactgcccctggtaaagagacaccagaggccccatttttctacaatggaatgtcagcataggcagggacctcctccagttgaagaaacaagtccagagagggcaggtgacccacccagggcctcactgcgaactggggtgcggagtcgggggcccagttagaaagcatttgtccctccattaaaataaatactaaaaatcctaccaagttaccatagtccatagtggataggcctcgttcccaggggctttgcccaaaaggctgcacattttcttgctacagtctaaattgcttaaaaaattgaagagccggaatgttccattcagaatgcagtcccattaggtgacaggttccactgcatggcctaaaattaatcaatgtttatcggctgcataaaggatgttgtagtgggatgttttatagagcaggtaaacggaaggggtggcggcctcagggaacacgtggtggttcagggcggtatccatctcgtccacgtactccacttgcagggcaatgctcagggcctgcgacaacgccgtgatctggatgtggtcacactccgtggccatgggctctacttcgtgagtgcagaagtctttgatgtccatctcctcatcaatgaagtgccggaagaagtctgctcggttcctgatgaaggccgacgtgagcaggcgcaggaactgcacgatgtggtccgaggcactctggtcgttgaacaccttcagcaggctggacactgagccatccttctctaccagttccaccacactgtaaaaagcattgaagaagtttctgaacttgtgctcctcaaagccagcagccagaaggtcatttggggtctgcagtacgcgttctttgaacttgaagatctccctgctcttccccagcagggactccaggtaggaatagcccaaggccctgtagaagcagttcccatcccctttggtcttgcggatggcggtgaaccttttgctgagttcctcgattttcctccggtaaatcctgttttcaggatggtcccgaagaatggatagaatgtcacatttttctgatattaggttgaaagatgtttcactcatagtgaccagagccgccaggccaggtcccgccccagcgaggagcgatccggtgcgggaatgccgcgggaggcgcgggcgggctccgccgctggttcggtggcggggacctcgagggcgtgggggcggcggagaatacacccgaccgctccgcaaaccaaaggttagccaa

SEQ ID NO: 188392 - DNA, 1100 bp, Homo Sapiens
  misc_feature (181)..(225): n is a, c, g, or t
  misc_feature (599)..(662): n is a, c, g, or t
ttggggcggcggtgctgaacgcagagcgactcgaggtgtccgtcgacggcctcacgctcagcccggacccggaggagcggcctggggcggagggcgccccgctgctgccgccaccgctgccaccgccctcgccacctggatccggtcgcggcccgggcgcctcaggggagcagcccgagcnnnnnnnnnnnnnnnnnnnnnnnnnnnnnnnnnnnnnnnnnnnnntggagcagcgctggggtttcggcctggaggagttgtacggcctggcactgcgcttcttcaaagaaaaagatggcaaagcatttcatccaacttatgaagaaaaattgaagcttgtggcactgcataagcaagttcttatgggcccatataatccagacacttgtcctgaggttggattctttgatgtgttggggaatgacaggaggagagaatgggcagccctgggaaacatgtctaaagaggatgccatggtggagtttgtcaagctcttaaataggtgttgccatctcttttcaacatatgttgcgtcccacaaaatagagaaggaagagcaagacaaaaaaaggaaggaggaagaggagcgaaggcggcgnnnnnnnnnnnnnnnnnnnnnnnnnnnnnnnnnnnnnnnnnnnnnnnnnnnnnnnnnnnnnnnnaggcttcgacgggaggaagaggaaaggagacggatagaagaagaaaggcttcggttggagcagcaaaagcagcagataatggcagctttaaactcccagactgccgtgcagttccagcagtatgcagcccaacagtatccagggaactacgaacagcagcaaattctcatccgccagttgcaggagcaacactatcagcagtacatgcagcagttgtatcaagtccagcttgcacagcaacaggcagcattacagaaacaacaggaagtagtagtggctgggtcttccttgcctacatcatcaaaagtgaatgcaactgtaccaagtaatatgatgtcagttaatggacaggccaaaacacacactgacagctccgaaaaagaactggaaccagaagctgcagaagaagccctggagaatggaccaaaagaatctctt

SEQ ID NO: 188393 - DNA, 1116 bp, Homo Sapiens
  misc_feature (200)..(244): n is a, c, g, or t
  misc_feature (620)..(683): n is a, c, g, or t
ttggaggtgcagcagccggagatggcggcggtgctgaacgcagagcgactcgaggtgtccgtcgacggcctcacgctcagcccggacccggaggagcggcctggggcggagggcgccccgctgctgccgccaccgctgccaccgccctcgccacctggatccggtcgcggcccgggcgcctcaggggagcagcccgagcnnnnnnnnnnnnnnnnnnnnnnnnnnnnnnnnnnnnnnnnnnnnntggagcagcgctggggtttcggcctggaggagttgtacggcctggcactgcgcttcttcaaagaaaaagatggcaaagcatttcatccaacttatgaagaaaaattgaagcttgtggcactgcataagcaagttcttatgggcccatataatccagacacttgtcctgaggttggattctttgatgtgttggggaatgacaggaggagagaatgggcagccctgcgaaacatgtctaaagaggatgccatggtggagtttgtcaagctcttaaataggtgttgccatctcttttcaacatatgttgcgtcccacaaaatagagaaggaagagcaagacaaaaaaaggaaggaggaagaggagcgaaggcggcgtgnnnnnnnnnnnnnnnnnnnnnnnnnnnnnnnnnnnnnnnnnnnnnnnnnnnnnnnnnnnnnnnngcttcgacgggaggaagaggaaaggagacggatagaagaagaaaggcttcggttggagcagcaaaagcagcagataatggcagctttaaactcccagactgccgtgcagttccagcagtatgcagcccaacagtatccagggaactacgaacagcagcaaattctcatccgccagttgcaggagcaacactatcagcagtacatgcagcagttgtatcaagtccagcttgcacagcaacaggcagcattacagaaacaacaggaagtagtagtggctgggtcttcccttgcctacatcatcaaaagtgaatgcaactgtaccaagtaatatgatgtcagttaatggacaggccaaaacacacactgacagctccgaaaaagaactggaaccagaagctgcagaaagaagccctggaagaatggaccaaaagaa

SEQ ID NO: 188394 - DNA, 908 bp, Homo Sapiens
ttggcttttgttccctatcctgggccagttctctcgcaggtcccagatgtccagttccagatgcctggacccagagtgtgggggaaatatctctggagaagccctcactccaaaggctgtccaggcgcaatgtggtggctgcttctctggggagtcctccaggcttgcccaacccggggctccgtcctcttggcccaagagctaccccagcagctgacatcccccgggtacccagagccgtatggcaaaggccaagagagcagcacggacatcaaggctccagagggctttgctgtgaggctcgtcttccaggacttcgacctggagccgtcccaggactgtgcaggggactctgtcacaatctcattcgtcggttcggatccaagccagttctgtggtcagcaaggctcccctctgggcaggccccctggtcagagggagtttgtatcctcagggaggagtttgcggctgaccttccgcacacagccttcctcggagaacaagactgcccacctccacaagggcttcctggccctctaccaaaccgtggctgtgaactatagtcagcccatcagcgaggccagcaggggctctgaggccatcaacgcacctggagacaaccctgccaaggtccagaaccactgccaggagccctattatcaggccgcggcagcaggggcactcacctgtgcaaccccagggacctggaaagacagacaggatggggaggaggttcttcagtgtatgcctgtctgcggacggccagtcacccccattgcccagaatcagacgaccctcggttcttccagagccaagctgggcaacttcccctggcaagccttcaccagtatccacggccgtgggggcggggccctgctgggggacagatggatcctcactgctgccca

SEQ ID NO: 188395 - DNA, 1484 bp, Homo Sapiens
  misc_feature (435)..(489): n is a, c, g, or t
gtagtggtgggaatatgcagcatctcgggcaaagtagctccccttgccgtaggaagtgccatgaacaccacagacccgccagtcaaagttctgctggcagatggcgtccacaaaaatggcgctggtgccgtggaacagctgccgctcgtccacggccttccctccgttctgcttctgcatctgtcctttttgccactggtagacttcccagagggccaggttctgtactcgctcaatcttctgaacaaagtagaaaggcagcgtgcggttaaagaggttccagaccttctgatactcttccgaggaagaactaagggtgatcttctgaaagcctgggtctggcagggcagaggagtcccaatagtctgggatgctcttcgggcctggaaacttggtattgctcagtctcctgagtagctgggactacaggcgcannnnnnnnnnnnnnnnnnnnnnnnnnnnnnnnnnnnnnnnnnnnnnnnnnnnnnncaggtttgcatggtcgtcacatcctggggagacacgtatttgggtctgcggcaaacctttttagttgtgccatagaccaggtttttctgaacgaaggctgtcttccatattcctgccaagaaccaaactcatcactccagtaccaaatccagtcagtggtgaggatgaagtgtggaggtttggtgacagaggaggccgtggagaggcggcgagcctgggtagcaccgtaagtcatggcgttaaagttcagacaatgagagtgaaaggtactggctgactcagagcacaggatcctttctattttgggattgcaatatgcctcttcaataagccatgttgtccaaatcctcccatttgcctctatccaagaattgccatcgatacggcaaatggaaatgaactctatggcacttatcttgaaagctacaacttttccggatatggtacaaacagatctgatcaccctcctcctggctaagagtgtttggggacacagaacctgaactgtcttttctttcagaagtcccctgtgggacaaaaagaggaggcactctgctgggggcagagctcttattcttgatgtcatgtgcatttctataaatggtaggcagcctgctcaccaggtctgagctcatacccaacttctccaatttttccagattctcagaattagagaaatcatgggatctcttacagctagtgccaaacttgcattccccctgtaaaaaatactggcagatatggagcttgatgcactgcttttgaaaggcacaagagccgtggggtccatctcctttgttgtaatgttggcaaatttctggcaaaagccaggggtcgttctgaaacaagagttggcatagctcattatagctcaggtggtcaacgccatgagttctcagcacactcaggttgtgttcggttgtcaagctgtgactattcctacagttcttcccggctctcaggaacttgcaggcgccgtagaccatgaaccccaa

SEQ ID NO: 188396 - DNA, 2040 bp, Homo Sapiens
ttgggaaacttacgaaaccaaaacggcgctgatgagtctgtttgggatcccgctgtggtacttctcgcagtccccgcgcgtggtcatccagcctgacatttaccccggtaactgctgggcatttaaaggctcccaggggtacctggtggtgaggctctccatgatgatccacccagccgccttcactctggagcacatccctaagacgctgtcgccaacaggcaacatcagcagcgcccccaaggacttcgccgtctatggattagaaaatgagtatcaggaagaagggcagcttctgggacagttcacgtatgatcaggatggggagtcgctccagatgttccaggccctgaaaagacccgacgacacagctttccaaatagtggaacttcggattttttctaactggggccatcctgagtatacctgtctgtatcggttcagagttcatggcgaacctgtcaagtgaagacactactcattatttttgtacatttttgtatatactgggacagcgtgaaacactggaatccttcatggacgagggcatatacaatgatgggacagtgccacactccttcaataaacgtggctgctggccagaggacgtgagcgtgtgacgggcgccttggcgccacctgttgggtgctcactgcctctgcaggtgcagaggggtcagcagcaggagaagcgtgttgaacacgtggctctcagacactccttgtttttaacgggaagctctttgcatttgcatttcctcaacaaaggagcaaagcagaggaagctgagagtctggcgtgttcttgacgctttggtcttcagccttgcactggctcttctaaaggacttttggagggcagataatttcatctgttaaatccaacacacatttctttcagggaaaaacaatgtcaccaaattttcagagttctaaactcctttccttcaagccggaattttccttttttcagcaccagtaggtactaagtctccagatggggaaataactaaaatgtgtttttctgctttgttcgctcttacttctgaggaaggtttccagtcaggactcgctgtaccaatatccatggaggaatatgggagcgtttcgctctccttgtaggctgaagtcagtctgacttgaaggggcctggtttggatctaagcaaacacccagatggggttctctggtctcagcaaggcttttcctgttgggagtcacagtaaacagaaacccaaaaatctcatcttgggtgttttcagggcttgttttgagttttgctgaatagggagcgcaagacgccctgagcctccctctcactggtggtgataagaggagccgtctggtgtgtcagggtcacgaacccgttacatttcaggacgatcctttttccttcagcagcatttcttactggctgtggctggaatctgccttttatcacagctgtcaccattctcacgtgattcttgtgagactctttttggttataattactatttaatatttagactattttactgagcagactttataaatgagatatctacaaggcacttaaagtgttacagatgttttaccttaagaattatttaagttgtgttgggttaagacagttttcagtgtaccgtaaatgttgtgttttcagaaaaagacaaaacgatggtgctgactggttttctgtatattgcacaacagtcctcaaatacactgatgtatgaaactattcatacatcaagcagcatttttttcactctccttagaattggaactatgcagttaaggcagataaaatgtacagatgtttcatatattacaggttacatatataaatcaaaatttcctatataaaactgatttgggatttggggtggaaatattttgaatattaatttatttttaaagatgcaagataggactttgtgcaatgtatttttgtaaatgcttttcaaaatatctgtctttggtagtgcttctgctgctgccaccaaattgataagatgctattaagaggtttaaataaagagttttaatttttaaaaggg

SEQ ID NO: 188397 - DNA, 886 bp, Homo Sapiens
ttgggaataataaacacattgcatttctatccttgactggggaactagatgatagggatgtgaagggtggttgctgctgcagtcagatccatcatgtggccactgacagcccttctgctcctggttccaagcagtgggcaagctgctactctggagaagcccatattgtctctacatccaccttggaccaccatcttcaaaggggagcgggtaactttgaactgtgatggataccacccactgctcctggagctccagcccatcatcactctctggtatttgggccacctacttctgccctctcacaagaagagcgttgaggtgcacacaccaggggtgtatcgatgccagacacggggagcacccgtcagtgaccccatccacctctctgtatccaatgattggctgattctgcaagtgccctatgctccagtgttcgagggtgagccgctagtcctgcgctgccgcggctggtacgacaaggtggtctacaagcttcactactaccacgacggccaggccgtgcgctacttccactccagcgccaactacactgtgttacaggcgcgtgccagcgacagcgggcgctaccagtgctcgggcaccatgcgcatcccggtggagagcgcgcccatgttctccgctaaggtggctgtgacagtgcaaggtgggagcagaccagtggccccgcgagggaggcaaatgagcattgagaaattctgggacaggagctcggcgagaaaagaacgggcggaagttcaaatagctgccacttggagggtttctcttagactatggacgctgtctcctctcctttgccgtgaagcagcgctatgatccgccgcctgcttggcaggctggtccatttccccgacgcacaccctgg

SEQ ID NO: 188398 - DNA, 953 bp, Homo Sapiens
tcagttttggcgacaatgaggtcatccaggacgtacttcttataatttccaggtggcggacaagccacatctgtcagactctctggtatctgcctgtgtgccctcaattctggtggtcacagtcctctccaagatggtgaacattttctccttccaattcttgggcctcccaggaggaacaaagccagtttgctttttccggtcaagtatgcgcctgtcaattttctcttccctttcaatgatcctgacaactgagaccagcaaggtggggtcacggcggacagtgaccagtgacctctgcagcaccatccacagctgcttagccagctcatcagagagcccctgcgtgctgccaaagtagccatggatgagggtcatgtcacgcgtgttcccactgtccatgcggtactgctcgtacatcagcccgtcccgggagcattccaggtccatcagcttccggtgggcttgcaggagtgccccttgttcaattaggtcctgggtctccctcacaatctcaggcactgagaagatgttcttgaggttctccacggctgcggcgagctggctgtgctgcaccacggcgtctttgacgtccttgaggctctcaatggtgttgatgctctgcctccagtccttgctgacgtctgccagcgactgctggatgtctttgacgtcattcagggcgttgtggagctggctgaggcctgtgcgcaccccgtccaactgtgactggatggcggccttcaatctggcctccacggaggccttcttccgcgcttctctcctgcgatactgctccaccttgtccagctggtccgggcgctggagcatcccagcaaccctttgcactgctgtcgcaacggcctcccggtctgtctccttcatggtgaaaaagctggtggaatcctcacactgttcatgctaggggtgttctctgtgcacctatacggcta

SEQ ID NO: 188399 - DNA, 1207 bp, Homo Sapiens
  misc_feature (978)..(1015): n is a, c, g, or t
ttgtacaaaaaagttggagactttcaggccgttatgagaaagagtgtgcaaatttctaaggtacaattgctctattgagtcaccacgaaaaggctggagcttcatgcatcctgggagactcacacatttgcatgaaggacttcctgttaaaaatggaacaagatacattgcagtgtcatttatagatccctaagttatttacttttcattgaattgaaatttattttgggtgaatgactggcatgaacacgtctttgaagttgtggctgagaagatgagaggaatatttaaataacatcaacagaacaacttcactttgggccaaacatttgaaaaactttttataaaaaattgtttgatatttcttaatgtctgctctgagccttaaaacacagattgaagaagaaaagaaagaaaaaacttaaatatttatttctatgctttgttgcctctgagaataatgacaatttatgaatttgtgtttcaaattgataaaatatttaggtacaaataacaagactaataatattttcttatttaaaaaaagcatgggaagatttttatttatcaaaatatagaggaaatgtagacaaaatggatataaatgaaaattaccatgttgtaaaaccttgaaaatcagattctaactggatttgtatgcaactaagtatttttctgaacacctatgcaggtcttatttacagtagttactaagggaacacacaaagaattacacaacgttttcctcaagaaaatggtacaaaacacaaccgaggagcgtatacagttgaaaacatttttgttttgattggaaggcagattattttatattagtattaaaaatcaaaccctatgtttctttcagatgaatcttccaaagtggattatattaagcaggtattagatttaggaaaacctttccatttcttaaagtattatcaagtgtcaagatcagcaagtgtccttaagtcaaacagnnnnnnnnnnnnnnnnnnnnnnnnnnnnnnnnnnnnnnagaaagttctagaaaataggaaaacgaaaaatttcattgagatgagtagtgcatttaattattttttaaaaaactttttaagtacttgaattttatatcaggaaaacaaagttgttgagccttgcttcttccgttttgccctttgtctcgctccttattctttttttggggggagggttatttgctttttta

SEQ ID NO: 188400 - DNA, 1301 bp, Homo Sapiens
  misc_feature (1017)..(1054): n is a, c, g, or t
acaaaaaagttggcatcatgatgcttctacatttaccataaacattgcacttaataacgtgggagaagactttcagggaggtggttgcaaatttctaaggtacaattgctctattgagtcaccacgaaaaggctggagcttcatgcatcctgggagactcacacatttgcatgaaggacttcctgttaaaaatggaacaagatacattgcagtgtcatttatagatccctaagttatttacttttcattgaattgaaatttattttgggtgaatgactggcatgaacacgtctttgaagttgtggctgagaagatgagaggaatatttaaataacatcaacagaacaacttcactttgggccaaacatttgaaaaactttttataaaaaattgtttgatatttcttaatgtctgctctgagccttaaaacacagattgaagaagaaaagaaagaaaaaacttaaatatttatttctatgctttgttgcctctgagaataatgacaatttatgaatttgtgtttcaaattgataaaatatttaggtacaaataacaagactaataatattttcttatttaaaaaaagcatgggaagatttttatttatcaaaatatagaggaaatgtagacaaaatggatataaatgaaaattaccatgttgtaaaaccttgaaaatcagattctaactggatttgtatgcaactaagtatttttctgaacacctatgcaggtcttatttacagtagttactaagggaacacacaaagaattacacaacgttttcctcaagaaaatggtacaaaacacaaccgaggagcgtatacagttgaaaacatttttgttttgattggaaggcagattattttatattagtattaaaaatcaaaccctatgtttctttcagatgaatcttccaaagtggattatattaagcaggtattagatttaggaaaacctttccatttcttaaagtattatcaagtgtcaagatcagcaagtgtccttaagtcaaacagnnnnnnnnnnnnnnnnnnnnnnnnnnnnnnnnnnnnnnagaaagttctagaaaataggaaaacgaaaaatttcattgagatgagtagtgcatttaattattttttaaaaaactttttaagtacttgaattttatatcaggaaaacaaagttgttgagccttgcttcttccgttttgccctttgtctcgctccttattctttttttggggggagggttatttgcttttttatcttcctggcataatttccattttattcttctgagtgtctatgttaacttccctc

SEQ ID NO: 188401 - DNA, 1285 bp, Homo Sapiens
gacactcgtagggcctctctccggtgtgcgttctcttgtgtgcgatgaggtggcagctccggccgtaagccttcccgcactgatcacacttgtaaggcctctcgccagtgtgaactcgcatgtggattttcagggccgagagggtccggaatgcatttccacactgactgcagtcaaagggcttctctttgaggtgagttcttgcgtggctctaagggctgaagggtcgttgaaggctttcccgcagtcgctgcactcgtaaggcttctccccggtgtggattctcctgtgccgtgtgagggacgcgctcgtggtgaaggctttttggcactgatgacattcatgcatttttctcccgtcgtacatgctcatgtgctgagtgaggtgcggcctgcccttgaacgctaccccatagtcgcggcggtgatagggcctcttgccagcgtgccttcccattggctgagtgagatgagggtccatgccaaagacttcgaacaagtgagcgtattcagtggacttctctccaagaccggctctttccatcgtcacaccactgggcgtttccttcccaaaaatatcttccataagaagtgaccacttggttttagatggagtctcccaatctgcacaagcgccctggtgagcgcccctctcctctgtcctcggctcctcctcctgctccaagtgtgagatgaggctgggtttgccgacctgataccccagtgaagtgaggttgctgtagttctccagcattacatctttgtacagttttctctgagaagaatccagcaagggccactccttctcggtaaagtccacagcgacatcttggaaagtcaccgattcctgggaaccaacactgggtgtgtgaggctccagaccactgcacacgaacaggtccaaattctggggacaggaatggtcttttgaagaaacaggaaattctgagtcatggagacaggtggaatcctgggtggacgtggcaaatgtgggggacagagctgccatcctcagagaatggcagtcagtttgcctgagcagggcaccaggacaaccagaaagctactctcttgctctcacgtgactctccaagctggcatacgactgggaataggatcgggggagcggaggtgacggaagccgccgccgatgcgaagagaagttcatacgggaggtccagtctggcgtggggacacgaggggtccccaacaggccgaaagaattcgccgctgacccctccttggcccatgtgtctcggggcaatcgactccagagagtaatccaa

SEQ ID NO: 188402 - DNA, 943 bp, Homo Sapiens
ttggtgtagatctcccggtttcagttgacaccattccctctccatgatcttcagacttaactactactgggtgcttccccaacccactggttgggtgtctttaattgtgaacacatatttgtaaatagtgcctttattaattgttcttgagttaatattctgagtgtgccatttattttctgtgccatctgttaaatgatgagcatttaataaaattgtgataatcagttatcagtacaagtgccgcatagtgcataggctgaaatgtctcaagattccccacactacatatcagtattttctatctgtatctggacaatgcagtagaaattataacaaatacaaagttctttgtgcttttctgctgcatatgtcagtggctctggagattgttaccatctgctacatatataaatagacttgtagttattactaagctcctcttcagtaatagaaagacttatgaagtcttttactacctctgggttagccaaacaaccttcaaaaagcattgttatttaggttaaatatctgtggacaagaaacaagataatcagttactgagtgaagaaagacgggaatgatgtcccatacttcccagctctctaaagtgttatgctgtacaattaaaatacccctgacccatcatctgctaccattcgttgtggataattcatgtaatctctaacctgtgggcaagtctttacccttcagtagtcaagattacgttagagacttcgtccacgaatccacaccacctttcccatcagttctcaccggaaatatgctgccaaaaagaaaatcagcttttctaagatcaagccggagttgcttctcttataaccttacggcgctaatgcattaaattgaagtcgactgccaaagaggccagcagagggcagcaccccatcatttttttaatttctcccttaagaattttgcc

SEQ ID NO: 188403 - DNA, 841 bp, Homo Sapiens
cgctctgaaccactccatgtgccggggccgctggagccatgaccttgcggtgtgggcagctgcgtgttctggcaccagacgtgtccctgcctggctagagtccgcgctctcccctccagggctccggggaacaaggggtgcagacagaaaaggggtgaagggggcccgcagagacgtcctctcccccgccccacggggtcctggcctccgggaggggggaggggcctcccttatctctctgcctccatggcagggtgggccctgggttctgaggtggcctgttggggggccaggggtggccagtctgaagccggagaagggggtgttggagtccacaggggcggctgtggctggtggtgctgtgggccccccgggggcgaggccgccgtgggccagctggaggccgcagagctgctggtggcggcatgggggaagtgtggcgggggtgacgtggctgtcgcggccatcgggctgccgctgccaccgctgtggaagctctcggaggccttgagacgggagaacatggtgagagcgtcagggaagttggggggtgtagcaggggtattggcgggggtgcacatcatctggtggtgatggtggctgtaggggatgttggtctcctggaaaaaggcgctgagggctgtctcgaactgccagtgggccgcctgcagcagttgcttcgcctggtcggccgcgcagcccgccgtcagcacgaactggttgatcatgacctggtgcttgagctcgtccatgttcacggacatggcgccgccgcgctgcccgctccggcctccctccgccgcccgcgcctccgcctcacgcgccaacttttttgtacaaa

SEQ ID NO: 188404 - DNA, 1927 bp, Homo Sapiens
tttgacctggtagattttgcttctctttggtcagaaaagggtattcaggttgtactttcccccagcagggtagaaagaagggcaaagcaaactggaaagagacttctactctactgacagggctcttgagatccaacatcaagctagacacgccctcgctggccactctacaggttgctgtcccactgctgagtgacacaggccatactacatttgcaaggaaaaaaatgaggcaagaaacacaggtataggtcacttggggacgagcaggcaaccacagcttcaaaactcttcatggaaggggtaatccttgtgggaggtacagctcaacaaggcacagaccctccagttcctgttgtagctgagtaaggtggtcatatcctggctgctcagttcaaagtcaaagaccttaaagttctcagcaatgcgttctggtgtcacagacttggggatcaccaccaagttcctctgcatggggaaccggatcaggacctgtgagcccaaggagacagtgagtgtgtatacatgccaggcactcgcacccatcatctcagtctctcacacacacaacctgcagaaggacgtgctagaactccacaggtgatcagagaggggctccaagatgtcaggtcacagctagcaacaggtaggcgacgcattcaggtccagatctgactccagagtcctgcgctagccactgtgccacacgcttcagtgtctcaggcatatcatgagaccacatgaggccctccactggctagaaatgcacactaccactcaggagaaagaacattccctgcacggctaagacctcttacatttgtacagatgagcttccacatgaatgaacaagcgctggccctcgtggcagtcacccttgcagtagtgggggcaggcactattaatctaagagcccatgccagagtcttctaaaaccccgatctgtgccctttccactctgtacttgaggacccctaaccatacttcctgtgagggtgtaacaggctcagtcacttcctcctcttggctaacaggactgtcaggaatgcaggcagttgtggacggtcagcaacacctgaagtggctgtacctgggctgtagttttattgtgcttggctgcgatcgccttgatcctgggatcctccaggagagaagggtcctcgggcttggcccagggcctgtcaggagagccgagggggctgtaggcggtcaccacgatgcctttggactggcagtactggattaacttctcctgagtgagatatgggtggcactcaatctggttaactgcaggcttatacttcaagccaggtttgtttaagatcatctccacctggagatggttgaagttggagatgccaatagctttcaccagcccttcatccaccagctcttccatggccgcccacgtgtccagaatgttggtgtcactgggaaccacattgcccgactcatccaatgggaaaaattccttcccaggcttaaagccagtcggccagtgaataaggtagaggtccaggtagtccagcttcaggtcgctgagtgtcttctggcaggctcctttcaccaggcccttctcatggtacgtgcaccacagcttgctgacgatgaagagctcctcacgcttcaccacctgctccctgagcttctcctgaatggccacccccacctcattctcattctggtacacatgggcacagtcgatgtggcggtacccgacgtcaatggccaccttcacggcctcagtcacctgccctggaggggacttccaggtacccaaccccaggatgggcatcttggcgccgttgttgagcaggagacggcttgccatggctgctgcgctccccagacccccgcccagtacggtgcggccttggccgcggcgcgtacctttaaatagcccgtgaggtcggcagaaagggcccaa

SEQ ID NO: 188405 - DNA, 929 bp, Homo Sapiens
ttgggactgtcttatatctagcaatggaatcatctccagccgcctagcaggcaagttaaggtacatggacagcagagaagatgaacagatccgagggatcactatgaaatccagtgccatttccctacattatgcaacaggtaatgaggagtacctgatcaatctgatagactctccaggacacgtggacttttcctcagaagtatcaaccgctgttcgcatttgtgatggatgcatcattgtggtagatgctgtggaaggagtctgtccacagacacaggcagttctgcgacaagcttggcttgaaaacatccgtccggttttagtgattaataagattgatcgcttgatagtggaactgaaattcaccccacaagaggcctattctcacctcaagaatattttagaacagattaatgcgctcacagggactctttttacttctaaagtcctagaagaaagagcagagagggagactgaatcccaagtgaatccaaattctgaacaaggagagcaagtatatgactggagcactggcttggaggacacagatgattctcacctttacttctctccagaacagggaaatgtggtgtttaccagtgcaatagatgggtggggctttggaattgagcacttcgccagaatctacagtcaaaaaattggcatcaaaaaggaagttcttatgaaaaccttgtggggagattactatataaatatgaaggctaaaaagatcatgaagggtgatcaggccaaaggaaagaaacctttatttgtacagttgatcctggaaaaaatatggagtttgtatgatgctgttttgaaaaaggacaaagacaaaattgataaaatagtgacttctttagattaaaaattggagcccgggaggcacgacattcagaccctaaagttcagatcaacgccatttg

SEQ ID NO: 188406 - DNA, 1643 bp, Homo Sapiens
  misc_feature (85)..(104): n is a, c, g, or t
  misc_feature (355)..(369): n is a, c, g, or t
taaaggaaatcccaaacaatgtctcccttctctagttattccgcttaccccagtcctcctaggcttctgtgaatttcagaaagcnnnnnnnnnnnnnnnnnnnnctttttgttcaaggcgatttaaaaaaacaacttcacaagatagggagaattgtggtgtgcttgtcacatgttaccagtggtaacaattttaatgacaaaaaaatccactaattccaaatgcataaacaaaactacattatttatctacagccagaaggatatggaaatttagaggtaaatgaaacattttagtcaggcaatgtaagaccttacagaaactggaagagaagtccccttctcttggtaattcnnnnnnnnnnnnnnnaaagctgggatatcttacagaggaaggaaaaattaaccttttttactttctttctcactttttaaatcagccaaagtcaagcccgtttgccaacctgcatgtccatgcctgtaagcccttctcttggccaaggaagaaaggaagaaagaaaaaagaaacccaggggcctgtatcccctgattaaacacagcacagcactccaggcagacatgcccggtggcggctcctttgcaccattgacctcaggccagacacctcagcgccaacaatgggacctcggccttccggctaggtttgccccaggctgggcaggaaaccagctcggccgaagacaggggccatttcgagcagtgggaccccaagacagcaaacccagcccagtcaggacttgacacttaggacaatatctatctctatagaattttagcatgatatggctttttcccccagaaaacaacaaataaaccagcaccaagcaaacacaaagaaacaaaaagtcagaacaaaccagccctgcacagatgtaacggcccaggagatggcgagtgtgggagggaggaacagggctccagcacaggtgcgagttcctgggcagagcctgaagacagagggaggggaccagcgctcgggaagtgaaaaaaccgcgtcgcctggagattcatcaggaaaaattaaagttggctgtgagctcccggatccggttttctcgattcattttcttcagtttcatcctgcggttctgaaaccagattttcacttgtctgtccgtgaggtggacgctgcggctaatctctaggcgccgctctcgagtaaggtacatattgaacagaaactccttctccagctccagtgtctggtgcttcgtgtaggggcagcgcttcttccgaccactctttgccgtgagccagttggctgcgttttcacctttggaattgccttgacacatttccgaaatcactgccaagggacagctggcttctccgcgcggcgacgctcgcgaggcctagcgaatgcgcgttgctttaaattaccataccaatcacttcttgagggtgagtcccctttttctgttatgaaggggagcgggacaagtgaaataatgtaccgtgctgctcttagtatcagaagcgaacaaaggccaagaatcatgctggggttcccggctccccggcggctttgacattgatcggaagtgcgccatctcgtggcggctgcgcgcctaggttgggccggagttccagccccgagccgagagacggaaaccagctccgggc

SEQ ID NO: 188407 - DNA, 1327 bp, Homo Sapiens
  misc_feature (533)..(614): n is a, c, g, or t
  misc_feature (806)..(883): n is a, c, g, or t
  misc_feature (1143)..(1155): n is a, c, g, or t
ttggcccttttgtagaggcttccaaccaacacataaaattgtggattggggtttcttgctagattatgaattataactagtgcctgtgatagctaaagttaaaatgtaactttaggactggaataaaccagacctttggttttagtctgcagacacacagcaactagaaaagatggcgtgactgcggatgggagtgggtgggggagtcaacagaatgcagtgtgaactaacctttcagttccctttaaacccacgtttcagaaatatgccgagcgccagtccagcaaacccgaagtacgtgatggaatggaacttgttcctcagccagaagatagcacagccatctgccagtgccacaggaaaaagccttcaagagaagaactttgagtcagcccagaatcacactcctgtgtatcccggctacactttaaggaaagattgaatctaagctgtgaaggacagtatagaagactgcaccaagtggactagttctcccggtggctttatatatgtagatggatatagcagtactnnnnnnnnnnnnnnnnnnnnnnnnnnnnnnnnnnnnnnnnnnnnnnnnnnnnnnnnnnnnnnnnnnnnnnnnnnnnnnnnnngtacataatgaggtatcttggggatgagatccaagtctaaacacaaaattcatttatattttatatataccttgttcacataccctgaaggtaattttatataatatttttaataatttgtgcatgaaacaaagtttgtatacattgaactgtcagaaagcaaaggtgtcactatcttagcgacccaagtgnnnnnnnnnnnnnnnnnnnnnnnnnnnnnnnnnnnnnnnnnnnnnnnnnnnnnnnnnnnnnnnnnnnnnnnnnnnnnntatttgaacaagcattaccaaatatcattgaatattaatatcttttgcgtaaaaactgctattatcagcatcatagtttctctaaaaagaaaacttggggatcatagccgatagagagacttgctaaaatataaatcagcctctgcaaaactgtttacatatttattggtttacatattttattggtttatttctatcccctgttcactttttctcttccacttccaattatgaagagaaaatatttgttcagggttgtnnnnnnnnnnnnngtcactgcataatttctcctcttacaagctgcttttggctttcattaataacagcttccttttagaagtctgataagatatttaatgaagaagagaatgactctgttattaaaggtggcatggagactgtggagggaatattttttaaaagcactactcatatcctttaaac

SEQ ID NO: 188408 - DNA, 1576 bp, Homo Sapiens
  misc_feature (63)..(76): n is a, c, g, or t
  misc_feature (1087)..(1137): n is a, c, g, or t
  misc_feature (1356)..(1389): n is a, c, g, or t
  misc_feature (1425)..(1433): n is a, c, g, or t
ttggggtatcttgtaaaatgagggtagtgccacttcttagtatttttgaaagctgttttagannnnnnnnnnnnnnccttttctagccatctaaattgactcttccaatataggtctcaaaaatccaatatttggagtacaatttcttttaatccagattacacctgccttacaaagcaccccctccttgttcccctctgtttcctctactcagttgggggagaaactcacagctcctccgggatacatatgtgccctcagcagcagctcccaggtgaagttaccagacccctgggcttctccccagctttttctgagttgagtcagacatgtagagtttgggtcacacaggcaagaggaattttccctcggccttactgacaaggacaccaacctagggtgcaaacagatggactatggttcaaggacactggaattgaggagctgatcaaggctctcttcagccttgctctgtccctgcctcttatcagagcacaggtagacacacgggcatagccagcccactcctactgtcacaggcgccccaccattcaaccttccgggaggtcagggaccttctatatgaggcgagtgggtctcagtctgcttgaatggtgatgagattctgctggatctcagcacgctgcaggtgtcttttgagagcattcagtaggacatggtgatccctatttcagcctctaagatgactggtattctatctgaaatgcagagattaagccaaatacctgatgtattgtgaaagccactgattttaagaatggagagaaagggattttttactgcatccctctgtatgaatatgaaatcagagaccagggcatgatgttgctaggattagagcctctcagtctggcctcttcacccaagtgcaagaactcagtctcttactgttcagaaagaatcttaacagttgaattatggagggaaattcccttttgccccaagcatttctatatttaaagcaatatcccaggagaatatgttagacttaggatgataccttcagccacttgaagaagaaatagaaggcgctcattccaatatagtctttatttcccattcagannnnnnnnnnnnnnnnnnnnnnnnnnnnnnnnnnnnnnnnnnnnnnnnnnnaatccaaaccttcctgaacgctatgacaccatgagtggaaaattccacacctaacaaacacatttgctttcttatggttcaatgtacacaaactgttttatatagaaaatgatttcaaatatcataaaattaccttcaggctatgtgtataaagtatatatgagccataaatgaattttgtgtttagactttgtgtccatccccaagatctctcatttnnnnnnnnnnnnnnnnnnnnnnnnnnnnnnnnnncacacacacacacatacacaaatattccaggatacnnnnnnnnncatttaaaaatccgagacccagaacacttctggtcccaagcatttcagataaggggatatcaatctgtactaccaataaggatttcgtaatttctcctaactgcaaatgtcctcttcatttgttctttatgagaaaacccggg

SEQ ID NO: 188409 - DNA, 967 bp, Homo Sapiens
agcaatgcttttttataatgccaactttgtacaaaaaagttggctaatctttcagattactgtgagtttgaagaagtcagcttatctttccaaataacatttaattataatgttttttaaaaaatatattcctcttcagtcattgttactgaaggtaatgaagcagttactttctgtggaagtcataaagttaatagatattaatcttgactcatctagctcagtggttctcatcaagggtcaatttgattgtcatagtgaccttgaaaaccactggcttttagtgagtggccaggaatgctaaatgttctgcagtgtcaggggtagtcccacatactaaagattgtctcacccgcagtgccaataacactcctaagaaatgttgatggctattttgtggtgctaacatgtagttggggcacctacaattgggttctcttaataacctttctttgcagttaagactgaagctgtcaaagaggtaagcacattttatatagacgtaaggaaagtgattattgtttaatatctgtgaatttaggatgtgcatctcttttcagaggtgtgttagtaaaacctgacggattaactaagcacactgggatgtgtctcctacagttggcttctctctttgatgttacctgttagtgctgatctcttaaagcagacatttcttgtttgttgaatttgtgaacagtatagatctcagcccaccaatgccaagacaaaattatttttcttatacttattttttattaaacaaaatgaaaaagatccttttcaaaaaggtgatcctgaaaataaaactaacactccagtattttgtcattgtttttcgcaattgagctatctgaaaactgttattcctaagtaatgttcaaaaatgataagtaatctggatacctttttcttatactttctcctaggaaaactttaaaactttaaaaggcaaacctacccattagga

SEQ ID NO: 188410 - DNA, 962 bp, Homo Sapiens
ttggcaaacttgcaccccaagagaacaggcccgtcacggaccatctggacgagcaggcagtgcagggcctgaagcagattcaccagcagctctatgatcgtcagttatacaggggtctgggaggacagctcatgagacaagcagtgtgtgttttaatagaaaagttgtcactttccaaaatgccctttagaggtgacaccgtaattgatggttggcaatggctgataaatgacactttgagacatctccatctcatctcaagtcactcccgccagcagatgaaggatgcagcagtctcggccctggctgctctatgcagtgaatattacatgaaggagccgggggaggcagatcccgcaattcaggaggagctgatcacgcagtacctggctgagcttcggaaccccgaggagatgactcgctgtggcttctcgttggccttgggcgcccttccaggcttccttctgaaaggccggctccagcaggttctcacaggtttaagagcagttacccacacttcccccgaggacgtaagttttgctgagtccaggagagacggcttgaaggccattgcgaggatttgccagactgttggtgtgaaagcaggagccccagacgaagctgtgtgcggagagaatgtttcccagatttactgtgcgctgctgggctgcatggacgactacaccacggacagcagaggggacgtgggcacctgggtccgcaaggccgccatgaccagtctgatggatctgacacttctgctggctcggagccagcctgagctgatcgaggcccatacctgtgagcgcatcatgtgctgtgtggcccagcaggccagtgagaagattgaccgtttccgtgctcacgccgccagcgtgttcctgacgctcctgcactttgacagccctcccatcccccacgtgccccaccgaggagaactggaaaagctgtttcccaggtcc

SEQ ID NO: 188411 - DNA, 423 bp, Homo Sapiens
ttggctaatagcctatagtttatattattattttgtattatttgcacgctgttacatagtatataatgataatgttttctacagtgaaagagctatcccgtcttccctttacaactgtctgaactttatttactcattagtcaaggttctttgcaaggcaggtgattaacttaaatatctcagtttatacagtggtttaaaagacttttgttatggtaatagggagagaaacttgtcagataggctaaaatctagataattctacatattctgaggaattcatgctcctgtggctcttgcttataaatatcttggaatgtttctgaatgcctctaagcctatgttcagactctgttgcgtcaatgactggtagtatttctttcattaatatgtttgtcatctggtctgcaagatagggttgga

SEQ ID NO: 188412 - DNA, 1375 bp, Homo Sapiens
  misc_feature (74)..(82): n is a, c, g, or t
  misc_feature (1146)..(1170): n is a, c, g, or t
ttggcgctgtgttctgctatctcgaggcacattctcccctccaactttgttaatgctacttgtctctggaacannnnnnnnncctacctcagagataaatgagatctccatttcccacttaacacagtgattatccttttttccccccccaaaatagtgacatttggtccaattataatctattttcctattgaactttcagcaataactgagctgtggcactagcagagctagtagccattatcagtgaaagaaaaagtccacatttctactctctgttgcaggtgaacaggagaggatggtacactgttactagaactcctctccttattgattatttttggacacacccagaaacttctttatggaggcttttgggttgatagtttaaaaggctgatttttctttttggttatgatttctcccttaagtggtctccgactttgtagcatttttatttaagctaaaacagagcacatgtatatgtacataagacacattaaatctataaatactatttattcattttatataaactaatgtaatggaaaacaaattcttatgactttgtggttttatagatgttctagaaactttgtatgtaggtatctacaaaattagttcattcccctgaatatttttgcattcatatttttgaggtcttgatgttttcagcctctggcgaatctttttcattgaatttgaaccatttgtaaaatctgtgatgctgaagcagagtgtgtcacaaagtgatgagaacattactaaaatccacggacgcactgcgacctaagggctcaacggctgactcggcagcgggcagccaccccacgctcccctgcggtcactcgcacaccacagcctgaagctcccccagcgcctgcacctcgcacacagctaaggtcaaagttcaaacgcactccacacggaagctcattctatacccgaagagcagtctcagaaagcaagattacttttgtgttttttaaaaaatgattctttaatgtatttttctaaacattctgattggaagtagtggattcctaaatgattccaaagtcatctgtaattcttctgtttttgttttgttctgtcttttcttcattttggctttgggtggggggaggggcaggtgacacaaaggannnnnnnnnnnnnnnnnnnnnnnnnggaatcttttccaataaccagctaaagatttgcactgaaatacaacttgtatgccttttgcatttttaaagcctgcttcctggatttaagcagagtgatagtgttcaaagagccagttcagcctgtaacataattgaaaaaagatatgtctgcactttgaggtcccttttgaatgccattcactagacctctcaagcattttgtt

SEQ ID NO: 188413 - DNA, 906 bp, Homo Sapiens
tacaaaaaagttggcccaataggtctaagtcacagggaattttgaaatctgggttagaccacagagactttctctttgtggagggagggccacaagagataagggtttttgggcatacttgggtccatccacatcccaggcaagggtttttgggcatacttgggtccatccacatcccaggcctctcagaaactagaaatgtgaagctgctcaagtcagcccaggagtttgtccctcacctctgatcctgactccttcctggcctctccccacgcaggtgcctggctgctacaaaccatgcaatgagccatgccccgccctggacacccccgcccagcatctgggcctccacgcttgggaccgtgggagcggccaacagagctatgtctggagacatatgataaaccacctcagcccccaccaagccgccgcacccgtagaccagaccccaaggaccctggccaccatgggccagagagcattaccttcatctctggctctgctgagccggcccttgagtcccccacctgctgcctgctctggcgaccctgggtgtgggagtggtgccgggctgccttctgcttccgccgctgccgggattgcctccagcgctgtggagcctgtgtgcggggatgcagcccctgcctgtctactgaggactccactgaggggactgctgaagccaactgggccaaggagcacaatggagtgccccccagccctgatcgtgcaccccccagccggcgggatggccagcggctcaagtcaaccatgggcagcagcttcagctaccccgatgttaaacctcaaaggcatccctgtgtatccctacccgagggccacctccccagcccctgatgcggactcctgctgcaaggagccactgggcgatccccacccatgcga

SEQ ID NO: 188414 - DNA, 1485 bp, Homo Sapiens
ttgggttgtttgaggccgggttgggggtgtgcgattgtgtgggacggtctggggcagcccagcagcggctgaccctctgcctgcggggaagggagtcgccaggcggccgtcatggcggtgtcggagagccagctcaagaaaatggtgtccaagtacaaatacagagacctaactgtacgtgaaactgtcaatgttattactctatacaaagatctcaaacctgttttggattcatatgtttttaacgatggcagttccagggaactaatgaacctcactggaacaatccctgtgccttatagaggtaatacatacaatattccaatatgcctatggctactggacacatacccatataatccccctatctgttttgttaagcctactagttcaatgactattaaaacaggaaagcatgttgatgcaaatgggaagatatatcttccttatctacatgaatggaaacacccacagtcagacttgttggggcttattcaggtcatgattgtggtatttggagatgaacctccagtcttctctcgtcctatttcggcatcctatccgccataccaggcaacggggccaccaaatacttcctacatgccaggcatgccaggtggaatctctccatacccatccggataccctcccaatcccagtggttacccaggctgtccttacccacctggtggtccatatcctgccacaacaagttctcagtacccttctcagcctcctgtgaccactgttggtcccagtagggatggcacaatcagcgaggacaccatccgagcctctctcatctctgcggtcagtgacaaactgagatggcggatgaaggaggaaatggatcgtgcccaggcagagctcaatgccttgaaacgaacagaagaagacctgaaaaagggtcaccagaaactggaagagatggttacccgtttagatcaagaagtagccgaggttgataaaaacatagaacttttgaaaaagaaggatgaagaactcagttctgctctggaaaaaatggaaaatcagtctgaaaacaatgatatcgatgaagttatcattcccacagctcccttatacaaacagatcctgaatctgtatgcagaagaaaacgctattgaagacactatcttttacttgggagaagccttgagaaggggcgtgatagacctggatgtcttcctgaagcatgtacgtcttctgtcccgtaaacagttccagctgagggcactaatgcaaaaagcaagaaagactgccggtctcagtgacctctactgacttctctgataccagctggaggttgagctcttcttaaagtattcttctcttccttttatcagtaaggtgcccagaaataagttattgcagtttatcattcaagtgtaaaatattttgaatcaataatatattttctgttttcttttggtaaagactggcttttaataatgcactttctatcctctgtaaactttttgtgct

SEQ ID NO: 188415 - DNA, 1131 bp, Homo Sapiens
ttggcaactactccggactacatcaactccttgctggccagcggggatctgcagctatctgggagtgcccactgcaccttcagcactgcccagaaagcaattgggaaggacaacttcacagccattcctgagggcaccaatggtgtggaggagcggatgtctgttatctgggacaaggctgtggccacagggaaaatggacgaaaaccagttcgtggctgtgacaagcacaaacgctgccaagatcttcaacctgtatccccgcaagggaagaatatctgtgggttctgacagcgacctcgtcatctgggatccagatgctgtgaagatcgtctctgccaagaaccaccagtctgcggcagagtacaacatctttgaagggatggagctgcgcggggctcctctggttgtcatctgccagggcaagatcatgctggaagatggcaacctgcacgtgacccagggggctggccgcttcataccctgcagcccgttctccgactatgtctacaagcgcattaaagcacggaggaagatggcagacctgcatgccgtcccaaggggcatgtacgatgggcctgtgtttgacctgaccaccacccccaaaggtggcacccccgcaggctctgctcggggctctcctactcggccgaacccacctgtgaggaatcttcatcagtcgggatttagcctgtcaggcacccaagtggatgagggggttcgctcagccagcaagcgcatcgtggcgcccccaggcggccgttctaatatcacatctctgagttaagcaagccttcctcaaagagaggggcagaagcaagaagagattgttttgaagccaaaatggtacaccgatatttaagaaggaaagcgaatccaaacggttgtgatctaaagaatcaataagcctcaagccttatgtttctccaatgttacgctcgcttgcctagctttacgaatattgctttgttttctgtttatgcatagccttgatttgtttgactcccctccccccatttacatgcatgcaatcagacaggccactaaggtaaaagagtctgctctatcatagtgttgagagcgtgtgtagtgctgcatcttatgacaaggggacagacaagctgggacgtca

SEQ ID NO: 188416 - DNA, 1295 bp, Homo Sapiens
ttggccccaacttctaccaccaacatcacccccaaacacaccagtacaggcaccagaacccctgtggcccacaccacctcggccagcagcagcaggctacccacacccttcaccacacactccccacctacagggagcagtcccttctcttccacaggtcctatgactgcaacatccttccagaccaccactacctatccaaccccatcacaccctcagaccacacttcccactcacgttccacctttctccacctccttggtgactccaagtactcacacagtcatcatcactacccacacacagatggccacttctgcctccatccactcaacgccaacaggcaccgttcctccaccaacaacgctcaaggccacagggtccacccacacagccccaccaatgacagtgaccaccagtgggaccagccaaacccacagctcattcagcacagctacagcctcttcttccttcatatcctcctcgtcttggctgcctcagaactctagctcaaggccaccgtcatcacctatcaccacacaactcccccacttgagttctgcaaccactcctgtttccacaactaatcagctgtcctcctcattttctcccagtccttctgccccctctactgtttcttcttatgtgccctcctcccactcctctccccagacttcatcgccttctgttggcacatcttcctctttcgtgtccgcccccgtgcactccacaaccctgagctcggggtcacactcctcattgtccactcatcccacgactgcatcagtgtctgcatctcctctttttccttcttctccagctgcctctactaccattagggccactctcccccacactatctcctctcctttcaccctctctgctctactccccatatccactgttaccgtgtctcccaccccatccagccacctagcctccagcaccattgcatttccgtccacgcccaggaccacggccagcacccacaccgcccctgccttctcctctcagtccaccacctcgcggtccacttctctcaccacccgagttcccacatcaggctttgtgtcactcacctcgggggtgacgggtatccccacctctccagtcaccaaccttaccaccaggcaccctggtcccaccttgtcgcctaccacacggttcctgaccagctccctcactgcccatggaagcacccctgcttctgccccggtatcttctctcgggacacctacgcccacctcacccggggtctgcagtgtgcgggagcagcaggaagagatcacgttcaa

SEQ ID NO: 188417 - DNA, 1590 bp, Homo Sapiens
  misc_feature (278)..(321): n is a, c, g, or t
tcaacacctctacagagagctgtagctggttttcagtgaggccagaggacaccatcttaaagtctgtactgctgctgcccccatcactcaccttcgctggagatttgctgctttagtagtgggagaaattgaaacagtagtggtagcagtcgtgggggtagtcactgtggtcgaagcagctacgacaatggtggaaatagccgtggcagcaaccagggctggagcagaagtgacaggggtgggtgcagtagggggtgtgggcgtggtggaggcggcannnnnnnnnnnnnnnnnnnnnnnnnnnnnnnnnnnnnnnnnnnnggaagcaccgctgccagaattagcctgtgcttctgacaccttgttttctgggagagcaattgagatgagagaaaggagtctgaggagtttctcagttaagagagagctccggcggatgactgggtgtgacaacatgttcatgagctgccccagtggagaggcctcgaggctgtatggagaggtttccccctcaccgccagcgctcactggcactgacttcacggagttcttgcctttccggctgacattcatgttgtccagttttaccaataagtcccagaagtctgtgcaaatgccactgctggaggactgtgaggagcatgggctacaggccttattgcccctttcccgatcactctcacagtttgtttctttggtccgctgctgtgtgaagtggctgggaaataccttggccaattgaatgagtgtatccaaaacgtgtctgcagacaacaggagcagcttggggatggatgtggacggtggagccaccgcttgcatgcttctcggtatgtttacgcccccctgaacgctggatctgaaatatattagtcctgcagcctagggctgcatccatggatactgagagccaggaaagctggttggagctctttgactccatcttgtgtagcaggtccaggggacggttctcatggctacttgacccacagctcttgctcgactttttgcccttttcctcacttgtagtgagtttgggtgtttcaatgcatagctcactctcactgctgcgctgcaagatggagagcagactgcggatgacccagtggcgggtctgggcatggtagcagagatttctcagtactcggtgtagacggctagtattgagctttggctcatccacaaaaagtaggaccaagagacaagaaagggcttcgtggtccagaaggagccgtcctcggaggcggaggagagtatctacattactgccagaaggcctgttatggctgctgctaccccccatctggaaggtgccacctctctgcacagcaaggcgagtatactggaccccacggttgccacttaagcgactggtgaaagccgggcttcggagaatagcagagagtgcggaggtgctactgtgcccaaacagacgctcatgcatgagctgtcgctgccgggcttcttgctctcgtctcagggcttgagcctcagctgcaatgtcaggtggcatcacagctaacacactgtcctccatatcctctaggacactacggcgcaggtctgagggcagagtctggatgaaggccaa

SEQ ID NO: 188418 - DNA, 3777 bp, Homo Sapiens
ttggatggaagtttgcagaaattgttcagctgtattatgctgtcgtatggctccactgcagaaagcaaaagtaataagactaataaaaatatcacctgagaaacctataacattggctgttggtgatggtgctaatgacgtaagcatgatacaagaagcccatgttggcataggaatcatgggtaaagaaggaagacaggctgcaagaaacagtgactatgcaatagccagatttaagttcctctccaaattgctttttgttcatggtcatttttattatattagaatagctacccttgtacagtattttttttataagaatgtgtgctttatcacaccccagtttttatatcagttctactgtttgttttctcagcaaacattgtatgacagcgtgtacctgactttatacaatatttgttttacttccctacctattctgatatatagtcttttggaacagcatgtagaccctcatgtgttacaaaataagcccaccctttatcgagacattagtaaaaaccgcctcttaagtattaaaacatttctttattggaccatcctgggcttcagtcatgcctttattttcttttttggatcctatttactaatagggaaagatacatctctgcttggaaatggccagatgtttggaaactggacatttggcactttggtcttcacagtcatggttattacagtcacagtaaagatggctctggaaactcatttttggacttggatcaaccatctcgttacctggggatctattatattttattttgtattttccttgttttatggagggattctctggccatttttgggctcccagaatatgtattttgtgtttattcagctcctgtcaagtggttctgcttggtttgccataatcctcatggttgttacatgtctatttcttgatatcataaagaaggtctttgaccgacacctccaccctacaagtactgaaaaggcacagcttactgaaacaaatgcaggtatcaagtgcttggactccatgtgctgtttcccggaaggagaagcagcgtgtgcatctgttggaagaatgctggaacgagttataggaagatgtagtccaacccacatcagcagatcatggagtgcatcggatcctttctataccaacgacaggagcatcttgactctctccacaatggactcatctacttgttaaaggggcagtagtactttgtgggagccagttcacctcctttcctaaaattcagtgtgatcaccctgttaatggccacactagctctgaaattaatttccaaaatctttgtagtagttcatacccactcagagttataatggcaaacaaacagaaagcattagtacaagcccctcccaacacccttaatttgaatctgaacatgttaaaatttgagaataaagagacatttttcatctctttgtctggtttgtcccttgtgcttatgggactcctaatggcatttcagtctgttgctgaggccattatattttaatataaatgtagaaaaaagagagaaatcttagtaaagagtattttttagtattagcttgattattgactcttctatttaaatctgcttctgtaaattatgctgaaagtttgccttgagaactctatttttttattagagttatatttaaagcttttcatgggaaaagttaatgtgaatactgaggaattttggtccctcagtgacctgtgttgttaattcattaatgcattctgagttcacagagcaaattaggagaatcatttccaaccattatttactgcagtatggggagtaaatttataccaattcctctaactgtactgtaacacagcctgtaaagttagccatataaatgcaagggtatatcatatatacaaatcaggaatcaggtccgttcaccgaacttcaaattgatgtttactaatatttttgtgacagagtataaagaccctatagtgggtaaattagatactattagcatattattaatttaatgtctttatcattggatcttttgcatgctttaatctggttaacatatttaaatttgctttttttctctttacctgaaggctctgtgtatagtatttcatgacatcgttgtacagtttaactatatcaataaaaagtttggacagtatttaaatattgcaaatatgtttaattatacaaatcagaatagtatgggtaattaaatgaatacaaaaagaagagcctctttctgcagccgacttagacatgctcttccctttctataagctagattttagaataaagggtttcagttaataatcttattttcaggttatgtcatctaacttatagcaaactaccacaatacagtgagttctgccagtgtcccagtacaaggcatatttcaggtgtggctgtggaatgtaaaaatgctcaacttgtatcaggtaatgttagcaataaattaaatgctaagaatgattaatcgggtacatgttactgtaattaactcattgcacttcaaaacctaacttccatcctgaatttatcaagtagttcagtattgtcatttgtttttgttttattgaaaagtaatgttgtcttaagatttagaagtgattattagcttgagaactattacccagctctaagcaaataatgattgtatacatattaagataatggttaaatgcggttttaccaagttttcccttgaaaatgtaattcctttatggagatttattgtgcagccctaagcttccttcccatttcatgaatataaggcttctagaattggactggcaggggaaagaatggtagagacagaaattaagactttatccttgtttgcttgtaaactattattttcttgctaatgtaacatttgtctgttccagtgatgtaaggatattaagttattaagctaaatattaattttcaaaaatagtccttctttaacttagatatttcatagctggatttaggaagatctgttattctggaagtactaaaaagaataatacaacgtacaatgtctgcattcactaattcatgttccagaagaggaaataatgaagatatactcagtagagtactaggtgggaggatatggaaatttgctcataaaatctcttataaaacgtgcatataacaaaatgacacccagtaggcctgcattacatttacatgaccgtgtttatttgccatcaaataaactgagtactgacaccagacaaagactccaaagtcataaaatagcctatgaccaactgcagcaagacaggaggtcagctcgcctataatggtgcttaaagtgtgattgatgtaattttctgtactcaccatttgaagttagttaaggagaactttatttttttaaaaaaagtaaatggcaaccactagtgtgctcatcctgaactgttactccaaatccactccgtttttaaagcaaaattatcttgtgattttaagaaaagagttttctatttatttaagaaagtaacaatgcagtctgcaagctttcagtagttttctagtgctatattcatcctgtaaaactcttactacgtaaccagtaatcacaaggaaagtgtcccctttgcatatttctttaaaattctttctttggaaagtatgatgttgataattaacttacccttatctgccaaaaccagagcaaaatgctaaatacgttattgctaatcagtggtctcaaatcgattttgcctccctttgcctcgtctgagggctgtaagcctgaagatagtggcaagcaccaagtcagtttcccaaa

SEQ ID NO: 188419 - DNA, 1603 bp, Homo Sapiens
actttgtacaaaaaagttggctatattcatcctgtaaaactcttactacgtaaccagtaatcacaaggaaagtgtcccctttgcatatttctttaaaattctttctttggaaagtatgatgttgataattaacttacccttatctgccaaaaccagagcaaaatgctaaatacgttattgctaatcagtggtctcaaatcgatttgcctccctttgcctcgtctgagggctgtaagcctgaagatagtggcaagcaccaagtcagtttccaaaattgcccctcagctgctttaagtgactcagcaccctgcctcagcttcagcaggcgtaggctcaccctgggcggagcaaagtatgggccagggagaactacagctacgaagacctgctgtcgagttgagaaaaggggagaatttatggtctgaattttctaactgtcctctttcttgggtctaaagctcataatacacaaaggcttccagacctgagccacacccaggccctatcctgaacaggagactaaacagaggcaaatcaaccctaggaaatacttgcattctgccctacggttagtaccaggactgaggtcatttctactggaaaagattgtgagattgaacttatctgatcgcttgagactcctaataggcaggagtcaaggccactagaaaattgacagttaagagccaaaagtttttaaaatatgctactctgaaaaatctcgtgaaggctgtaggaaaagggagaatcttccatgttggtgtttttcctgtaaagatcagtttggggtatgatataagcaggtattaataaaaataacacaccaaagagttacgtaaaacatgttttattaattttggtccccacgtacagacattttatttctattttgaaatgagttatctattttcataaaagtaaaacactattaaagtgctgttttatgtgaaataacttgaatgttgttcctataaaaaatagatcataactcatgatatgtttgtaatcatggtaatttagatttttatgaggaatgagtatctggaaatattgtagcaatacttggtttaaaattttggacctgagacactgtggctgtctaatgtaatcctttaaaaattctctgcattgtcagtaaatgtagtatattattgtacagctactcataattttttaaagtttatgaagttatatttatcaaataaaaactttcctatataattaaaagtgttcctttatttaagcattttaagcctgtctctgtttatcacaacctgcactgccaaacttgtttcaagttaagttttactgtatttacccttcattatagcacagggatatcatttatgcctttcactgactgcagttttttaaaatgtagttcttacccagcttttatagatcatcatcagtacaactcctggaaaaggctctgataggaatgtgccagctgtagataccagcatacctcaactagaaattgcatcattcatgaaaagccagccaagagcacttgtgaatttggaaatggcctggttcatagaaaatatgtgcttttttaaaaatccaacttttttgtacaaagttggctattataaaaaag

SEQ ID NO: 188420 - DNA, 1463 bp, Homo Sapiens
ttgggacttggacgaggacgactttgacgtggggaagccgaagaagcagcggagatcgattgtaagaacgacgtccatgaccaggcaacagaacttcaagcagaaagtggtagcgctgctgcggaggttcaaagtgtccgacgaggtcctggactcggagcaggaccctgcggagcacatccccgaggcagaggaggacctggacctcctgtatgacaccctggacatggagcaccccagcgacagcggccccgacatggaggatgacgacagcgtcctcagcacccccaagccgaagctgcggccatactttgaaggcctgtcgcactcgagctcgcagacggagattgggagcatccacagcgcccgcagccacaaggagcccccaagcccggctgacgtgcccgagaagacgcggtccctgggaggcaggcagccgagcgacagtgtctctgacacggtggccctcggtgtgccaggcccgagggagcaccctggacagcctgaggacagccccgaggctgaggcatccaccctggatgtgttcacggggaggctgccgcccagcgggaggatcaccaagacagagtcccttgtcatcccctccaccaggtccgaggggaagcaggctggccgacggggccggagcacatccttgaaggagcggcaggcagcacggccccagaatgagcgggccaacagcctggacaacgagcgctgcccggacgcccggagccagctacagatccccaggaagactgtgtatgaccagctcaaccacatcctcatctccgatgaccagcttcccgaaaacatcatccttgtcaacacctcggactggcaggggcagttcctctccgacgtcctgcagaggcacacgctccccgtggtgtgcacgtgctctcctgcggacgtccaggcggccttcagcaccatcgtctcacggatacagagatactgcaactgcaattcccagcccccgacccccgtgaagatcgccgtggcgggagcgcagcattacctcagtgccatcctgcggctctttgtggagcagctgtcccacaagacacccgactggctcggctacatgcgcttcctggtcatcccactgggctcccaccccgtggccaggtacctaggctccgtggactaccgctacaacaacttcttccaggacctggcctggagagacctgttcaacaagctggaggcccagagtgcggtacaggacacgccagacattgtgtcacgcatcacgcagtacatcgcaggggccaactgtgcccaccagctccccatcgcagagagccatgctgacctacaagcagaagagccctgacgaagagtcctcccaaaagttcattctcttttgtcggggttgtgaaggttgggattgtgggagccatcctcggccacatcaaagcgactcggacgacgcggccccctcgggctctggcacgctc

SEQ ID NO: 188421 - DNA, 1305 bp, Homo Sapiens
  misc_feature (616)..(643): n is a, c, g, or t
ttggagggggacttaggggcattaatggtgaggccaggccagcccggggccgaaagcctggcagccggcgggagcctggccgactggccctcaaatgggggacacgtggtggcttcaatggacaaatggaaaggtccccaagaagaacccaccattggcagcataatggggagctggctgaagggggtgctgagcccaaggatccaccccctcccgggccccattctgaggaccttaaggtgcccccgggagtagtcagaaagtctcgtcgtggccgtaggagaaaatacaaccctacccggaacagcaatagctcccgccaggacattaccttggaacccagccctacagcccgagcagctgtccctctgcctccccgggcccgccctggccgtcctgccaaaaacaagaggaggaaactggccccatagcagccatacctggagctggatctgaccctgattggggagagctgagtgctgagccttgggagcccctgccagccacctgcacctgtggacagtgggtgggggcactactccccactcagagcacaaatgcaactccttcccctacaatcccatcctgagccattgcagggggcagggaagttcannnnnnnnnnnnnnnnnnnnnnnnnnnngaagccatgtcactgaaaaggcctgggggggatggtatatggccctttccccaccaggcgctaaggggaacacccccttccccaggtcttttatttgtttaagttatttttgcacaaatgactcttttatatttaattcgatttcattgcctcccttcttaaagccaacaggctcagtttacaaacctgtgagctactgttggctgctgccctccttcccagtgaaaggtacaaagcaataagcatcatgcatcctccccttacccctccaacacccctctgcctctggctcaggttgctcaaagcacagatcctctcttaccccgtccccaggtttgaaacacatagcctcatttcaaggtgtagccaggttcccccgactttcctctgggatataaaaaagggggtaagggggcaaagagagccctctgggcctctcctcccatacacactacactgccccttctccccccatcaaaacgctcagagacgttgtgatgatgcgactgaggattatgcaacgtggtccaaccggagcggccagcatgaccagctgtccaggggctgcctccctgccttttcttttgtaaagacaagacccttgggagttttaattctgttttgtacttgccctgtggggcctccactgcttttctatggga

SEQ ID NO: 188422 - DNA, 1145 bp, Homo Sapiens
ttggggagtatccagataggcgacacgccggcgggcggctgaggcgggaatggctgctgtactgcagcgcgtcgagcggctgtccaatcgagtcgtgcgtgtgttgggctgtaacccgggtcccatgaccctccaaggcaccaacacctacctagtggggaccggccccaggagaatcctcattgacactggagaaccagcaattccagaatacatcagctgtttaaagcaggctctaactgaatttaacacagcaatccaggaaattgtagtgactcactggcaccgagatcattctggaggcataggagatatttgtaaaagcatcaataatgacactacctattgcattaaaaaactcccacggaatcctcagagagaagaaattataggaaatggagagcaacaatatgtttatctgaaagatggagatgtgattaagactgagggagccactctaagagttctatatacccctggccacactgatgatcacatggctctactcttagaagaggaaaatgctatcttttctggagattgcatcctaggggaaggaacaacggtatttgaagacctctatgattatatgaactctttaaaagagttattgaaaatcaaagctgatattatatatccaggacatggcccagtaattcataatgctgaagctaaaattcaacaatacatttctcacagaaatattcgagagcagcaaattcttacattatttcgtgagaactttgagaaatcatttacagtaatggagcttgtaaaaattatttacaagaatactcctgagaatttacatgaaatggctaaacataatctcttacttcatttgaaaaaactagaaaaagaaggaaaaatatttagcaacacagatcctgacaagaaatggaaagctcatctttagtttcagattaaagaaagctttgttttattttgctttgagagaatggtatgttttcttaactataggttattttatagagaatataaaagtataaaacattaaaaataaccctagatatactttaaaataatgttatatttatgctaaaatatgtaaattacactatacaaccatatgataggttatttctctaaccttgtcttctaacgttttaccaaaattcataatc

SEQ ID NO: 188423 - DNA, 932 bp, Homo Sapiens
acaaaaaagttggggaagttatttaagagccaactgtcttgtctttcccgagtccgtttgaggaagtccccgaggcgcacagagcaagcccacgcgagggcacctctggaggggagcgcctgcaggaccttgtaaagtcaaaaatgtcagaaacttccaggaccgcctttggaggcagaagagcagttccacccaataactctaatgcagcggaagatgacctgcccacagtggagcttcagggcgtggtgccccggggcgtcaacctgcaagagtttcttaatgtcacgagcgttcacctgttcaaggagagatgggacactaacaaggtggaccaccacactgacaagtatgaaaacaacaagctgattgtccgcagagggcagtctttctatgtgcagattgacttcagtcgtccatatgaccccagaagggatctcttcagggtggaatacgtcattggtcgctacccacaggagaacaagggaacctacatcccagtgcctatagtctcagagttacaaagtggaaagtggggggccaagattgtcatgagagaggacaggtctgtgcggctgtccatccagtcttcccccaaatgtattgtggggaaattccgcatgtatgttgctgtctggactccctatggcgtacttcgaaccagtcgaaacccagaaacagacacgtacattctcttcaatccttggtgtgaagatgatgctgtgtatctggacaatgagaaagaaagagaagagtatgtcctgaatgacatcggggtaattttttatggagaggtcaatgacatcaagaccagaagctggagctatggtcagtttgaagatggcatcctggacacttgcctgtatgtgatggacagagcacaaatggacctctctggaagagggaatcccatcaaagtcagccgtgtgggg

SEQ ID NO: 188424 - DNA, 1355 bp, Homo Sapiens
  misc_feature (542)..(556): n is a, c, g, or t
ggcagctggggccgggtgctgtgtgagagagcccagcactactggcagctgggtgggcgacatccagagctgcaccagcccccgtggctgccacgtgttgcagagctaagttactacatgcactggccaggctcagaggagccgtccctgtgctcaaaggaagcagaggatttgggattggaggcgccaggcagccagtccccatgcccaggaaacccacgtttgtggcatcagccggagagttcatcgggagtggagccgtgcagcggcgcggttatctgaagctccccacgtggatggagagagaagtttccggggctcggggccgggcaggcgtctctgcactggagaggatgtagctgctctgctcgtggagggcttcttggcttttccttctccccagggcccgttgtttctgcttttcttttccagtgtcatctctgattgtactgaaatcatcatcgtcgtcaatcaggagattcttaacaccaatagtatctccgtctttcaagtaatacggtgccccttgcaaataatcttgnnnnnnnnnnnnnnncctcttggttatttgttggttccagctagatatcggaagccactcgaacttttcgggaaagtatttggcaatttcaatcttctccacgggaagacaatagaaatcggcaactctctgcctcagggagccggcagtcccaccctgggccgcgttccacaccaggtccagggcaggggcgtaggtcctctcaccagggatgcgcacctgtgtcctcagcagcacgtcctgggggcccaagttttcgcctttctgaaggggctctaagcagatctcaattctccgtcctagtttatattccctgagtggctgccggtcagttcgtaaaagcctgcctgggcgcttcctctccaccgtccaggctctgaggtgggctggggacgggacaccgaactccaggaaaggaggcaaggtcatggcctgagacttcagctccgccagcgtggcatcttctgagatctctatgtctcccaagtagaggagagaaacttgcgcaggctcgttcccagaagcaccttggctggaagtggctctccaaactctgccccaagacgaagtacagttggtctggtcctgatgactctcccagtgtcctgagggaccctgaagctggtaccaccagatgggcaccttcaggaaacccagaggaggaagttgtccttcaattaaaagcaaagtatctccagaacatatcagaagttctttcagtgttgcatcttcttcacataaaggctctccagcttcatagcaccaatccatttttcgtaaatgccaggcatctcctataaaggagtcttgccaa

SEQ ID NO: 188425 - DNA, 1471 bp, Homo Sapiens
ttggaaatactttttcaaacaaatatttgtctcagctctttctttagctcagttgtttctgatggtcatgatgaatggtctcactggtgatctctttctaggggatgaactgacactgtgtgaaactgaaattgctgatggggaagacatctttgtgtggaatggggtggaggttggtggagtccacattcaaactggtattgactgcgaacctctacttttaaatgttcttcatctagacacaagcagtgatggagaaaagtgttgtcagtgctggatgtccaggtggggagggttggacggccatccccaaggaagacatgaggaagacgttcagggagcaagggctcagaaatggaagctcaattttaattcaggattctcatgatgataacagcttgttgaccaaggaagagaaatgggtcactagtatgaatgagattgactggctccacgttaaaaatttatgccagttagaatctgaagagaagcaagttaaaatatcagcaactgttaacacaatggtgtttgatattcgaattaaagccataaaggaattaaaattaatgaaggaactagctgacaacagctgtttgagacctattgatagaaatgggaagcttctttgtccagtgccggacagctatactttgaaggaagcagaattgaagatgggaagttcattgggactgtgtcttggaaaagcaccaagttcgtctcagttgttcctgttttttgcaatggggagtgacgttcaacctgggacagaaatggaaatcgtagtagaagaaacaatatctgtgagagattgtttaaagttaatgctgaagaaatctggcctacaaggagatgcctggcatttacgaaaaatggattggtgctatgaagctggagagcctttatgtgaagaagatgcaacactgaaagaacttctgatatgttctggagatactttgcttttaattgaaggacaacttcctcctctgggtttcctgaaggtgcccatctggtggtaccagcttcagggtccctcaggacactgggagagtcatcaggaccagaccaactgtacttcgtcttggggcagagtttggagagccacttccagccaaggccatgaccttgcctcctttcctggagttcggtgtcccgtccccagcccacctcagagcctggacggtggagaggaagcgcccaggcaggcttttacgaactgaccggcagccactcagggaatataaactaggacggagaattgagatctgcttagagccccttcagaaaggcgaaaacttgggcccccaggacgtgctgctgaggacacaggtgcgcatccctggtgagaggacctacgcccctgccctgcacctggtgtggaacgcggcccagggtgggactgccggctccctgagcagagagttgccgatttctattgtcttcccgtggagaagattgaattgccaaatacttt

SEQ ID NO: 188426 - DNA, 1236 bp, Homo Sapiens
tcatttgactgtggtgcaaagggacggcaatgagcatgcctaattattccccggcatttcagtccaatcagcgcatgctcgcaatgatcatccatgggtgaaaaggaaagagctgaaagacacatgtgctgagcaacatttaatttctgcttgttaaacgggtgattaggcgccagtgtggcaccatccagacactgggaatttgtgccactccatcagttctgctggctctgctcattctgctttcctgcagtggatgccacttcccaaagaaccatgctccaaaaaacaaaagagaactggagaagtcaagaaaaacttcagcaaggagagggtatctcaagtgagtctttcctcattagctggacttggctgcagcaactgtttggtttggagtagctgtagttgttgggagatggtccatctctggtgcatcaaaaaagtatgccaagcagcccacagaaagcagcatatggagcaacacaattgtcacaattgtggccaatgcaacgcgtcggttatcctcacgaacagctggccaaaatgtcattgccaagagagatcctgagatgcccagggcaatcatgactagaatccaacgaacagctttctgggggataatccacagtattgcggtggggatataaatgaagagggaatatccatagacacacacaatctccagaaatgaataggagacgatgttcataactttgctgtttctccacatgaggaaaccccagagtgcaagaggaaccagccaggcataggcatagatgatggtagctgctatggacacttttcggaattcgggcacataatggtacgtcttctctcccagatggatcaagaagttggaaagattcccactaattgctatggcaaagaccaacgtggcacatatccaaaaggggccatagagatctggattgctgcggatatataacctcacaaagtttttcccgggtattggcaaaagagatcctttaattctgtcaaagacctggtaggtgtccacatcaaagaatgtttggtagtattcaaatgtccagaagggggagcttttcttctgtccagcaagtaacttcaaattgcaagtcatctactgctgccattcggccagtgagtcttctcccaattatgaggaagaaaatttgcagggttctcgcggggttaggcgtcccccgggtcccgagaaggctcgggcctcagttgctccgcgccggtttcggccaa

SEQ ID NO: 188427 - DNA, 907 bp, Homo Sapiens
ttggcaactgggctggaccgaaaccggcgcggagcaactgaggcccgagccttctcgggacccgggggacgcctaaccccgcgagaaccctgcaaattttcttcctcataattgggagaagactcactggccgaatggcagcagtagatgacttgcaatttgaagaatttggcaatgcagccacttctctgacagcaaacccagatgccaccacagtaaacattgaggatcctggtgaaaccccaaaacatcagccaggatccccaagaggctcaggaagagaagaagatgatgagttactgggaaatgatgactctgacaaaactgagttacttgctggacagaagaaaagctcccccttctggacatttgaatactaccaaacattctttgatgtggacacctaccaggtctttgacagaattaaaggatctcttttgccaatacccgggaaaaactttgtgaggttatatatccgcagcaatccagatctctatggccccttttggatatgtgccacgttggtctttgccatagcaattagtgggaatctttccaacttcttgatccatctgggagagaagacgtaccattatgtgcccgaattccgaaaagtgtccatagcagctaccatcatctatgcctatgcctggctggttcctcttgcactctggggtttcctcatgtggagaaacagcaaagttatgaacatcgtctcctattcatttctggagattgtgtgtgtctatggatattccctcttcatttatatccccaccgcaatactgtggattatcccccagaaagctgttcgttggattctagtcatgattgccctgcgcatctcacgatctctcttggcaatgacattttggccagctgttcgtgaggataaccgacgcgttgc

SEQ ID NO: 188428 - DNA, 2426 bp, Homo Sapiens
ttggcaattatattgcatcttgggtccataaaccctaatccataatcccatcaagaaaagctctgctgctcttagctctaaataattcagaatctattctcttctctccagtcctgttgttatagtcttcactcatagacttaagatgatcccatcaccagagaggtttctctaccattagcttccctcttccggccattcttcacaaagtcatttttctaaattctgtgtcacatacgatgatggcatttctggaaattccttcaggtgctctcaagccctgctgcagagatccttttcagagcacacactgttccagcccatctgtctcaccctctcctgttgtatccagctccacgacaaacttctgccttccccaacacctttgtgcctttgcatatggtgttttcttgcccattttctgctcgactcgcccctgattttcaagttcaagacttaactcagggttcaggtcttccaggaggccttacttatgtcgtcagtctggggaactctccatgtgcttctatcactgtgcggttacctctttcacagcccttttaaagttctatcttccctttcccaccttttttgaccttccactagaccatgagcacctgggcggaaagccatatatcttattaagctttatatctgctacctggccgagggcctaattcatagtggagaataaatagtcaattgaataaatgaataaatatctccaccatcgtactaatcttaatcctccctgcccactcccaccactgaaaatgcaacattgtacacatcactggttgttgggagggacttaccttggaaagttgctattctaggaaagagaaaccttcatattcctggaaacagcaggtagtttccagtgctggcaatgaattccccagaactgctgttttggattttttcttgcctggcagctgttgggagcagggtgcagtgaggatggggtgagagtgggcagtttcttgtgcagatttgcctttctttcatcctggggctgacttgcagctccacacccatccatctctcaaatttcacagagggtaaaataggcatttggagagaaagaactctggcctgattcctttctctcccacaaatgtcctttattcataaaacaggaataataattcctgtatctcccaactacatggaagctgcagccctcacagaagaagatgatctgagaaattctttgatttcctcagtacagttatacccatgcatcataatactttaagcctggaaggcatcttaaaaataatgcaacagtcaaacctaattttacagagaaactgacatgaaatcacgcagctaatcatgataaagctgggtggaaaacttatcttgatgggcagtacaggaagatgcagtagaccttaagatgtcctgaaagtttcttatctcaggggaaactcccaggtaggctttatgtcagggacacagaaaaatgctccctgaaagtcaaaatattcgggctagacagacaaattcctgtaagtgtggtttgtctgggaaccacagatgtcactaatcctggtttgctccagagttctttttgttcactcctaccccccatcaccatttgattgatctccttaccctgtaatttccccttcttgtcgcttacctgcagtatctttcccacccaggcatgccttattctttctaaaggaaagtatgaatggagaggggaaagcttgggaaactgatagatttccttggatgccaaaacacctccatagcctgtctgcccggccctatgtggaaacagcattgagtttcaagtcctttatgcctccacccagggatagccacttggaatccacatggcaattgtgaaacaagcaggaaatgcgtaattgtcagaattttgtggggaaaggactagggaataagaaaacaaagatcttccttgtgttttagagctgtcagctagaggagcacctgcttgagtctgatgccatctaatggtcccagaagaaactgggttttgaacctagagttccatggactcttaggaattagactactactactactaagcattcactggtgcttactatgtgctattgctgtgccaagtatctgaaacctgtcttcttaccttatttttcaagataattctatgtggcaggtattactatctcaattctaagagtgagaaaatggagttttagaaacatttactaatttgcctgggtcacatagctaaggaagaggtggactttttccttctttgcataaaactcctcaaaagagttgcctatcctccctgactccacttatcttcctactatcctctttttaaaatatattatttatttatttaaataagcaatatatgaatgtggtttgatattcaaaatacacaaagaagtatacagaggaaagcctcactctcaatc

SEQ ID NO: 188429 - DNA, 1359 bp, Homo Sapiens
  misc_feature (214)..(251): n is a, c, g, or t
gcgctcggtgaacaagtctgagaccactagaagggatctgaccacctcactgatcaggatggcccggggtcctcctggctgagctggacggcaggatccagcggctgtacaactcaagcaaaaactgcgaacaggagtggatgtcaactccagcccggtgtttcctggagttgactggagacgtgggtggtgacgaaggtgcaggggcgtcggnnnnnnnnnnnnnnnnnnnnnnnnnnnnnnnnnnnnnnaggggtgtgatgctgttccccagccacacggagtgtatggacacctggccgagtttgtagctcatgctccccagctcccgctcggggttgatctgcagcagcagcttctcgtggctgatgagggcacctgtagtagccggagacagagaagggacaggatcccatgcctgatataaatgatgggtggcaatattctctctctttgaaaccattgcttgaatctcttgctccacaatccctctgataatgctcagcttcctcccaaacctggtgtcgagagctttcagaggcttgttccggggctgctgctccaagcagcttacagctgggttgccggccacaggcacagtcattgcactgagcaccagtgaggtgatggcctgcacggccaggacgttgatctgggtcctctctgtgtcttcttctggtgggctctcctcctgctccatcacgaggggctgcgtcaccaggacaccaaggagggtggcccaagtttcttcaaactgagtacgactggtccagcctagtgtgttgatgcggtagatgaactccttaaagacttccttttcctggaggaactccacggggatctcagggaatgctgtgccaaaatcccctcccggtttgggtgaccatccaagcttccacaccagtgggggcacacgtgtgtagctgttgacaaggggcaggcgggccaggctgatgatgatgttcctgagcaatggcgtgagaaacgccggcacgccgctattccttttatgacccaaggccaacaccgactgcagagactccaccatttctgccaccatctcacaggctgcagtgatatacttaggatctaaacaagcaacggttaagagaggactttttaaaaaacacatcctatatgcccagtgtagaaagcatgacctacaaccagctgctcaagctgtaactgtggaatccacttagactctgagttggccactgaaggcctgcagattctaccttcatatccgcctataccatacaattctccccattttctgctgggattgctggaatggtcctgaacctgagctctggccttggttcccagccctctggcccactctctgtgataagccaa

SEQ ID NO: 188430 - DNA, 1643 bp, Homo Sapiens
  misc_feature (1491)..(1505): n is a, c, g, or t
ttggaaataattgattttaaataggaagaaaagaggatatatttaagatacatagaaattatgatgtgaagtattcatgagaatctgtagattccatcaaaataagtaggaactcatactaaaattgttggatttaaagaggcaacttttgtttatgattcaaatatgggaatttgagaaatatttcatttgtccactggatgtcactattttactaaaaggcagctattagtgtgggactgtgactgaggtcttaaagactgaaagagttggggttcattttctgttacaacttacaggaacatttgtactttaagaaaaatttaagtgacaaatgttagaagatgatggattgaaaaatataagtaatttggcatattgaccctatataaaaaagtgggcattttgtaacattccttcaggaagaatagaattgtatgcttttttctgcatgtttgtgatcactgtgagtctcagatgattattccagttttcaatgatttttcaaaataaaagtcaatcagcattgttatttatcattaaggtattgaacactggattgcatggttgaatgtgtctttaatccactacaaaatgtgcttgttattgataggatcatgttgttaaattgtaaattttcaaaattaattgatgttttaaaaatgttgagaccaaagtagtatagaagtatggacttaatttaattgtaaaattattagaggtatttgttgtagagctttatatattaaagagaggtattggtgcatataaaaacagtaatattattgttatgcttgtattcttgcatttcagggtaagtaaaccctgaagaaatcttattttagtatagctacagctgcagtagcttttaagtatgtatcaacatttcattataaattatagcttcctggttctgtgtctcagctgtttcagaactttcagccaagttaaatcttttttggtgttgaaacttttagtaagttgagtaagctatttttttccctacggtaatccacaatctgttctttgtgtgggttgacacctatttataattcttaaaataagggtagctcaaaggagccaagtacagtagtttagcttgctactgttgagcatgaatagcagtaggttgttttcattaatgcagttttcataatgtatcccagaattttaaatcttgaccatagaaaaatacagtcattcattggcaaagatgtacagtggtggtttagtgcagtgaggaaatgatgggaatttttatcttagaaatggatgattcgtgaataaaactaggtacatagtaagtgtatgatagatgtttgatttgtaaattacaaatataaattatcacccccatttccatttattttcttgatatatcaaaatgtgttgacttagtgattctcaatcttagctacatattagcctggcagagctttaaaaaattgatacctgggtcctattccataacaactaaatcaaaatcacccnnnnnnnnnnnnnnngtaaagctttccaggtggttctaaaggacacctggggtcaataacccattataaaatgatctgattacactggacactcttagaagtatcaaatagaacagttcaatttgcagctacttaatgattatacatttctag

SEQ ID NO: 188431 - DNA, 1316 bp, Homo Sapiens
tgtacaaataagcaggtgagaatcacctttgggttctcttgcaagaatagtaaccagtttggaataatgatgtatcataacaaccgactcataaaatcttttgagaaggtggggtgccaggtgaagccaactcgtggagaaggtgtaggagtaattggagtcattgagtgcaatttcctaaaacctgcctacaacaaacaagactttgagtataccaaggagtaccggctaacaataaatgcccttgcccagaagctcaatgcttactggaaggaaaaaacatctcaagataattttgagacctcaactgtagccaggccaataccgaaggttcctgaccagacatgggttcagtgtgatgagtgtcttaaatggagaaagcttcctgggaagattgatccatccatgttacctgcaagatggttttgttattataattcccatccaaagtacaggagatgctctgttccagaggaacaagaactcactgatgaagacctgtgcttgagcaaagctaagaaacaagaacaaactgttgaggagaagaagaagatgcctatggaaaatgagaaccaccaggtattcagtaatccaccaaagatccttactgttcaagaaatggctggattgaataacaagacaattggatatgagggaattcatagccctagtgtgcttccttctggtggagaagaaagcagatcaccatctcttcaacttaagcctctggattccagtgttttacagttttccagtaagtacaaatggatcctaggtgaagaaccggtggagaaacgaagaaggctccagaatgagatgacaacaccttctctagattattccatgcctgctccttacaggagggtagaagcacctgttgcctacccagaaggggagaacagccatgataaatcgagttctgagagaagtacaccaccataccttttcccagaatacccagaagcaagcaagaatacaggtcagaatagggaggtttcaattctgtatccaggggccaaagaccaacgccaggggtccctgcttcctgaagaattagaagatcagatgccaagattggtggcagaagaatctaacagaggtagcacaaccataaacaaagaagaagtcaacaagggaccttttgtagctgttgtgggtgttgccaaaggtgttagagattcaggagctcccattcagctgatcccttttaacagagaggagcttgctgagagacgaaaagcagttgaatcctggaacccagtgccttattctgtggcctctgctgcaatccctgctgcagccattggggagaaagc

SEQ ID NO: 188432 - DNA, 1088 bp, Homo Sapiens
ttggatttgagacttttacaaatcatttctgtcttttataggtattcagtaatccaccaaagatccttactgttcaagaaatggctggattgaataacaagacaattggatatgagggaattcatagccctagtgtgcttccttctggtggagaagaaagcagatcaccatctcttcaacttaagcctctggattccagtgttttacagttttccagtaagtacaaatggatcctaggtgaagaaccggtggagaaacgaagaaggctccagaatgagatgacaacaccttctctagattattccatgcctgctccttacaggagggtagaagcacctgttgcctacccagaaggggagaacagccatgataaatcgagttctgagagaagtacaccaccataccttttcccagaatacccagaagcaagcaagaatacaggtcagaatagggaggtttcaattctgtatccaggggccaaagaccaacgccaggggtccctgcttcctgaagaattagaagatcagatgccaagattggtggcagaagaatctaacagaggtagcacaaccataaacaaagaagaagtcaacaagggaccttttgtagctgttgtgggtgttgccaaaggtgttagagattcaggagctcccattcagctgatcccttttaacagagaggagcttgctgagagacgaaaagcagttgaatcctggaacccagtgccttattctgtggcctctgctgcaatccctgctgcagccattggggagaaagcaagaggctatgaggagagcgaaggtcataatacaccaaagttgaagaaccagagagagctggaagattgaagagaaccacagaaaaattggaacgtgttttggctgaaaggaatttgttccagcaaaaggtggaggagctggaacaggagaggaatcactggcagtctgaattcaagaaagtccaacatgaattggtgatctacagtacccaggaggcggaagcttgtactggagcaagaaacacatgggttatcgccaagctgaattccagattctgaaagctgagctggaaagaaccaaagaggaaaa

SEQ ID NO: 188433 - DNA, 751 bp, Homo Sapiens
acccgagaaaccgaaaattgtttttttatggaaggtttaaacaaagtcctcaagatttctttatgtgccagaaagtacatttctggacttaatctctaggggggcaaaaaagaataaatagaaacaaatttaatgatcattctggaatcctgttctttactttgttcacacgctattaattctcataccttcacctctctaccacaaagcctagaaaatcaaatggtctcctattccatatttgcatagtattaataatactgtcaggaggtgaacttctagccccttgcttgcagccacattcctgaagagcactggtccaatctgacgtattcgaaaacaatacataagtgtctataggccaaaaattgggtcccatttagcagcaagctgttcaaattatttggaaacagtctccttccaaggggtaagaagattaggcagttttgtctgcattttcagatttttctctctgcatcatgcagcgacgaactatgctgtcaaaacttccaaggtaaaacaaagcaatagtgcggaaaaggcccatggtgaccacctgcaagataaagagagagcttttagtgcatccaacggtacaagactatttcaaggtacctaggtctctaacaaacagtttctaagacaaatcttctagtctgctctaaggatgaatataatgaaaactctgtaaatgtcagtaagctgtgagaacagaatgtgtgtgctctgcaccgctggacagcccagccaa

SEQ ID NO: 188434 - DNA, 1970 bp, Homo Sapiens
gaagtcttattgacagattccaccattacttaaacattgtcaattctggcctagatcgctatgttaaactctggtccctatctccaactttatgggcttttgtttttagctataccatagctgtctcaaattaaacttgttaaactgaatgcatcattttcattactaccaccatcctctaattctctgcccctctaaaagctgtctcttcctgctgtattttctgactttgtgaatggcacgactgtctagcaatttaggtcaaaaccatgactaatattagatactttcctctccatcaaatctttttcaatcccgttaccctactgctactgactaggcctggataatgtcaatgcttatatgataaaggctggataccttaacctggatttcaagcttgtgggcaagaacaaatgaaactatgaaaaaatgggctgtataaagggtattaagtgctgctctctgttgaactgtttgatgaaactggctttaatgatccagaagcagccttacatttgaatgcattctattctttcaaaactgctacaaaccagttttcatgtttattaccacttgctgctgctggaaaaaagttaggagcaactatgttttactcctttgatctttgaataacagcagcagcacaaatcccaggattctcaaagcagttccaaccacaacaaaccaaaaactaaactacagcgaaatgggaaacaggtgtgtccggtttaataaaaagggaaagggtcatcaggtggccacagcctttccttgtcagtcatatccccaacctccagatcctttatactctcataagtttgaatacagtcaaggttagttgggtcaaaaactgatgttgattatgattaaaaagatacaaaactcagcacctccttcattaaaaataaaggttgagaaacttgataagaaaaaaactaaaatattcttatagctgcctgggggagatcttaatccttccacatacagatatccttatatccacaggaggccatgtggactaaaaccaaactgagtccattactcattccctctccggctcttcttgtggctcttcttagacctttcgggagactttgagtggctcctgtgtctgtgactacggtgatgacctggggacttggaacgggatctgtgccgccgatctcgggacctgctgcggtgacgtcttggactcttgctccgatgcctttctcggcgaggggaggggcttctccttttgggagatcgactccgcgttctgggagaccggctcctactccctcctgtagcgcagtgtgggagagcgacggggcttgtccaagtctcggtagcttctccggcggtgatcaggtgatggcactctttccaacttctcatcctcctcttcttcctcttcactggactccacatcatccatgtcctcttccagagcactaactcgaggctccagttgctcagcttcctctaatacatagcgtttctgtagtcggggcagaatgatatcacagactctctcactgtgcaatagttcatcaataaactcatcaacatgcatcaattcaaactccccatttcggttctggctcttgatttttcgatagtcattgtacaaaggttccaagtacttgtagcaatcaattgcagtgcctgtcagcctcatgtaaagtgcccccagcatgcggacatacttgaaatcttcatttttgataaactctacaatgatatccttctcgggttgaatttgaagcatcttcaaggttaaacacagaaagggtgttggttttatgttgccaccatagacgccacccacaaaccttaactccatggctttatcgactacaagttcagctgtaagtccaaagcactcctctttccagtacttggactcatagattcgcgttcgaatgatcttctccaccagatattgagggttggtgccatggatgctgtgcgcatccttcacccaa

SEQ ID NO: 188435 - DNA, 2164 bp, Homo Sapiens
ctttgtacaaaaaagttgggacagagaccccattttcggcggcgggagcggcgcaggcggccgagcgggactggctgggtcggctgggctgctggtgcgaggagccgcggggctgtgctcggcggccaaggggacagcgcgtgggtggccgaggatgctgcggggcggtagctccggcgcccctcgctggtgactgctgcgccgtgcctcacacagccgaggcgggctcggcgcacagtcgctgctccgcgctcgcgcccggcggcgctccaggtgctgacagcgcgagagagcgcggccctcaggagcaaggcgaatgtatgacaacatgtccacaatggtgtacataaaggaagacaagttggagaagcttacacaggatgaaattatttctaagacaaagcaagtaattcaggggctggaagctttgaagaatgagcacaattccattttacaaagtttgctggagacactgaagtgtttgaagaaagatgatgaaagtaatttggtggaggagaaatcaaacatgatccggaagtcactggagatgttggagctcggcctgagtgaggcacaggttatgatggctttgtcaaatcacctgaatgctgtggagtccgagaagcagaaactgcgtgcgcaggttcgtcgtctgtgccaggagaatcagtggctacgggatgaactggccaacacgcagcagaaactgcagaagagtgagcagtctgtggctcaactggaggaggagaagaagcatctggagtttatgaatcagctaaaaaaatatgatgacgacatttccccatccgaggacaaagacactgattctaccaaagagcctctggatgaccttttccccaatgatgaagacgacccagggcaaggaatccagcagcagcacagcagtgcagccgcggctgcccagcagggcggctacgagatccccgcgcggctgcggacgctccacaacctggtgatccagtacgcctcgcaggggcgctacgaggtagctgtgcccctctgcaagcaggccctggaggacctggagaagacttcaggacacgaccacccggacgtggccaccatgctcaacatcctggccttggtgtacagggatcagaataaatacaaagatgcagctaacctactgaatgatgccttggctattcgtgagaaaactttgggcaaagatcatcctgcggtggcggcgactttgaataaccttgcagtcctttatggtaaaagagggaagtacaaagaagcagagccgttgtgtaaaagagctctggaaatccgagaaaaggttttggggaaggatcaccccgatgttgccaagcagttaaataacttggccttactgtgccagaaccagggcaagtatgaagaagtagaatattattatcaaagagccctcgagatctaccagacaaaactgggacctgatgaccccaacgtggctaagacgaaaaataacctggcatcctgctatttgaaacaaggaaagttcaagcaagcagaaacactgtacaaagagattctcactcgtgcacatgaaagggagtttggttctgtagatgatgaaaataaacccatctggatgcatgctgaagaaagagaagaatgcaaaggaaagcaaaaggatgggacatcttttggagagtatggcggctggtacaaagcctgcaaagttgatagtccaactgttacaaccactctaaaaaaccttggggcactttacagacgtcaaggcaaatttgaagctgcagaaacgttagaagaagctgctatgaggtctcgtaaacagggtcttgacaatgttcacaaacagagggtggcagaagtgctcaatgaccctgagaacatggagaagcgcaggagccgtgagagcctcaacgtggacgtggtcaagtacgagagtggccctgacggaggggaggaaatgaggaaaatgaagctcgggctggttaactgacttgctcagcgtcccatggcctagccgcccgtgactctcacactgtctcctgcatgacgggtggcgcctcccgcagcttcccttctctctccagtgctgcccgctgtgtctagcagcctctaggatcttgtcagagctgccctctctgtgaacctggcattccttttcggtgctgctgtcctttttgggggg

SEQ ID NO: 188436 - DNA, 620 bp, Homo Sapiens
acaaaaaagttggatctggcattccttaataggaaatgtaataatggacattagggagccctgcctttttctactggttcccccaatgtttgaaagaggcattaggctcctggtagccttttctgtgcattgctgtatacacacagacacacacatgtatgtttgttaccaagaactggtcagaccttgcgagtttatttgtaaacactggacagatggagttaaaaagagcttttgttgagatttggcatgaaggatatggtgctctatttgtaatagaaacttccaaggctcttccagctcccctttctcgccattctttaactgtagtcatgaatagtctccatgattttcaaaattgattccctttaaagtgcaaaatggtcaccttctaaaagatatattcatagttattaatgaccctattcccaccacaaattttaaagtgctcctaagcccataacttgcctgtttgaactatggtaatgggtggaagaggagttcaccagtttcaaagatcagactctgtatcaaaagtacctttgcccttaggaagagtgaatattggagtcatcttatcaattactccaaacctccctttttatttcttgagcctggct

SEQ ID NO: 188437 - DNA, 1774 bp, Homo Sapiens
aaagccaactttgtacaaaaaagttggggccggaagcgcggagaccatgtagtgagaccctcgcgaggtctgagagtcactggagctaccagaagcatcatggggccctggggagagccagagctcctggtgtggcgccccgaggcggtagcttcagagcctccagtgcctgtggggctggaggtgaagttgggggccctggtgctgctgctggtgctcaccctcctctgcagcctggtgcccatctgtgtgctgcgccggccaggagctaaccatgaaggctcagcttcccgccagaaagccctgagcctagtaagctgtttcgcggggggcgtctttttggccacttgtctcctggacctgctgcctgactacctggctgccatagatgaggccctggcagccttgcacgtgacgctccagttcccactgcaagagttcatcctggccatgggcttcttcctggtcctggtgatggagcagatcacactggcttacaaggagcagtcagggccgtcacctctggaggaaacaagggctctgctgggaacagtgaatggtgggccgcagcattggcatgatgggccaggggtcccacaggcgagtggagccccagcaaccccctcagccttgcgtgcctgtgtactggtgttctccctggccctccactccgtgttcgaggggctggcggtagggctgcagcgagaccgggctcgggccatggagctgtgcctggctttgctgctccacaagggcatcctggctgtcagcctgtccctgcggctgttgcagagccaccttagggcacaggtggtggctggctgtgggatcctcttctcatgcatgacacctctaggcatcgggctgggtgcagctctggcagagtcggcaggacctctgcaccagctggcccagtctgtgctagagggcatggcagctggcacctttctctatatcacctttctggaaatcctgccccaggagctggccagttctgagcaaaggatcctcaaggtcattctgctcctagcaggctttgccctgctcactggcctgctcttcatccaaatctagggggcttcaagagaggggcaggggagattgatgatcaggtgcccctgttctcccttccctcccccagttgtggggaataggaaggaaaggggaagggaaatactgaggaccaaaaagttctctgggagctaaagatagagcctttggggctatctgactaatgagagggaagtgggcagacaagaggctggccccagtcccaaggaacaagagatggtcaagtcgctagagacatatcaggggacattaggattggggaagacacttgactgctagaatcagaggttggacactatacataaggacaggctcacatgggaggctggaggtgggtacccagctgctgtggaacgggtatggacaggtcataaacctagagtcagtgtcctgttggtcctagcccatttcagcaccctgccacttggagtggacccctcctactcttcttagcgcctaccctcatacctatctccctcctcccatctcctaggggactggcgccaaatggtctctccctgccaattttggtatcttctctggcctctccagtcctgcttactcctctatttttaaagtgccaaacaaatccccttcctctttctcaaagcacagtaaatgtggcactgagccctacccagcacctcagtgaagccgggcctgcttgctctttatttttggtcccggatcctggggtggggca

SEQ ID NO: 188438 - DNA, 1598 bp, Homo Sapiens
ttggaagagatgccccctcaaaacccttactactatgccaggcctcagacccttcccctgagctaccaagatcggagtgcccagtcagcccagagctccggcagcgtgggcagcagtggcatcagcagcattggcctgtgtgccctcagtggccccgcgcctgcgccacaatctctcctcccaggacagtctaatcaagctccaggagtaggagattgccttcgacagcagttggggtcacgactcgcatggactttaactgcaaatcagccttcttcacaagccactacctcaaaaggtgtccccagtgctgtgtctcgcaacatgacaaggtccaggagagaaggggatacgggtggtactatggaaattacagaagcagctctggtaagggacattttgtacgtctttcagggcatagatggcaaaaacatcaaaatgaacaacactgaaaattgttacaaagtagaaggaaaggcaaatctaagtaggtctttgagagacacagcagtcaggctttctgagttgggatggttgcataataaaatcagaagatacacggaccagaggagcctggaccgctcattcggactcgtcgggcagagcttttgtgctgccttgcaccaggaactcagagaatactatcgattgctctctgttttacattctcagctacaactagaggatgaccagggtgtgaatttgggacttgagagtagtttaacacttcggcgcctcctggtttggacctatgatcccaaaatacgactgaagacccttgcggccctagtggaccactgccaaggaaggaaaggaggtgagctggcctcagctgtccacgcctacacaaaaacaggagacccgtacatgcggtctctggtgcagcacatcctcagcctcgtgtctcatcctgttttgagcttcctgtaccgctggatatatgatggggagcttgaggacacttaccacgaattttttgtagcatcagatccaacagttaaaacagatcgactgtggcacgacaagtatactttgaggaaatcgatgattccttcgtttatgacgatggatcagtctaggaaggtccttttgataggaaaatcaataaatttcttgcaccaagtttgtcatgatcagactcccactacaaagatgatagctgtgaccaagtctgcagagtcaccccaggacgctgcagacctattcacagacttggaaaatgcatttcaggggaagattgatgctgcttattttgagaccagcaaatacctgttggatgttctcaataaaaagtacagcttgctggaccacatgcaggcaatgaggcggtacctgcttcttggtcaaggagactttataaggcacttaatggacttgctaaaaccagaacttgtccgtccagctacgactttgtatcagcataacttgactggaattctagaaaccgctgtcagagccaccaacgcacagtttgacagtcctgagatcctgcgaaggctggacgtgcggctgctggaggtctctccaggtgacactgggatgggatgtcttcagcctcgattatcatgttgacggaccaattgcaactgtgtttactc

SEQ ID NO: 188439 - DNA, 1509 bp, Homo Sapiens
ttgggtctgcagttcctccgcgtctactgcgagtcaggccgtgatggcggacgcctgggaagagattaggcggttggcggccgacttccagcgggcgcagttcgccgaggccacgcagaggttgtccgagcggaactgcattgagattgttaataaattgattgctcagaaacagctagaagtagttcatacactcgatggaaaggaatatattactccagcccaaattagtaaagaaatgagagatgagctacatgtccgaggtggtcgagtaaacattgttgatctacaacaggtaattaatgtggacctgattcatattgaaaatagaattggtgacattattaaatcagaaaagcatgttcagttagtgttgggacaactgatagatgagaattatttggatcggttggcagaagaggtcaatgataaattgcaagaaagtggtcaggtcaccatatcagaactgtgtaaaacttatgatcttcctgggaactttctgacacaggcactaactcagcgacttggtagaattatcagtggacatattgatcttgataatagaggagtaatttttacggaagcttttgtagctcgacataaagcacgtatccgtggactattcagtgctattacccggcctacagctgtgaattctttgatttcaaaatatggatttcaggagcagcttctttactctgtgcttgaggaacttgttaatagcggacgcttacgaggcactgtggttggtgggagacaggataaagctgtgtttgtccctgacatctactccaggacacagagtacttgggtggattcctttttcaggcagaatggctatctagaatttgatgctttgtccagacttggaatcccagatgctgtaagctacataaagaaaagatataagactacacaactcttgtttttgaaagcagcttgtgttggtcaaggacttgtggatcaagtggaagcatcagtagaagaagccatcagctctggaacatgggttgatattgcacctctgctacccacttctttatcagttgaagatgctgccatattgcttcagcaggtgatgagggcattcagcaaacaggcctcaactgtagtctttagcgacactgttgtagtcagtgaaaaatttataaatgactgtacagaactgttccgtgagctgatgcaccagaaagctgaaaaggaaatgaaaaataatcctgtgcatttaatcactgaagaagatctgaaacaaatctccactttagaaagcgttagtacaagtaaaaaggataaaaaagatgagcgaagaacgaaagcaacagagggcagtggaagcatgagaggaggagtgggggcaatgccagagagtacaaattaaaaaagtcaagaagaaaggagaaagatgatgatagtgatgatgaatctcaatcatcccacactggaaagaagaagccagagatcagttttatgttccaggatgagattgaagattttttaagaaaacacata

SEQ ID NO: 188440 - DNA, 1235 bp, Homo Sapiens
  misc_feature (1160)..(1168): n is a, c, g, or t
ttggataaataaatatttcatcagcctgcaacattccattaagtattagaattatcagatcagaaatggggagtaaagttgaaatataatgttgtctttcttcagcttatgatacacagcacctgtaaggattctttgaagattaatccaaccaattcctgttcctccactgaaatgggagtttttggtccttttcacttgtctcaacagcatgaattgtcctattatcctgtgatttcctaggagcttggaccccgattggctgcaatgctgaactttaatcttcagcaactttgtggccccaagtgccgtgacctgaaagttgaaaaccctgagaaatacggctttgaaccaaagaagctgttggaccaactgacggatatttacttacagctggactgtgctcggttcgcgaaagccattgctgacgaccagagatcctacagtaaggaattgtttgaagaagttatttcaaagatgcggaaggcagggatcaaatccacaatagcaatagaaaaatttaagctgctcgccgagaaagtggaggagatagtggccaagaacgcacgcgcagaaatcgactacagcgacgctcctgatgagttcagagaccctctgatggacaccctcatgacagaccccgtgcggctgccctctggcaccatcatggaccgctccatcatcctgcggcacctgctcaactcccccacggaccccttcaaccggcagacgctgacagagagcatgctggaaccagtgccagaactgaaagagcagattcaggcgtggatgagagagaaacagaacagcgatcactaaaccgttccgccgcccaccctctgctagacacagccaaggccaacgaggcaagcagaagcagcggccgcagcgaagctgccgttcatgtgttggaggccaaatgtggcaaaccaaccccaggcccacccagagcgagcaaacgctgagacctgaaaggacctggatgagaagaggagcccgcttcctgtacatatatttaagtgacaaacacggtcaaaagcttaagggacaggttttatggttgcttgtgtaataaagcatgtccttcgtatgtcacagtttggggcaacggaagtcttttagtgatggctaatgggtctgggcagcatcccttcatgaannnnnnnnnaatccgatatccgttgatttgattgtgattagagaccttggacattttgctgctaaagaatcttttt

SEQ ID NO: 188441 - DNA, 2684 bp, Homo Sapiens
ttggacagtgaccatttcaccattgaaacctgcaaagagacagatatgctgaactacctcatcgagtgtttcgaccgagttggaatagaggaaaaaaaagcaccaaagatgtgcagccagccagcagtcagccagcttctgagcaacatccgctcacagtgcatatcccatactgctttagtactacaaggctccctaacacagcccaggtcctgcagcagccgtccttcctagtgccgtatatgctgtgtaggaatctcccatatggcttcattcaggaactggtgagaaccactcaccaggatgaagaagtgttcaagcagatatttatccccattttacaaggcctggctcttgctgccaaagagtgctccctcgacagtgactactttaaataccccctcatggcactaggtgagctctgtgaaaccaagtttgggaagacacaccctgtgtgcaatttggttgcttctttgcggttgtggttgccgaaatccttaagtcctggctgtgggcgggagctgcagagactctcttacttaggggctttctttagcttctcagtctttgcagaagatgatgttaaagtggttgaaaaatacttctcagggcctgccattaccctggaaaacactcgtgtggttagccaatcattgcagcattacttagagctcggaaggcaagagctttttaagattctgcatagtattttgttaaatggcgaaacccgtgaggctgctctcagttacatggcggctgtcgtcaatgccaatatgaagaaagcacagatgcagacagatgatagattggtgtctacagatggatttatgctgaatttcctttgggtactgcagcagctaagtacaaaaatcaagttagaaacagttgatcccacgtatatttttcacccaagatgtcggattactcttcccaatgatgagacgcgtgtgaatgcaacgatggaagatgtgaatgactggctgactgaactctatggcgatcagcctccattttctgagccgaaattccctacggagtgcttctttctcaccctgcatgctcaccacctctctattctgcctagttgccgtcgctatatccgcagactccgggctatccgggagctcaatagaactgtagaagatttgaaaaataatgaaagccaatggaaagattccccactggcaactagacaccgcgaaatgctgaagcgctgtaaaactcagcttaagaaactggtacggtgcaaggcctgtgctgatgctggcctacttgacgagagcttcctgagaagatgtctgaatttttatggccttctcattcagctgctgctccgcatcctggaccccgcatatcccgatataacactgcctttaaattcagatgtccccaaggtatttgcagcgttgcctgagttttatgtagaagatgttgcagaatttttattttttattgtacaatactctccccaggcgctttatgagccctgtactcaggatattgtgatgttccttgttgtgatgttgtgcaaccagaactacatccgaaacccatatttggtggccaaactggtagaagtcatgtttatgaccaaccctgctgttcagccacgaacccagaagttttttgaaatgattgagaaccatcctctctccaccaagttgttggtaccttccctgatgaagttttatacagatgttgagcataccggagccaccagtgagttttatgacaagttcacaattcgctatcatattagcaccatttttaaaagcctttggcaaaacatagctcaccatggcacctttatggaggagttcaactccgggaagcagtttgttcgctatataaacatgttgataaacgacacgacgtttttgctcgatgaaagtctggagtctctgaagcgaatccatgaagtgcaggaagagatgaagaacaaagaacagtgggaccagttgccccgggatcagcagcaggctcgtcagtctcagcttgctcaggatgagcgtgtgtcccgctcttacctcgccctggccaccgaaaccgtggacatgttccacatcctcacgaagcaggtccagaagcccttcctcagaccggagcttggaccccgattggctgcaatgctgaactttaatcttcagcaactttgtggccccaagtgccgtgacctgaaagttgaaaaccctgagaaatacggctttgaaccaaagaagctgttggaccaactgacggatatttacttacagctggactgtgctcggttcgcgaaagccattgctgacgaccagagatcctacagtaaggaattgtttgaagaagttatttcaaagatgcggaaggcagggatcaaatccacaatagcaatagaaaaatttaagctgctcgccgagaaagtggaggagatagtggccaagaacgcacgcgcagaaatcgactacagcgacgctcctgatgagttcagagaccctctgatggacaccctcatgacagaccccgtgcggctgccctctggcaccatcatggaccgctccatcatcctgcggcacctgctcaactcccccacggaccccttcaaccggcagacgctgacagagagcatgctggaaccagtgccagaactgaaagagcagattcagcgtggatgagagagaaacagaacagcgatcactaaaccgttc

SEQ ID NO: 188442 - DNA, 1296 bp, Homo Sapiens
ttggctctccccaccacaaactccccagcactggggctgacccttggggagcctccctggagacctccgacacacctggtggtgcctcgacctttgacccatttgccaaacctccagaatccacagagaccaaggaggggctggagcaggccctgccctctgggaagcccagcagccctgtggagctggacctgtttggagaccccagccccagttccaagcaaaatggcacgaaggagccagatgccctggacctgggcatactaggggaagcactaacccagccaagcaaagaggcccgagcttgccggactcccgagtccttcctgggtccctcagcttcctccttggtcaaccttgactcgttggtcaaggcaccccaggttgcaaagacccggaaccccttcctgacaggtctcagcgctccgtcccccaccaacccgttcggcgcgggcgagccgggcaggccgacgctaaaccagatgcgcaccggctcgccggcgctgggcctggcaggcgggcctgtgggggcgcccctgggctccatgacctacagcgcctctctgcccctcccgctcagcagcgtgccagctggcttgaccctccccgcctcggttagcgtcttcccgcaggccggagccttcgcaccgcagccgctgctgcccacgccgagctcagccgggccgcggcccccgcccccgcagaccggcaccaaccccttcctctgagccccgccccgtcccataccggcctgcgcctgcgccggacgctccgcggccccgcctccggacccggggctgggcggggcgccggtgctagtggaacgccgagccagtggcggctggtatcccgcggcggctctggaagctggacgcggaccacggcccgggagctagaaactgaacgcccgcataataaagactggaaccctcgttctcagctctcaccaagtggactttttgcggggtgtggcggccgggtctcgaccacagcgtggatcaccggctgtttaggaaactgcagctgcacaacgtggggtgcaaaactgccccgcttcctttacagctcttctcaaccctcacctccatcccccgtcacccaggcaccttcgcttccagatgctgccaggctgtcactcaattcggtcattttcattcatttatcacacatgcgcactgggggttggggctaacaccaagagaacaataggcctttgttcctatttattgggtactgcttacgtgctaagcagatcagtttatttaatgcttgcaaccgactctctgaggtagaaaa

SEQ ID NO: 188443 - DNA, 937 bp, Homo Sapiens
tcagtttcctgggcaacttctagcaggtctacatgcctatccacattttcatttttcaagatgagtttcaggattgcttctctctgttttaaagcaggctggttgatatgaaatcttgtaggcattcttctcattatagccgagtcaaggtcctgaggacgattggtagctcccattactatgacctggcagctgtgatcagtatccaatccatcccagagactcataaactgagctttcatcatggctgtagcttcatggtcagaacttgaacggtttcgtagaaaggagtctatttcatctataaagatgatggatggttgtagctttatggcaagggagaagacagcagcagccaatttctgagattctccataccacttatcggtcagtgtcgaaggctgaaggttaataaatcgacagcctgcttctttggctgtggccttggcaatcaacgttttaccacagcctggaggcccatagagaagaacaccttttggaggctgcagaagcctggaattctcaaacaaatgtttctttttgataggtaagatgactgtgtctttcagatccgtaatgacatcatctaaacctgctatatcactccaagtaacatgcatattaagagggtctacaagatgagcagcaatactcatttcatattctgagagcttcacatttttcactccaatttgcttcattagtttttctgcctgtttctgagcttctactttttgctttctggttggatcaattgcatctaccatccatttgatagtaaagtatgtcactgcaccaaatattgtcaaacggaaaattaaaccaacaacttcattccgactcaaaggacgagaaaaggcttcagcatgtaccatcttgaatgttaacccaggggcagaaacagcaagagcaagtgccctcagccggcctcacccaa

SEQ ID NO: 188444 - DNA, 1762 bp, Homo Sapiens
ttggatattctaaagttatttgagtatttgatggttttgtttgcattttagccatgacgaagatgaaattcggcctgttcaacagcaggacctgcatcgggcaattgaaaagatgaagaaatcaaaggatgcagcatttcagaatgttttaacacatgtttgtttagattaagagtaaagatcatttgtacagttcagtgatctagtttggtgtgtcctcttatcagttagtggaaatagaacggaaagagtgctctttaaacaatgagggagctcagtgtttatggttttatactctgaattctaagttattgagatatagttgttacataggtggtattactgttggtcaaaaatcatgaggaggaacagttgaatccagcctgaacgtgggtgcttgtgtttgaccttttcagccatatattgtacagccttatagaatctaagctggtcttaaagtcataaatgattcattgggtcattagtgagaaacggggatgtggttaggtgctggttcctagacatgtgagtatgcgtttgtgtgtgtgcgtgtatgtatgtgtatattaaatgtatatatccacacattttatattgacattctgtagatatgtttgaatatagaaactttttttaccccaactactgaatccaggagtaccaaataatatatagtaaaactaagatttaaggttgtgtcaaaaaggtacagtgattcagccatttccatttgtcatttgtttcaaccttttttaagttgagtgtttttatttctgcagttattagttggatcctccacatcttgcatatatacatgggctcaattattatgtttgtcaggataatcaaatgaaaatactagttcagtgatcagcattgaatggttgttaggcagccatgtgctcaacactgatttcacctcttgagtataaactttttaaatttaaattggtttacatgaaagtggattaaaaggcctttcaaaagaatgggtttgaaaaacctcagtaccctttaatacatgtacatttctttccttttttcatttaatgtaacatgtctgttgtaactatgtttcttaaatattattttaaggttatgtgttctttaattatggtcaaatataatttggtcaccaaaaatgaaataatagtttaaaacaagtagctgttactaagtgtgctaaaaatactcattttataattaattttagttttcttagtatattattataaattgtgccctaagtcaggtacaaatgtacacatcaaaatgcccatattgtatctatctgtagtcgtttaatgtgaattatatgtgaatttttttcaaaattttactaaccagaattctgttataggcacctaaccacgcagcatgaggaaaacggcacaacacaatcttgaggtgccttctgaatcatcagattaaattatgcttcatatgtttttgcttttactgtatttctttaaaaactctaaatctttattcatgtgtcactggattaatttatctgataatgtgtctcacaagaatctgttagatcgtttattcttcagttgtactttgaatggtggggtggaagtttcaggtgaacaatggataacaaaaagcaagttatggaagattgtgaagaggatggaaaaactgaatacaagataccaaaaatgaaaaaaagtgtcccatttttaataactatattctattattttataaatgtgtaataaaggggtccctctttattgggttgttctccacttaa

SEQ ID NO: 188445 - DNA, 961 bp, Homo Sapiens
ttggctctgagatctcccgtctggtggcaatgatctacaggagaggaagaaagctatctagggacgagatctagaatcaactgagagagatgcttaaaaatcaccagttactttaatgaccatccgcagagccatcctgtgcaaaggaaggagctaggctgtgcgccctgggcgtcatgatccttctgcgggcctccgaagtgcggcagctgcttcacaataagttcgtggtcatcctgggggactctgtgcatagggcagtatacaaggacctggtgcttctgctgcagaaggaccgcctgctcactcccgggcagcttagagcaaggggggagctgaacttcgaacaagatgagctggtggacggaggccagcggggccacatgcacaacggccttaactaccgtgaggtccgcgagttccgctccgaccaccatctggtacgtttttacttcctcacccgcgtgtactccgattacctccagaccatcttgaaagagctgcagtcgggcgagcacgcccccgacctggtcatcatgaattcctgcctctgggacatctccaggtatggtccgaactcctggagaagctacctggagaacctggagaacctgttccagtgcctgggccaggtgctgcccgagtcttgcctcctggtgtggaacacggccatgcctgtgggcgaggaagtcaccgggggttttcttccgcccaagctccggcggcagaaggccaccttcctgaaaaacgaagtggtcaaagccaacttccacagcgccaccgaggcacgtaaacataacttcgatgtactggacttgcatttccacttccgccacgcgagggagaacctgcactgggacggggtgcactggaatggacgtgtgcaccgctgcctctcccagctgctgctggcccacgtggccgacgcctggggtgtggagctgccccaccggccaccccg

SEQ ID NO: 188446 - DNA, 1278 bp, Homo Sapiens
ttggggagaagatgtgccgccgctgccaacgtcgagcggcgacggctgggaaaaagatcttgaagaagctctggaagcaggaggttgtgatcttgaaacgttgagaaatataattcaaggaagaccgctgcctgctgatctgagggccaaagtttggaagattgctctgaatgttgcaggaaaaggtgatagtttggcatcatgggatggtattttagacttgccagaacagaacactattcacaaagattgcctgcagtttattgaccagctttcagtgccagaggagaaggcagcagaattacttttggatattgaatctgtaattaccttttattgtaaatcacgtaacattaaatatagcacatcccttagctggatacatctactgaaaccattggtgcatcttcaactgccacgcagcgatttatacaactgcttttatgccataatgaataagtacattcccagggattgttcccagaaagggagaccatttcatctcttcaggttgctcatccaataccatgagcctgagctttgttcttatcttgatacaaagaaaattactccagactcctatgcactcaactggcttggaagtctttttgcatgttactgttccactgaagtcactcaggcaatatgggatggatatctacaacaagcagatccattttttatttatttcttaatgttaattatccttgttaatgcaaaagaagttattttaacacaagagtcagacagcaaagaagaagttatcaagttcttggaaaatactccatccagtctgaatatagaagatatagaagaccttttctctctggctcagtattattgcagcaaaacaccggcttcttttaggaaggataatcaccatctctttggtagtactttgttgggaattaaggatgatgatgcagatctgagtcaggctctttgtctggccatctccgtgtcagagatccttcaagcgaatcagctacaaggggaaggagtccggttctttgtggtggattgccgtcctgcagaacaatataatgctgggcatttatcaactgctttccacttagattcagacctgatgcttcagaatccatctgagtttgcacagtcagtaaaatccttgctggaagcacagaagcagtccattgagtctggctccatagctggtggggagcacctctgttttatgggcagtggcacggaggaagaagacatgtatatgaacatggtcctggcacactttttacagaaaaacaagaatatgtgagt

SEQ ID NO: 188447 - DNA, 1116 bp, Homo Sapiens
ccacctatgggttttcctttaattgcagtgtagattgagtacagtccgtagacttattttcagatgttttcaccaggctgaggctttgtgcaggttctttatttgaagctgacttctcatttctggtttcagaggggagtatattagtaaggtatttttggtgctgaagctttgggatgtgatccagtaggtggcacttgggcttactggtcagttggtagagtcttgcttggtcatgtggctcccctatgtttcctcacagttgcagccatgttcactctcaatgatctgaaaatgtgcttctctcctccttgagtgctggctgtagatcatggcttggcactcctaggctgcccactgcagctctggggcaatctcagtgtttatatttcttccctaactttggggaagaagaggaagggacattagtagtggttgtagccaagggtcttttgtttgtctcctcagagttccaccacccctggagaatacagcaactgtttactgcaatcagcaatcaggatggagaattcgtgctgtgggggccaatccaggggttccctgtcatgagcagtggggagtgtgtagaacccatgagagatgggctttggtcaattaaagcttgttgaaggtgtagataagggtgttagctccttcatcagtctgagggtagcaaggacagttccactgcagaagcagtggcagagaggctttcagttgcccctggaggctctctccagggagtggctgagttgctactggctcaacagttctggtagggggggttaggtagaggtccaggcctgcaagacttgcctagtgagaagatataggaatgggaacccaggtaacagtctggccacttttccatagggctgctgcagtatgcccagggcccgctccagtctctagtagcctcagattttccagtacctggagttatcatcagtgaagcctgtgaaacagcaaagatggcagcctaccgctccctttggaagctttgccctagggaggtatgaatgaacttgttgctggcccaaacacacctgtaggaggtggctggagaccccagtttggaggttttggccagtgaggagccaacttttttgtacaaag

SEQ ID NO: 188448 - DNA, 1201 bp, Homo Sapiens
tcagagctggcaaacaattcacactgtatgacatctaagttaaactgctgaacagctcccatgcttatttgttttaactcactgtccagtagcatctgcattaaggatgttgacagatgctggcaggctgacatgcaagctgtctgagcaactttcccaggcaaatgagtaaacacttgaaagatgcttctcaaaaaatttataaggtccattaaataaccactagctcttccatctggctcagacattgtccagtcataatcagcaagctgaacaaattcatcaatttttgattcagtttggtatatatttctccttctgctgcatgtcgagcatccttgaaagtagaaagtccataaagtcttgtagtatgaacagtttcttgggaaatatttgtaatgttagttataaagtcctcaagatatttacaagcttgctccaggtgtgttgtgtttatgatgatttgtaccagctctgtcaaacctatatgaggttttctaataaggttcagtaaacagctactcaaagttctggtcagcagcagatttgttgattttctaagcatatcgtctatttctgttgagctccggtgtagtgactctgaaaatttaaggctggcataaataaattctttaacttgaatgtaaatatgaggcactgactgagacatggggaatttctttgggaaagactgcttttcaaggtctggatcttgaaagggaaatttgctgatgacaattttatattcttcttcattgacaacagggatggggctgtaattatcttcttcaaaaatgtccctgaaaactccagcccatttcttaagcagtgtttcattgtattggtctcttatttcaaataaaaggtcaaaaagtcggttcactggaaaaccataaccctgtaaagtatctgcaaatattacaataagattcttcagctccagaacaagatcaggatcagtgcaataggatgaatgagctctaaggacagcaattatctttgagagggccatgttccaaagttcatcagtgtatgccctggttactaatccttgggtcacatgtaaaatgtgatcttctaccacaaagaaccctacaatttgagtgaaatatcttctatagccatcaactgtttcatgcatattcgactggggttgcaataccagtctggcttgtttctttccaacttttttgtacaaagt

SEQ ID NO: 188449 - DNA, 1325 bp, Homo Sapiens
ttggcagatgagtgccaaaaggtactattctgccctaaaaactatggaacaattagagaatgtgtactttccctgggttagtcaataccggttttgtcagctcatgatagaaaatcttcccaaactccgtgaggatattaaagaaatctccatgtctgatctcaaagactttttggaaagtattcgaaaacattctgacaaaataggtgaaacagcaatgaaacaggcacagcatcagaaaaccttcagtgtttctctgcagaaacaaaataaaatgaaatttgggaaaaatatgtatataaatcgtgatagaattccagaggaaaggaatgaaactgtattgaaacattcacttgaagaagaggatgagaatgaagaagagatcttaactgttcaggatcttgttgatttttcccctgtttatcgatgtttgcacatttattctgttttgggtgacgaggaaacatttgaaaactattatcgaaaacaaagaaagaaacaagcaagactggtattgcaaccccagtcgaatatgcatgaaacagttgatggctatagaagatatttcactcaaattgtagggttctttgtggtagaagatcacattttacatgtgacccaaggattagtaaccagggcatacactgatgaactttggaacatggccctctcaaagataattgctgtccttagagctcattcatcctattgcactgatcctgatcttgttctggagctgaagaatcttattgtaatatttgcagatactttacagggttatggttttccagtgaaccgactttttgaccttttatttgaaataagagaccaatacaatgaaacactgcttaagaaatgggctggagttttcagggacatttttgaagaagataattacagccccatccctgttgtcaatgaagaagaatataaaattgtcatcagcaaatttccctttcaagatccagaccttgaaaagcagtctttcccaaagaaattccccatgtctcagtcagtgcctcatatttacattcaagttaaagaatttatttatgccagccttaaattttcagagtcactacaccggagctcaacagaaatagacgatatgcttagaaaatcaacaaatctgctgctgaccagaactttgagtagctgtttactgaaccttattagaaaacctcatataggtttgacagagctggtacaaatcatcataaacacaacacacctggagcaagcttgtaaatatcttgaggactttataactaacattacaaatatttcccaagaactgttcatactacaagactttatggactttc

SEQ ID NO: 188450 - DNA, 927 bp, Homo Sapiens
ttggctacccttctcagccccaccagcccccctctgcccaaccacaattttcccttcctccgccttcctctccctctcctgtttacactccccaaatgcgcacaggctgttatcatgggtcctgagtcatcccacacacagcctgccccagcgtccctgcccccagctggccgcagggcccgccccatggagccccctgccgccctgggctaatgggagccagatggccgcctggtgactcagccaccgggcctgtgggaacccaggcgtcccgccttcccatgcccccacacccggctcctgctcccccagcagacacacacaggagggcctggccactgttgagggggcacacagggcaagggtcaccaagtcggggcctagggactcctcatgcctctgagatggaatggtggtatcctgccgtggccaagcctgaaggaccctcaaaactgcctcctggagtccacggttcctgacctccgagcctcagctatgccctctgggtcaaccagaattagagccagacagggaaagtgagagctggatggaggcagacaagatgctcagagcgactattaaagaacgaaagcctctgctacggagcgcttctgtcctctgtcaggcccgagcgaagtgcctgacaccgggttggatcctcagatggccccatgaactagtgaagtgggtcaaaggaggcctggaaagatgttgcttcctcaaggccactcggccatcagaggcagaaatgaaacaggaacccaggcctagaatcacaaaggtcctagaaaccacttggctgtctggcctctcagtgtcaggccatccagagtgagacagcattggagggaccagtgtgcttgcagatgtcctcagacgggaaagtttgagaagggtcagatggtaagcgggcctaacaagggctcc

SEQ ID NO: 188451 - DNA, 1856 bp, Homo Sapiens
ttggcacatgcgcggcagctcttttccttcttcctccacttcccctaccctccaccgtccgggagccgccgccaccgccgccgaggagtcaggaagttcaagatggccgccgcggagacccagtcgctacgggagcagccagagatggaagatgctaattctgaaaagagtataaatgaagaaaatggagaagtatcagaagaccagtctcaaaataagcacagtcgtcacaaaaaaaagaagcataaacacagaagtaaacataagaaacataaacattcctcagaagaagacaaggataaaaaacataaacataagcataaacataagaaacacaaaggaaaagaggttattgatgcttctgataaagagggtatgtctccagcaaaaagaactaaacttgatgatttagctttgctagaagacttggaaaaacagagagccttgattaaggccgaacttgataatgagttaatggaaggaaaggtccagtctggtatggggctcattttgcaaggttatgagtctggctctgaagaagagggggaaattcatgaaaaggcaagaaatggaaataggtctagtactagatcttcaagtacaaaggggaaacttgaacttgtggacaataaaattactacaaagaaacgaagtaaaagcagatccaaagaacggactagacataggtctgataaaaagaaaagtaaggggggtattgaaatcgttaaagagaaaacaactaggagcaagtcaaaggagaggaaaaaatctaaaagcccatccaaaagaagtaagtctcaagatcaagcaaggaaatcaaaatcccctacccttagaaggcgatctcaagagaaaattggtaaggccagatctcctactgatgataaggttaaaattgaagataaaagtaaatcaaaagataggaaaaaatccccaattataaatgaaagtagaagtcgcgatcgaggtaaaaaatccagatccccagttgatttaagaggtaaatccaaagacagaaggtcacggtccaaagagagaaaatcaaaacggtctgaaactgataaagaaaagaagccaattaaatctccctctaaagatgcttcatctgggaaagaaaataggtcacccagcagaagacctggtcgtagtcctaaaagaagaagtttgtctccaaaaccacgtgataaatcaagaagaagcaggtctccacttttgaatgatagaagatctaagcagagcaaatccccctcgcggacactgtctcctgggagaagagccaagagccgatccttagaaagaaaacgacgagaaccagagaggagacgactttcttctccaagaacacgacctcgagatgatatcctcagtagacgtgaaagatcaaaagatgccagccccatcaatagatggtctccaacccgaagaagaagtagatctcccattagaaggaggtctcgttccccactcagacgtagcaggtctccaagaagaagaagcagatctcctcggagaagggacagaggtcggaggagcagatcacgcttgcgaaggcggtctcgatcacgcggtggtcgtagacgaaggagcagaagcaaagtaaaggaagataaatttaaaggaagtctttctgaaggaatgaaagttgagcaggaatcttcgtctgatgataaccttgaagactttgatgtagaggaagaagatgaagaagcctctaatagaacagagaagaatccaaaggcaggcaattgttcagaaatataaataccttgctgaagatagcaacatgtctgtgccatctgaaccaagcagcccccagagcagtacgagaacacgatcaccatctccagatgacattc

SEQ ID NO: 188452 - DNA, 1458 bp, Homo Sapiens
  misc_feature (352)..(428): n is a, c, g, or t
  misc_feature (803)..(848): n is a, c, g, or t
  misc_feature (873)..(924): n is a, c, g, or t
ttggcgctggggtaacaacaaccgggataacaacaactccaacaacagaggcagctaccctacaaccagggaggttacagccagggctacacagccccaccgcctccacctccaccaccacctgcctacaactatgggagctacggcggttacaacccggccccctataccccaccgccaccccccaccgcacagacctaccctcagcccagctataaccagtatcagcagtatgcccagcagtggaaccagtactatcagaaccagggccagtggccgccatactacgggaactacgactacgggagctactccgggaacacacagggtggcacaagtacacagtagccannnnnnnnnnnnnnnnnnnnnnnnnnnnnnnnnnnnnnnnnnnnnnnnnnnnnnnnnnnnnnnnnnnnnnnnnnnnncagatcccgtggtgctggggatggggtcatcccagggctgcctccctccagcccactgcctcccctctgaggggcttccttcccctccatagggccaggcatttttttctggattcaaacaggcaacaatgaccttttattttctgtttgtccccacctccccagccttccacctcctgttcttcctaccttcttcctttttgactaaataatccccacctcccttgatcatacagtgaggctacagtgactgaggggagaatcccctcctgttcactctcccaaccctgctccagcccctcagcttcccagaccctcatgcagttggttgtaaattctcccaggagctgttttactgtctacttttcaggattnnnnnnnnnnnnnnnnnnnnnnnnnnnnnnnnnnnnnnnnnnnnnntggggagggggaggaagcagtgacnnnnnnnnnnnnnnnnnnnnnnnnnnnnnnnnnnnnnnnnnnnnnnnnnnnnctgtgggtgggctgttgatatttcatcaagataagcatttttttcctgagttcaggtgactgaggaagagccacaaaacaaaacacaacaaaaccaaaccacagaatcatttttaacccaactttttatacgatgccccagttccccataactttgcacacaaggttttgtgttcagttgaattgtaaatgctttttgtatttggagagagtgactattgaacttgaaaccttttattccgggggttttggtagtttttggtgggattcagtgggtgagagggaagaaggggaggttggggggctccttcccttcagaacttgaagtttttcccactgcctcctttccagtggtttcccaggtgccagacccaaaagcttttcctacagtgataccctttatttttacttccccctgactcatatgttttaacatgattttaacaaactgcacttattaagaaatgtgtttgccctgttttgtttggtttcgttttgttttctttgaataaatgacatggcacctcctagcagg

SEQ ID NO: 188453 - DNA, 1552 bp, Homo Sapiens
  misc_feature (306)..(356): n is a, c, g, or t
  misc_feature (381)..(426): n is a, c, g, or t
  misc_feature (801)..(877): n is a, c, g, or t
gccccccaccctccctttcttccctctcactcactgaatcccaccagaaactaccaagacgcccggaataaaaggtttcaagttcaatagtcactctctccaaatacaaaaagcagttacaattcaactgaacacagaagcttgtgtgcaaagttatggggaactggggcatcgtataaaaagttgggttaaagatgattctgtggtttggttttgttgtgttttgttttgtggctcttcctcagtcacctgaactcaggaaagaaatgcttatcttgatgaaatatcaacagcccacccacagtnnnnnnnnnnnnnnnnnnnnnnnnnnnnnnnnnnnnnnnnnnnnnnnnnnngtcactgcttcctccccctccccannnnnnnnnnnnnnnnnnnnnnnnnnnnnnnnnnnnnnnnnnnnnnaatcctgaaaagtagacagtaaaacagctcctgggagaatttacaaccaactgcatgagggtctgggaagctgaggggctggagcagggttgggagagtgaacaggaggggattctcccctcagtcactgtagcctcactgtatgatcaagggaggtggggattatttagtcaaaaaggaagaaggtaggaagaacaggaggtggaaggctggggaggtggggacaaacagaaaataaaaggtcattgttgcctgtttgaatccagaaaaaaatgcctggccctatggaggggaaggaagcccctcagaggggaggcagtgggctggagggaggcagccctgggatgaccccatccccagcaccacgggatctgnnnnnnnnnnnnnnnnnnnnnnnnnnnnnnnnnnnnnnnnnnnnnnnnnnnnnnnnnnnnnnnnnnnnnnnnnnnnntggctactgtgtacttgtgccaccctgtgtgttcccggagtagctcccgtagtcgtagttcccgtagtatggcggccactggccctggttctgatagtactggttccactgctgggcatactgctgatactggttatagctgggctgagggtaggtctgtgcggtggggggtggcggtggggtatagggggccgggttgtaaccgccgtagctcccatagttgtaggcaggtggtggtggaggtggaggcggtggggctgtgtagccctggctgtaacctccctggttgtagggtggctggctgtaactcggctgatggagggctgtagctgctgacggtgggggtgctggtattggcgcttgagccagggatgttgctgttcttattgtaggtgctggcccctggggggttccgagcagggctgtagctgggtggtggcggtggctgctgaaatgcctcctgcccccaactacttaattctcactcatcattaattctcaatgaatgagtgagacttcctcagggaagtcttccctcaccccactgttcactgccctggcagaaccaggtttctttccttcagtacttctcgggttgttattatgacctagagggcatatcctctgaacaatgcccatctaccccattcaactgcaaactccttcagaacccaa

SEQ ID NO: 188454 - DNA, 900 bp, Homo Sapiens
ttggggtggcggcggcagcttcgcgccgaatccccggggagcggcggtggcggcgtcctggggccaggaggagcgaacacctgccgcagtcctcccgccggcgctgggctctgtgtgctccgggatggagcaggtgtgcagagggtgagaacccagctctgggaccaagtcacttgcttccttacttagcaagactatcgacttgagcaaacttggacctgggatgaggatgtctgtgggcctctcgctgctgctgcccctctgggggaggacctttctcctcctgctctctgtggttatggctcagtcccactggcccagtgaaccctcagaggctgtcagggactgggaaaaccagcttgaggcatccatgcactcagtgctctcagacctccacgaggctgttcccacagtggttggcattcctgatggcacggctgtcgtcgggcgctcatttcgagtgaccattccaacagatttgattgcctccagtggagatatcatcaaggtatcagcggcagggaaggaggctttgccatcttggctgcactgggactcacagagccacaccctggagggcctcccccttgacactgataagggtgtgcattacatttcagtgagcgctacacggctgggggccaacgggagccacatcccccagacctccagtgtgttctccatcgaggtctaccctgaagaccacagtgagctgcagtcggtgaggacagcctccccagaccctggtgaggtggtatcatctgcctgtgctgcggatgaacctgtgactgttttgacggtgattttggatgccgacctcaccaagatgaccccaaagcaaaggattgacctcctgcacagatgcggagcttctcagaagtagagcttcacaacatgaaa

SEQ ID NO: 188455 - DNA, 894 bp, Homo Sapiens
ttggatctttattcacaatgtctttacaaaggctcctgcaacacagcagcaatggcaatttggcggacttctgcgctgggccagcgtatagctcttactccacactcaccggcagccttacgatggacgataatagaaggattcaaatgctagcagacacggtggctactctgcctcggggacgaaagcagcttgctttgaccagatcaagttctttaagtgacttttcctggtctcaaagaaagcttgttactgtggagaagcaggataatgaaacatttggatttgaaattcagtcttacaggccccagaatcagaatgcctgctcctcggaaatgttcactttgatatgcaaaatacaggaggacagcccagctcactgtgctggcctgcaagctggtgatgtccttgcaaatatcaatggtgtgagcacagaaggttttacctacaaacaagtcgttgacctgatcagatcgtccggaaacctgctaacgatagagactcttaatggaacaatgattctgaaaagaacggagcttgaagcaaagctgcaggttttaaagcaaactttgaaacaaaaatgggtggagtacagatctctgcagttacaggaacatcgtctgcttcatggtgatgcagctaattgccccagtttggaaaacatggacttggatgaattgtctttgtttggacccctgcctgggccaggcccagcccttgtggaccggaatcgattatccagtgagagcagctgtaagagctggctgagctccatgacgatggacagtgaagatggctaccagacgtgtgtgtctgaggactccagcaggggtgctttcagtcggcagacgagtacagatgatgagtgctttatcccaaggaggggatgatttt

SEQ ID NO: 188456 - DNA, 1512 bp, Homo Sapiens
  misc_feature (70)..(119): n is a, c, g, or t
ttggcatctgctaaaacacgagctaatgttgacaaggtattttttgatttaatgagagaaattcgagcgnnnnnnnnnnnnnnnnnnnnnnnnnnnnnnnnnnnnnnnnnnnnnnnnnntttagccaagagaatcagagaaagatgctgcattttataatcaaagcccaaactcctttcttatcttgaccatactaataaatataatttataagcattgccattgaaggcttaattgactgaaattactttaacattttggaaattgttgtatatcactaaaagcatgaattggaactgcaatgaaagtcaaatttactttaaaaagaaattaatatggcttcaccaagaagcaaagttcaacttatttcataattgcctacatttatcatggtcctgaatgtagcgtgtaagcttgtgtttcttgggcagtctttcttgaaattgaagaggtgaaatgggggtggggagtgggaggaaaggtgacttcctctggtgtttattataaagcttaaattttatatcattttaaaatgtcttggtcttctactgccttgaaaaatgacaattgtgaacatgatagttaaactaccactttttttaaccattattatgcaaaatttagaagaaaagttattggcatggttgttgcatatagttaaactgagagtaattcatctgtgaatctgctttaattacctggtgagtaacttagaaaagtggtgtaaacttgtacatggaattttttgaatatgccttaatttagaaactgaaaaatatccggttatatcattctgggtgtgttcttactgacaccaggggtccgctgccccatgtgtcctggtgagaaaatatatgcctggcacagcttttgtatagaaaattcttgagaagtaactgtccgctagaagtctgtccaaatttaaaatgtgtgccatattctggttcttgaaaataagattccagagctctttgatcgcttttaataaactgcaagttcattttaaatgaagggccagcatatatacttgcaagataattttcagctgcaaggattcagcaccagttatgtttgaatgaacccccttttctctgagattctggtccctggaaatccctttctgctagtggtgagcatgtaagtgttaagtttttaatctgggagcagggcataggaagaaaatgtcagtagtgctaatgcattttgcactaaacgcttcgggaaaatattcatgcttgccatctgttcatttctaaatttatattcataaagttacagtttgatacaggaattattaggagtaattcttttctgtttctgtttataatgaagaacactgtagctacattttcagaagttaacatcaagccatcaaacctgggtatagtgcagaaaacgtggcacacactgaccacacattagctgtgtcaccattgtgtggtgtacctgctggaagaattctagcatgctacttggggacataatttcagtgggaaatatgccactgaccga

SEQ ID NO: 188457 - DNA, 1545 bp, Homo Sapiens
tattactaaataaaaagaagaaactcatgtggttagagagcattaagtctgagatttttttcacaaatcccttaccacttttcaaaactagtttacaccatttgttttacaatgcagctttagggtttctgacaggtatttttgtaacaattacctataaaatttttttcactccccctctctgccccaagactttgcattttgtgctaaatcaaccaagtagcaaaattgaaaggtatgctttttttggcataaattatatttttgaaattaaatattctataaagaaagtaaaacaaaatgtgcaatttatgcatgctgtggtgcagctatccgatacttacattacaaaaatactccaaacaggaaaaaagtccacattctgtgagtcatataaacctactaggaatgaaaaataccctggaacttggaactaaaagaagaaaagaatgctcctagaaagattctcacagatttcagtgttctttgataagcactgctattaatttcactggtatgcttttaaatgagattctcactgtaatgacactcttgagattaagatagtaacagtgtattttgttaatgcagagacaatggagacttcctaacttacattttggaaaatctgaaatgttggttcattccaaatagctcctctaacaaaagtctctcaattttaccttttcttttttccccatgttttaatggattgtgaatctgagacaaaagtggaagcataagactaaaggagaaaaaaccttacttccaaagaacatttcccaaagtagtttacaaagttcatctcacacaaaattagcacctcactcttaccatgcaaaaataactgcagttataatttgaatgacagacaatttggtttttattgcttaatgatctgtgctttaatgtggggataaaaggcatcctctgaatggaataacattttatataaatagcagtaggaaaatgtaaataagcattgatatcccactgctgaacactttgccgttgtgatatgccctgaaaaactcagcttgaattatctcaagctctagataaaagagctgaaacccattaaagttgtcatttcaaaaggacttgtacacattatgttaataatgtatatacttccaaagagcctcttttaatgtcactgtcatatagaatgtccatattctactaatcgttattagaaaaaatttaattagggagaacagactgtttcccccttccaatctacctaagaataaacaggaaataaaagtataggaaattttagagcatatttaattatgaatactaaatttctaatttccttatttatcagtatttacttagtatgtgaggctgaaatctgttcttgaaaaaaagttcaattagaaataacaattcactttacgattagaaattcatagtttacaaccagcacaactgcccagattcctcccaattattcaataattaccaatagtacaaatttatatggactaagattaatcctaaaatctttaaaaactacagtattgacattattttggccaa

SEQ ID NO: 188458 - DNA, 1540 bp, Homo Sapiens
tggccgcctggagggtccccccaaccaccccaggcacgtagggtgggttctccagctcattgttggggcagccgtcctcagagcccctgatgaagttggaaggctcgttcatgtcaatccacatgccgtcgaagggcacctggtcatggaactcagccaccatgtcctcccaccaggccagggctgtggggttggtgaagtcggggaaggcagtggacccgggccataccttcccaatcagcggctggccggtctcgttggtgatgaaaacccccctccgcagaccctcgtcatagggcctgtagctcccggcagggcccgagctgctgatggcaggatccacgatcatcatgtagcgccggccgccctggtgcagctcctgcaccatggccgggaagtcccggaagccatccttgttgaacgtgaagtccctccgggagtccatgtagtccaggtcgttccattggacgtccagggggaagtgggccctggtcatgttctccaccacctggcgggtgatagcggtggaggagtagccccagcggcacaggtggaagcccaggccccagtatggcggcatgaacgggtatcccacaacgtccaggtactgctgcaccacgctcttgggctctgggcccaggaagatgtagacatccaggatcccacctgtcgacctccagctaagggcagggctcggctgcaggaccacatccatggcattgctgtttagcaggaacaccccgtgagccgacccgccgtcctccagcgccaggtagaaagggtgagacccgtagaggttcgcaccgggcgtgggcgcaaggtcccggttccacagggtgatcctggtccagctggtgctgagcatcaggggactgaggtgctcggcgaggcctgtgatatactgcgagggcagcgaggtggacagctgaaggaactggtccgcaaagaacaggggcgccaccgtcgtgttcagcagcacgcggccgtccagctgccggtgcacgatcaccccgaagggctcctcggagaactccacgctgtagagtggggacggtgcccggctgtggacacgcggggtctccaagggcacctcgtagcgcctgttagctggatctttgatcgtgaagtggaggcggttctcagtctccatcatcacgtccagccgcagggtcaggatgtccttggggaagaaggtgggggtggtacgggtcagggtggccgtgtagcccatttcagaggagctcaggttctccagcttgtagctggggtagctgggtgggaagaagcaccagggctgccccatctgggctccctgcagcccctgctttgcagggatgtagcagcagccgcgggcctcgcactgttcctgggtgatggccttgtcaggggcgcaattgaagcggctgttgggggggacgtcgcactgtgtgggcactgctctgggacggccggggtgtgcctgggcatcccggggccctggtctgctggctccctgctggtgagctgggtgagtctcctccaggaagggggaggagcccaa

SEQ ID NO: 188459 - DNA, 1284 bp, Homo Sapiens
  misc_feature (366)..(374): n is a, c, g, or t
cccttgggcagaggagctgagcttgtgtgaaaggagtggagcagacagtctgcctggccacgtcaccccaggccaggccctttagggcggggggtgatttagagagcaggctgggggcctgccccatctggtttgatctccaatcctgcttgaggtctcaggaccccgtgcttcggctgcccctgagccccttgcccactgccccactgaggaggcagcagggaggggcggactcagaggaggggaggggagcaagaacaacagcagaagaatctcgtctgtacagtacgggccgtttgagtcattattattacaatatactttgacaaaaatagaatctcatttcatatcaatacaacaacaacnnnnnnnnncagtttcctggactgttacaccgctaacgttttccaaaggtcgctatttacaattacagtagccaagagggaaggtgggatgcagcctggaggtggtgggacaaggaggtagccagagacaataggggcgccaagagcaaggaggtggggtcaggagcagaaggagctaacaggagaagctagggagaggggccaaggaggaatgagggaggtgggacctctacggacccatccgtaggccctcccaccccacagaccatcccagtgttgactcccccaggtagtgtgcgtgcaagaccaaggacgtcccctcaccacactcgccccaatgaaagagctctggcctggagcaccccagggaagtccaggccgactctcgccccagccacctcactgaagaccctctccccattctccctgcacactgtggccagctttacagggctggcgtcaactgaggggtggggagctattgcactgtatatcttagagaaaaactggggaagggaggggctcaatttgccccctgcctagcccttctgccctcctcagccctctcctcatggctctcttgtctttccctccaaatgtgcttccagagaggcccccacctcaaacccctgtctccagcctcagattcccaggctgccttcccggcccaaagctcagccagcacccacacaccttgggggtgcagcacacacaagaatcagcgcaggtgtggcacgtgtgtgtgcaggggcatttgggggccaggcttaagtattctgctccatgtgcctatggctacatgaacacaaaaacagagacccttttcagaacctctgcctcactttccccttgaaacacaaacccacccatcaagcccactttggggtttcagtctttgagggggggtttctgttgccaa

SEQ ID NO: 188460 - DNA, 1309 bp, Homo Sapiens
ttggcatcagcacccggaagggctgcagcagaagtcgttttctgtgggcagcctccgcctgacggtcctccctggtgccattcgccactgagtcttcccagaccctctggggactgctccgcctcctcgtcaccaagacagtgtgtcccggatgccagctccatccctcccgaccccctcagcccctgccactgcctcacagggctcttgcagccccggcctcctttctcctattggtgccagacagccccatgggtcctcgggtgggatggcgctgtccacattccaccgcgctggaagccccatggggacgccgtcaagggaacggcccgcaccacccccaccccaccacagacggaggcccagcgaggacggcagggtgcggggtgggtggccacacagcgaggagaaggctggcggaggctccgcaccgccgccacaggtcactggagaaggcccctcctgcatggcgggcctgcgcccaactgcaggctccgggactgccatgcatggccgtacccggcgaggccggcgtgtcggggccttgctaactgcagcccgtgccggcttctcgccctgcaggacggggaggtttactgcatcgacgcgcggttctacgggaacgtcagccggttcatcaaccaccactgcgagcccaacctggtgcccgtgcgcgtgttcatggcccaccaggacctgcggttcccccggatcgccttcttcagcacccgcctgatcgagccggcgagcagctcgggtttgactatggagagcgcttctggggacatcaaaggcaagctcttcagctgccgctgcggctcccccaagtgccggcactcgagcgcggccctggcccagcgtcaggccagcgcggcccaggaggcccaggaggacggcttgcccgacaccagctccgcggctgccgccgaccccctatgagacgccgccggccagcggggcgctcgggagccagggaccgccgcgtcgccgattagaggacgaggaggagagattccgcacgcaaccgaaagggtccttcggggctgcgccgccggcttcctggaggggtcggaggtgaggctgcagcccctgcgggcgggtgtggatgcctcccagccaccttcccagacctgcggcctcaccgcgggcccagtgcccaggctggagcgcacactttggtccgcgcgccagagacgctgggagtccgcactggcatcaccttctgagtttctgatgctgatttgtcgttgcgaagtttctcgtttcttcctctgacctccgaggtccccgctgcaccacggggttgctc

SEQ ID NO: 188461 - DNA, 940 bp, Homo Sapiens
ttggctttgtacaagaaagttggcgatcgccggctgctgcacgactgtcagcagatgctcatgcgcctgggcggtgggaccactgtcacttccagctagaccccgtgtccccggcctcagcacccctgtctctagccactttggtcccgtgcagcttctgtcctgcgtcgaagctttgaaggccgaaggcagtgcaagagactctggcctccacagttcgacctgcggctgctgtgtgccttcgcggtggaaggcccgaggggcgcgatcttgaccctaagaccggcggccatgatggtgctgacctctggtggccgatcggggcactgcaggggccgagccattttggggggcccccctccttgctctgcaggcaccttagtggcttttttcctcctgtgtacagggaagagaggggtacatttccctgtgctgacggaagccaacttggctttcccggactgcaagcagggctctgccccagaggcctctctctccgtcgtgggagagagacgtgtacatagtgtaggtcagcgtgcttagcctcctgacctgaggctcctgtgctactttgccttttgcaaactttattttcatagattgagaagttttgtacagagaattaaaaatgaaattatttataatctgggttttgtgtcttcagctgatggatgtgctgactagtgagagtgcttgggccctcccccagcacctagggaaaggcttcccctccccctccggccacaagtccctgggtggcacgggaggatggactgacttccaggacctgttgtgtgacaggagctacagcttgggtctccctgccagaagtctggcacgtctcacctcccccatcccgggcccctggtcatctcacagaaagaaaccctcctccctcccgactggccgccacactggaaagggggcacaggggcggggg

SEQ ID NO: 188462 - DNA, 1115 bp, Homo Sapiens
ttgggtgtgtctctgtgaccatggtggtggcgctgctcatcgtttgcgacgttccctcagcctctgcccaaagaaagaaggagatggtgttatctgaaaaggttagtcagctgatggaatggactaacaaaagacctgtaataagaatgaatggagacaagttccgtcgccttgtgaaagccccaccgagaaattactccgttatcgtcatgttcactgctctccaactgcatagacagtgtgtcgtttgcaagcaagctgatgaagaattccagatcctggcaaactcctggcgatactccagtgcattcaccaacaggatattttttgccatggtggattttgatgaaggctctgatgtatttcagatgctaaacatgaattcagctccaactttcatcaactttcctgcaaaagggaaacccaaacggggtgatacatatgagttacaggtgcggggtttttcagctgagcagattgcccggtggatcgccgacagaactgatgtcaatattagagtgattagacccccaaattatgctggtccccttatgttgggattgcttttggctgttattggtggacttgtgtatcttcgaagaagtaatatggaatttctctttaataaaactggatgggcttttgcagctttgtgttttgtgcttgctatgacatctggtcaaatgtggaaccatataagaggaccaccatatgcccataagaatccccacacgggacatgtgaattatatccatggaagcagtcaagcccagtttgtagctgaaacacacattgttcttctgtttaatggtggagttaccttaggaatggtgcttttatgtgaagctgctacctctgacatggatattggaaagcgaaagaaatgtgtgtggctggtattggacttgttgtattattcttcagttggatgctctctatttttagatctaaatatcatggctacccatacagctttctgatgagttaaaaaggtcccagagatatatagacactggagtactggaaattgaaaaacgaaaatcgtgtgtgtttgaaaagaagaatgcaacttgtatattttgtattacctcttttttcaagtgatttaaatagtt

SEQ ID NO: 188463 - DNA, 2095 bp, Homo Sapiens
  misc_feature (1060)..(1068): n is a, c, g, or t
gtagcgttaggaagatttatttccaaacagtgctccacactgcgcggcagcacttctttttagtatttgtaagcttttgcccactttcaatgagccagccctagcgtggtatgtattgcatgctgaacaatatagagtttgttttcctttctgatgattttaaactcttaaagaacaggaaagcatctggtaagaagaaatcatgagtccgtcagtgcccttactcatatgcgtctccagtggcctcatgttgtggtcacaggagtttcctgttcacagcaatgtgtgtgatatggacccagcatccactgtcgtgcttttaaactgattcctgggacatagcttaccactggaacagcagaccagtgttgcactgtttctaaagctaagcttttccttatttattttggtactacctaagtgacttggttttgactgtccctaagagagggaaccactttgctgaatttttaaaaagtccaactgctctttcatcttttatgcttagaaacctgttctctccagatgcacttctgaggcatggatgagctgagcgtatggctagaaattggaagtttacagctattaccagggggctaactcccggggcatcgcagtagcttctggcacccgtggcttcatgtctttagcaaagtcttgatgtcatggaaagagaaaaagtgtatgcagttagttacctgattttgtaaacaaacagtggctgacctgggcccttaaatcaccttcacaccttttagaaccacaagtggttctttttgactccaacaaaggaaacgaagttgaaaaagtcaagcccctgtgtactggggccggacttcccatcatttgagtgcagcactttagttcagaatctctgtgccatgtggttttttaaacaggaagattgttggttccttagtattaagatagatagtccctattttgagtggaatttttcatttgtaaggggtatgttccttctctgattcttgctttcctcaaacaggatactgcctgctgtaagaccatcctctatggttgtactttaataaacagtaannnnnnnnnaccaaaaaaattgtattttgtttctacttccttgaaacctgctttccaatttaatttttaagtgggaacctgcacagtggaaataaaggcaccgtgtgtagatttacagatgtgcagattcatgtgtggatgatatgaaggccattcaaatacgtgtaaatggacattttcattcaagtatattaatgtagatattttaaagtgggttataagtttaacattgtctttaaaatagaagtcacagctatcttccagcctgtcttctctaggaacgctgttgacatgccagggctccgtctacactggaagcagctatacagctgtgaccacatcgagctttagccagtcacacttctggaactgtccgttcagtccatcccatttctggctaagctcctcacgtaggtgcgtaggttctggttaataaagttcactgttgtgtgaaagacatcacggagcaaggacggcgtgtgactggccaccttcttggccagcagcagggccagcaccagcatggtcttctccttctccatgtctctagggtaggcctgcagcagctgctccagggcagtagccaggtccctgttccggtcctcctccgaccggctggtgttcctgagctgcagggccaggccgttcaccaggcccggagggatgctacggtccatgctgtccccgacctgggcgaggtgcctggcaatattccggatgatgtcttcttgactttcagaatctgcctctattcttcccaagcgggagtggctgctgcggttgccatcagtctgcagctcatcgtagccctcccactggggagccagcactggcagctcgtggcccagtgcgtccagctctctgcggaagctgttgtcagaacagctttggaggaagccaaacaccagtaggtttgtgatgcactcatccctgaggctggaaccgttgttgaccaccctccagccgcgggggcgcgggcgcgtccgggccgaggcagcgtctcccaggcgcgcggacacggtcgactacccgccaa

SEQ ID NO: 188464 - DNA, 1210 bp, Homo Sapiens
  misc_feature (291)..(299): n is a, c, g, or t
tttttgatttcaacaaaggaacgaagttgaaaagtcaagcccctgtgtactgggggccggacttcccatcatttgagtgcagcactttagttcagaatctctgtgccatgtggttttttaaacaggaagattgttggttccttagtattaagatagatagatagtcccctattttgagtggaatttttcatttgtaaggggtatgttccttctctgattcttgctttcctcaaacaggatactgcctgctgtaagaccatcctctatggttgtactttaataaacagtaannnnnnnnnaccaaaaaaattgtattttgtttctacttccttgaaacctgctttccaatttaatttttaagtgggaacctgcacagtggaaataaaggcaccgtgtgtagatttacagatgtgcagattcatgtgtggatgatatgaaggccattcaaatacgtgtaaatggacattttcattcaagtatattaatgtagatattttaaagtgggttataagtttaacattgtctttaaaatagaagtcacagctatcttccagcctgtcttctctaggaacgctgttgacatgccagggctccgtctacactggaagcagctatacagctgtgaccacatcgagctttagccagtcacacttctggaactgtccgttcagtccatcccatttctggctaagctcctcacgtaggtgcgtaggttctggttaataaaattcactgttgtgtgaaagacatcacggagcaaggacggcgtgtgactggccaccttcttggccagcagcagggccagcaccagcatggtcttctccttctccatgtctctagggtaggcctgcagcagctgctccagggcagtggccaggtccctgttccggtcctcctccgaccggctggtgttcctgagctgcagggccaggccgttcaccaggcccggagggatgctacggtccatgctgtccccgacctgggcgaggtgcctggcaatattccggatgatgtcttcttgactttcagaatctgcctctattcttcccaagcgggagtggctgctgcggttgccatcagtctgcagctcatcgtagccctcccactggggagccagcactggcagctcgtggcccagtgcgtccagctctctgcggaagctgttgtcagaacagctttggaggaagccaacttttttgtacaaagttgg

SEQ ID NO: 188465 - DNA, 983 bp, Homo Sapiens
ttggccaagcccggcgctgggggcgcgcagccgagaaagggtttgacgtggcagttcccagcccagctgcaactccgagcgtgagtccaggctaaggggacgccggccggggaagaggcgcggcgggagaagcgaccgcagcgggagccgggccaccgagggctgccggcactaggcgcagagccgccagcgctcggaagcccgcggggtgcgggagcgggaacagacttcttttgtagaattatcctatggaatgatattttcataatgagtcaacaaggttacgtggctacacctccgtattctcagcctcagcctggaataggcctttctccacctcattatgggcactatggggatccgtcgcacacagcatctccaacaggtatgatgaagccagcagggcctttgggggccaccgccactaggggaatgttgcctccgggtcccccacctcctggaccccatcagtttggtcagaatggagctcatgccactggtcaccctccccaaagatttccaggccctccacctgtcaacaatgtggcatcctcacatgcaccataccaaccctctgcacaatcttcttatccaggtcctatatccacttcatctgtcacccagctgggcagccagctcagtgctatgcaaatcaacagctatggttcaggcatggctcctccaagccagggaccccctggccctctgtcagccacatcattgcagactcctccacgacctccacagccttccattttgcagcctggatctcaagttcttccaccaccacccaccacactcaatggtcctggtgcctcacctttgcctctaccaatgtacagaccaaatgggctctctgggcctcctcctccaaatgcccagtaccagcccccacctcttccaggccagaccttgggtgctggatatcctccgcagcaagccaactctggtccccagatggcaagcgcacaactgtcttaccc

SEQ ID NO: 188466 - DNA, 1260 bp, Homo Sapiens
ttggcgggacgtcggcggctggcggagccgggcgggcgaagctggagcggcggtggcggcggcgtagggaggccggggccggggctgaggccgcggccgggtctgcgaggcccttggggcggcaggcggcggcggcccggggctcgagcccggaggcaggagcagccgccatggccgagagcatcataattcgtgtccagtccccagatggagtgaagcggatcacagcaacaaagagagaaacagcagcaacatttttgaaaaaggttgcaaaggagtttggcttccaaaataatggcttctcggtttacatcaatagaaacaagactggagagataacagcctcctccaacaaatccctcaacttgctaaaaatcaagcatggcgatttgttgttcctgtttccctcgagccttgctgggccctcatctgaaatggagacgtcagttccaccgggcttcaaagtctttggcgctcccaacgtggtggaggatgagattgatcagtacctcagcaaacaggacgggaagatttacagaagccgagacccacagctatgccgccacggccctttggggaaatgcgtgcactgcgtccctctagagccattcgatgaggactatctaaaccatctcgagcctcccgtgaagcacatgtccttccacgcctacatccggaagctgactggaggggctgacaaggggaagtttgttgccctggagaacatcagctgcaagattaagtcagggtgcgaggggcacctcccgtggccgaatggcatctgtactaagtgccagccgagcgccatcacgctgaacagacagaagtacaggcatgtggacaatatcatgtttgagaatcacaccgtcgctgaccgctttcttgacttctggagaaagacagggaaccagcattttgggtacttatacggacggtacacggagcacaaagacattccccttggcatcagggctgaagtggctgcgatttatgagccacctcagattggtacacagaacagcttggagcttcttgaggatccaaaagctgaagtggtcgatgaaattgctgccaaacttggcctgcggaagttggctggatatttacagacctcgtctcagaagatacccgaaagggtaccgtccgctacagtcgaaataagacacctatttcctaagttcagaagagtgcatcactgcacgagacttcagaacaagcatcccaacatgtgccggctctctccagacggacattttggat

SEQ ID NO: 188467 - DNA, 1016 bp, Homo Sapiens
  misc_feature (785)..(785): n is a, c, g, or t
  misc_feature (793)..(793): n is a, c, g, or t
ttggcatgaatcagcgaagaataatatcatgtcttggtaaatttaacaaatttgttacgtttggtgacatcatttacagattatttctttatgttgtccagtggttcttccttattgttgatatccataagctggcactggatgctctcagtaatgttaagtaattgtcaagcagcagttacctactgtgttcttaacactgagttgtgaattttttcttaaagcagtactgtagtactgaatattcctttaaaggaactgcagtgagcctatctaagtttttttaaattaaggcttttaaaatagaaagctgatgcttgatcttgcacaatttttatgtctagtatgtatgcttgagtgaatgtgtgagtatgaatgattagagaaaatttgagtcagtgtactttatagtgtgaatcctgtgagctaatacagtctatacttatttcttccctacctgtttcacatccgtaagatttaggatatacattttttgagaggtagtctgtctgatacaatgtaaatgacaaaacataattcctgagaggcccagaacaaactggagtctagcctggagttaaattgagacttctaaaatgattggaacaaagactaagttgtgccagatgtaaatcaacccctcttttagtttactttagactttgtattagctcatcttttttgtagtaaatctatagttttaaggtttctcaagatgtggctctacctactatgatgaaaattgaagtgggtcaaaagaattagatgtacagtgaagggagaangaaacagntgggcgaagagagggtggaaaataaaaggattcttttttcttcctttctgtttctcgtatccctgctccctttttcctccccttccctcattctttgcctctatccttagctgaagacaaactagaggagcagcatcccaggtagtttggcttttgactgcaggtagttaagaaaggtgtagatataatgaggtagaagtagaaaggaagaaaactcaaagaa

SEQ ID NO: 188468 - DNA, 1762 bp, Homo Sapiens
  misc_feature (509)..(521): n is a, c, g, or t
  misc_feature (931)..(940): n is a, c, g, or t
  misc_feature (958)..(986): n is a, c, g, or t
ttggagtttttttaaattaaggcttttaaaatagaaagctgatgcttgatcttgcacaatttttatgtctagtatgtatgcttgagtgaatgtgtgagtatgaatgattagagaaaatttgagtcagtgtactttatagtgtgaatcctgtgagctaatacagtctatacttatttcttccctacctgtttcacatccgtaagatttaggatatacattttttgagaggtagtctgtctgatacaatgtaaatgacaaaacataattcctgagaggcccagaacaaactggagtctagcctggagttaaattgagacttctaaaatgattggaacaaagactaagttgtgccagatgtaaatcaacccctcttttagtttactttagactttgtattagctcatcttttttgtagtaaatctatagttttaaggtttctcaagatgtggctctacctactatgatgaaaattgaagtgggtcaaaagaattagatgtacagtgaagggnnnnnnnnnnnnntgggcgaagagagggtggaaaataaaaggattcttttttcttcctttctgtttctcgtatccctgctccctttttcctccccttccctcattctttgcctctatccttagctgaagacaaactagaggagcagcatcccaggtagtttggcttttgactgcaaggtagttaagaaaggtgtagatataatgaggtagaagtagaaaggaagaaaaactcaaagaattctgaaaaggattcatagcaacataatgtgtccctgagtagaggatgctgctatgcgtgagttcatggacacaagttgattacatggtttttagaattataattatggattcttcttatttcatggtaggttgtctttaaagatataaaaattaggatgcctttatgaagcactgattataccnnnnnnnnnngacaagttatatacaggnnnnnnnnnnnnnnnnnnnnnnnnnnnnncctaaggaaaaagtcttctatctttccctgctggaagcctcctcatatttccttatgtttgccatgcaggttgctgagagtccagttagaatttgcattttacagaatgaaatactttaccccattcaaacaattattgtttgacattttagttatttataattgtcaaattcaggactctcctttaatgtttattatgaaaccaaatttggcataaggaggctgatttatgaattaccaaagggtcttgtggcatgttccccaatacatgcccttagaaggaagaactattattttttattttggccctttcaggagttgattataaattggtttgttttcaagtcagaattcaagtgggcagaacccgtattgtgaagacctaaactttcctaaatgttcatatgggtagcagattttgtggtgattagaaacatcaggtccttaaatacgatgaacatgggatacaaaggaattctttataagggcaagtatcctaagttagcacatttacttttctctcccctccgcccccaaaagaaaaatccttacaaataaactgcaggtaggcttctaagcctagtcctgcagtatgctgctaacatcttgatgccaatcttcacagcattctttgattgtcatcttattgctgatacattcatacatatatttagtgcttgacactgtagaattttgttacagaagatggttactagattttaagggagctgagggaataattgatgagccttgaattaaccatgcatttaattaga

SEQ ID NO: 188469 - DNA, 1813 bp, Homo Sapiens
ttggcactggatattttttcttcatacactggcagagacattccagaattaccagagcgagaagagggagagggtgaagaaagcgaacttcaaaacacagcatatagcaattggaatcagcccaggcgggtggaactctggagagaaccaagcaaatccttaggcatcagcattgttggtggacgagggatggggagtcggctaagcaatggagaagtgatgaggggcattttcatcaaacatgttctggaagatagtccagctggcaaaaatggaaccttgaaacctggagatagaatcgtagaggtggatggaatggacctcagagatgcaagccatgaacaagctgtggaagccattcggaaagcaggcaaccctgtagtctttatggtacagagcattataaacagaccaagggcacccagtcagtcagagtcagagccagagaaggctccattgtgcagtgtgcccccaccccctccttcagcctttgccgaaatgggtagtgatcacacacagtcatctgcaagcaaaatctcacaagatgtggacaaagaggatgagtttggttacagctggaaaaatatcagagagcgttatggaaccctaacaggcgagctgcatatgattgaactggagaaaggtcatagtggtttgggcctaagtcttgctgggaacaaagaccgatccaggatgagtgtcttcatagtggggattgatccaaatggagctgcacgaaaagatggtcgattgcaaattgcagatgagcttctagagatcaatggtcagattttatatggaagaagtcatcagaatgcctcatcaatcattaaatgtgccccttctaaagtgaaaataatttttatcagaaataaagatgcagtgaatcagatggccgtatgtcctggaaatgcagtagaacctttgccttctaactcagaaaatcttcaaaataaggagacagagccaactgttactacttctgatgcagctgtggacctcagttcatttaaaaatgtgcaacatctggagcttcccaaggatcaggggggtttgggtattgctatcagcgaagaagatacactcagtggagtcatcataaagagcttaacagagcatggggtagcagccacggatggacgactcaaagtcggagatcagatactggctgtagatgatgaaattgttgttggttaccctattgaaaagtttattagccttctgaagacagcaaagatgacagtaaaacttaccatccatgctgagaatccagattcccaggctgttccttcagcagctggtgcagccagtggagaaaaaaagaacagctcccagtctctgatggtcccacagtctggctccccagaaccggagtccatccgaaatacaagcagatcatcaacaccagcaatttttgcttctgatcctgcaacctgccccattatccctggctgcgaaacaaccatcgagatttccaaagggcgaacagggctgggcctgagcatcgttgggggttcagacacgctgctgggtgccattattatccatgaagtttatgaagaagagcagcatgtaaagatggaagactctgggctggagatcagatcttagaggtgaatggaattgacttgagaaagccacacatgatgaagcaatcaatgtcctgagacagacgccacagagagtgcgcctgacactctacgagtgagccaacaaagagatgtgaccagagtgggtgactgacaccctcactattgagtcggcaagagaagcccgggaaaaggccctaggattaagtattggttggtaaaaa

SEQ ID NO: 188470 - DNA, 1080 bp, Homo Sapiens
atgagccaccgcgcctggcctgtatatgtgatttctaaaaaatagatgcatgcatatgttaacattgaatagtcaatcactagatgaagatgctctctaccatggtttagattgcaagtgtactttataccattgtttcaacttcaacctttatttttgtatatattttttcaactacttaaactgttcatgaataggcgtactttctgtatttaaaaatggcccctcaagcaccgttaatttacattccagttatttacatgataattcatgacattctgaaacttgcctgtatattatctgaaaaatggatttcttgaggaaaagatctgtttattgtatgtaaggaaaaattttacctgaaaacaaacaaacaaaccctaaaactcagcaccactaccatttccagaagcttttttagcaagtgaatattttttacataatggataataaatggtatttattcatcatgattttctaagtaatgcttatcagccccttcagtggtgttattctaacaaaatgaatacattacaaattattaagttagcttttcagagttttaatatagaagttactagcactgacacactgattttgaaatgtttcaaaatgagtagatacgattagatcctttaccttttaatatctagtttttccaaaaatgatagtaatatcttttgaagaactatgctttttcaaaagcaaaatcaactctgtataatagcacattctctactttttaaagatcagaaatgctagaattcttgacttttgtgtatgggtagtaaatctagctcactgaaaatcagagtgaaacgcctttacatttgtgcggatagagaagttaactctccctcatatgtcactgtgctaccataatccctacattttctgtctgttctagtctaagaatattgttatagatggaagttaggaccattagcccacagatgcgtgtattctctcagacataccggtgtagatgccatatttctgatgtcttcttaatgtctgtgaaagcaactggcatctacaataaatcacacttagaactggtagaggactccctcacttttg

SEQ ID NO: 188471 - DNA, 1195 bp, Homo Sapiens
tttaaaaagtgggttacttgatccagaaaatccaaaagctttggaaattccaggaaagcaactactcttttggcagtggactcttccagggttgttaatcccactctgacacaatatggatggactagggaggcttcctgattatccaaatggaataccaagcatgccatcatctctccaaagcaagcccaaagggggctttaacttcccaaagtgctactgtaatcaccaattcccctgggcctcccagtgctaaataataagccaaagccaaaaaataaagtgtcattcagtgcagttgtcactttgcagccctgcaaccccgaggcacttcttccatgaggaagaacactttgtgacccttctttggcagctcaagcaaagacacaagaatgcatttgagagctgacaggtactagtcgagagttctatgagtcccctatttctatctgtggtagtaatgcattctttcctccactgcttccttgaattttagtgttaaaaattaggagaatctgctgcctaggctctgtccccttgaagttgatggagtcaaaagtgactctctttggtctgggaacaaccagcacagtcctcctgaagcgcttgctcagtcaatgagctactctttgcagaggatcagggaactaaggtatgcctggggaaaccccacccaaatgagccatgccagacagcccttgccatcagctctctaggcacagggtcagccattccagggccccaggctccaccatttctcctgactgctctgcaggaaggcctctcactcatttctgaaacaaaatgagagaccagacttcaagctctggccattaaaaatggccaggtcatcattttcatgttggggtaagctgccctaattatgttgattagaaggacagaccacaataagggtcattctttcatgccatcctttttcttcctccagccacaatctcacctcaccacttgggaacacatacaaccaaagctgggaggtaaaatctttaggactttggtcatgctgagccctctataacccaagtgctgccagacttctttgaaaacctagtgtcctcccaagtaatatacaatacagtacatttcatggcattccatcacttataataagaatggatgccaaagaacaaagccaaaattagctgacaatgttataaaacaaaagcaaagccaa

SEQ ID NO: 188472 - DNA, 1356 bp, Homo Sapiens
  misc_feature (81)..(105): n is a, c, g, or t
ttgggtttagagagctgattggaacacagaaaaccaggacaggatgttttcctccaagcgggtcataaggcttcagcttcnnnnnnnnnnnnnnnnnnnnnnnnncatggaatgaggggtatggggactgcctgtaatagcactgggattttgcctcccagccaaaatgctccagggtaggcagcaaagaagaaagagtgcgatatgagggtacagtgagtttggcagtccaaattctgttctctgcagcctgtttttgagtagttggtgaataaagtcacccgcctacttgtctaagcacatgtgggtgtgtaactcagttcctggttctcggttctaaaaacagacttccaactgggaaactttttgggggaaattaactggacacctatctcggaggtttattttcttgcaaccagtgaagtcgtcctcctcccttccctggataactcttcagtttgactgtcactgttctggtgtcaactccagcgtcggcacaggcagaaggacttcagctgctggtctcattggttccactgccattgatatgggggggtgcagaggagcactcattgtccatgatggagatccaggacagactgggggactccgggaagaggctttcttggggaagaggaccccaaaggaggtacttcctcctcactgatgccctcagggctgctgtgtgggtgtgttaagctgataaggttcagtttgcggcggaaactacctgctagtcttgtgtcaggggctgccagcctccttttgtttcacttttgcccccttcttgggaacatttgaccaaaaataatcctcatttcatcttgtgtacagtcctttgtgtaccccgcccaggttgagaggtgaatcagcgtaattctccgaagctctgctgggcagctcagccatgttacattgtctatgcagaataagcaggcctggtgtctgcaaatgtaccagtccttctcccgcatctcctgggtgcccccttggctttgcctctcctgtgtcctgtctttctgcgttttagaagtgagagcctctccttcaccttttgagcaactgagtcatctcaagtcctgagctctgctctgccgcctgctggtgccttgtaaaggtatactcgttacaggccctagaggttctaatggtccagggttaagtgagaggagactgtactttgtttcaaaggatccttcaccctgatctgcagtgaggtggatagatcacctggaagtccctcgtctgtggtcttggaggcttaaattgtaaaatacatcccttatggaatcctaaattcctctaggtgtttttggaagcgcatttgagccttgtgagctaaatggaatggattta

SEQ ID NO: 188473 - DNA, 1692 bp, Homo Sapiens
  misc_feature (1149)..(1199): n is a, c, g, or t
  misc_feature (1504)..(1527): n is a, c, g, or t
ttggcttggcgctacagcagcagctaaaagaactgacagccccggatgagaacatcccagcgaagatcctttcttataaccgtgccaatcgagctgttgcaattctttgtaaccatcagagggcaccaccaaaaacttttgagaagtctatgatgaacttgcaaactaagattgatgccaagaaggaacagctagcagatgcccggagagacctgaaaagtgctaaggctgatgccaaggtcatgaaggatgcaaagacgaagaaggtagtagagtcaaagaagaaggctgttcagagactggaggaacagttgatgaagctggaagttcaagccacagaccgagaggaaaataaacagattgccctgggaacctccaaactcaattatctggaccctaggatcacagtggcttggtgcaagaagtggggtgtcccaattgagaagatttacaacaaaacccagcgggagaagtttgcctgggccattgacatggctgatgaagactatgagttttagccagtctcaagaggcagagttctgtgaagaggaacagtgtggtttgggaaagatggataaactgagcctcacttgccctcgtgcctgggggagagaggcagcaagtcttaacaaaccaacatctttgcgaaaagataaacctggagatattataagggagagctgagccagttgtcctatggacaacttatttaaaaatatttcagatatcaaaattctagctgtatgatttgttttgaattttgtttttattttcaagagggcaagtggatgggaatttgtcagcgttctaccaggcaaattcactgtttcactgaaatgtttggattctcttagctactgtatgcaaagtccgattatattggtgcgtttttacagttagggttttgcaataacttctatattttaatagaaataaattcctaaactcccttccctctctcccatttcaggaatttaaaattaagtagaacaaaaaacccagcgcacctgttagagtcgtcactctctattgtcatggggatcaattttcattaaacttgaagcagtcgtggctttggcagtgttttggttcagacacctgttcacagaaaaagcatgatgggaaaatatttcctgacttgagtgttcnnnnnnnnnnnnnnnnnnnnnnnnnnnnnnnnnnnnnnnnnnnnnnnnnnncctttttcttgatcttaaagatcgtgtagattggggttggggagggatgaagggcgagtgaatctaaggataatgaaataatcagtgactgaaaccattttcccatcatcctttgttctgagcattcgctgtaccctttaagatatccatctttttctttttaaccctaatctttcacttgaaagattttattgtataaaaagtttcacaggtcaataaacttagaggaaaatgagtatttggtccaaaaaaaggaaaaataatcaagattttagggcttttattttttcttttgtaattgtgtnnnnnnnnnnnnnnnnnnnnnnnngcagaattttaatgtgaagacattttttgctataatcattagttttagaggcattgttagtttagtgtgtgtgcagagtccattttcccacatctttcctcaagtatcttctatttttatcatggaattcccttttaatcaactgtaggttatttaaaataaatt

SEQ ID NO: 188474 - DNA, 935 bp, Homo Sapiens
  misc_feature (735)..(785): n is a, c, g, or t
ttggctcagatctttaatttgaactggaaaaaattacagaagcagtagtaggtgatgtttacctgtttgttacagagagaagctgcatgaggccaataatgaactacagaagaagagagccattattgaagatctcgagccaagatttaacaacagctccttaaaaattgaagaattacaagaagctttacgaaagaaagaggaagaaatgaagcaaatggaagaacgatacaaaaaatacttagagaaagccaaaagtgtcatccgtactttagatcctaaacagaatcaaggagcagcaccagaaatacaagctcttaaaaatcagctccaggaacgagaccgactgttccactcattagagaaagaatatgagaaaacaaagagtcagagagagatggaagagaaatatattgttagtgcctggtacaatatgggaatgaccctgcataaaaaggcagctgaagatagactggcaagcacaggctcagggcagtcatttctggcgaggcagaggcaagcgaccagcagcagaagatcatacccaggccacgtgcagccggccacagcaaggtagagaagttgtgccgctcaatcacagacacctgcacccacaacatacttctgttacacacaagaatgttgcaggaaactcagccagcttattttttgtttctcttctatgtcaatacttagtgtttctcattttgaggactttttctctctcctgtatcnnnnnnnnnnnnnnnnnnnnnnnnnnnnnnnnnnnnnnnnnnnnnnnnnnnatgtgccaaaaatttgtacatgttcaattaaaaatgttgtataatagtgtaatacttttctttgtatgaaaatgtcctcttcttcaaaggtataactttgtaatgaattagattttctgccaataattgatatacaatttatattcttta

SEQ ID NO: 188475 - DNA, 1084 bp, Homo Sapiens
  misc_feature (641)..(651): n is a, c, g, or t
  misc_feature (658)..(669): n is a, c, g, or t
catgagggagaaaatgatcatatggccatgatcaactgattcctgtgtatcagggagaaaagggaccccaagccgtaggagaaagaaacaaagaaagagacaagtggacccgtgtgcctcagggaactgaggcgttggaataacgggcactacactttaattcatgaccattttttggttgaatttgccctaaacttggttctggacagtggctgtgaaggctgggagccataatatggcggttttacttcttacattgccaaaggggaagatgaagagctgctaacggtgagtccagaaagcaattctttggcattggtctacagagacagagagactctgaaatttgtcaagcatattaaccaccgaagcctggaacaaaagaaaaccttcccaaacagaacaggtttctgggacttttcattcatctattatgaatgacagcactgggcaaagctgaacaaaaatgtgacccttcgtaattactgggaagtctgaaagagctaagcatggagtcaaggagaactacatggtagcttgcctgacagtgttcttaaaactggttgtcttttactaggactcataatgattgtcctcaaccgagaccttgagcttgcagctacgtacttatctcttgattnnnnnnnnnnngttggcnnnnnnnnnnnnaacatttagtcctttttccatattggcttcttcagtgaatttttaagttcaatttgtttttattgaggtaaaatatttataacataaaactgaccagcttacccatttttaaatatgcaattcagtggattaagtacattctcattgttgtccagccatcaccatcatccatctccagaagttttccatcttcccaaattctgtgcccattgaacaataactccccacctccccttcccctagcaacagccatactttttgtctctatcatcaacttcactactcatatttctcatgtaagtggaatcatacagtatttgtccttttgtgactggtttcacttagcataaagtctttaagatgcatccatgtttccagtgtttcggtttttttagaaaaactcatacgtgattgc

SEQ ID NO: 188476 - DNA, 1272 bp, Homo Sapiens
aaacttcacagagtccttgggacgggaaatcatcactcatccagggacactggctatcttcaaagatgggtgcggcgactccacatcactgtgacttctttgctaagtgtttcggaaacagaacacgaataaaatactcatctcagaaccagagcactttttggtcttctgggacatgaataattcacatacccaagtggaggccaatcaatgatctgagaatgatcaacgcaccctggcttttgcaggtggtcctggcacgttccaagttccacagaagccctgacccttccccgatggctgggttttggctccgcagatgaatgccaccttcacaataacaccgtctcactgctggaacacacaccagattgcaccctacccactgctggtgacccagcagcccccacgggctgggccatcttcctcagcccttctgcccacaggaaaaccaatgggagaagaggcccttgtcctttggccttttcccccttgctaatgacaaaaataagtccgtgtcgggttatgacagcaagcagatggaggtcaccagattcactgaaatgaagctcttctaggaacacaaagccttgtttaattttttaaaaacagcaaaaagattatttaaaaaagatctttctcctagtcttctgtgagacaaagaaattataaagatggcagaaattattagcgacgttctacctctataattcacgttcaggactgaaaatcttccttctgcattcatttctgtcagcgttagactaagtgacatgcgggcgcctctatgtcagctctgcaaggactcgccaagcctgctcttggagaaatgaccatcggtcgttatacggttgtgggaaagatgtagccaacacgcctaatccagccgagcagtcggtttcgacggcttctgcagtaccttatggttctgccaatgctcccttgaggccagagggcgcgcggctcttcgctgctttcctgctggctgccaaggtgcatacacaccaaaagatgcgaggttcttcttccagccggcatggcggggacctccctcactggctgcagagcaatctcgctgctgaccccgaagactgacccttgtccagccagagttttcctgaccacctttcctgaggctgaggggaaagccaggggctccctcaggccctgcctgtggcttcttcggttctttttaaaacatgaatcacacaaagctctctatgtctgatggccattttaagattttaaaattgttttaacataaaaatatta

SEQ ID NO: 188477 - DNA, 1486 bp, Homo Sapiens
gccaactttgtacaaaaaagttggcaggccggtctcgcctctcggtgctcagcggcgcctggaccgacacggcccccgcgggtgttttccagacgtgttcgtacccggagcctctgcgtggaagagcgcgttcgtcgcgaccctgccgctgctgttggtcctcgcggcgctggcgctgggcgtcctccggaagcagcggagaagccgagaaaagctgaggaagcaggcggagaagagacaagagtggagagcagcccaaaaatatgcagtggatgtgacgctggacccggcctcggcgcaccccagcctggaggtgtcggaggatggcaagagcgtgtcttcccgcggggcgccgccaggcccggcgcctggccacccgcagcggttctcggagcagacgtgcgcgctgagcctggagcggttctccgccggccgccactactgggaggtgcacgtgggccgccgcagccgctggttcctgggcgcctgcctggccgcggtgccgcgcgcggggcctgcgcgcctgagccctgcggccggctactgggtgctggggctgtggaacggctgcgagtacttcgtcctggccccgcaccgcgtcgcgctcaccctgcgcgtgcccccgcggcgcctgggcgtcttcctggactacgagggccggagagctgtccttcttcaacgtgtccgacggctcccacatcttcaccttccacgacaccttctcgggcgcgctctgtgcgtacttcaggcccagggcccacgacggcggcgaacatccggatcccctgaccatctgcccgctgccggttagagggacgcgcgtccccgaagagaacgacagtgacacctggctacagccctatgagcccgcggatcccgccctggactggtggtgaggcgccctcgtggccgcgggactggccccgggggggccccctggatcccaggccagcgctttgctctcctgctccgtctgaagggagcaggtgcaccagccaaaatgtcagcgagggggacaaagagagggacctttgcctacgtagatgtgtatgtgtagtgcgattttcttcaaggaaaggagacaagtccaaagctcgtttgtggattgtgggactgagcaaaggagtacaaatatatccacgtcgctcagagctggggtgctcacggtgggtggtgggaaagaagccagcatggaagaaagaagggagaaaactttggtgactgccttagagggatcagttaatttgtatagttttatattttttgtatatgtttgctagctctaaaaaggtcgagatgcaataacacttcgtaagcaacgagttcacctaagtaaggctcagatcctagttttaaaaaccatttcccattaaaatgaagttggaggaacagctgcttctggagccggggcaaaaatttcaaggtgagcctggagcattgtgtgtggtgaagtaaaataaaggctcaaaacgtgacggcaacccgg

SEQ ID NO: 188478 - DNA, 1353 bp, Homo Sapiens
ttggggtcactgtagcgggacttcttttggttttctttctctttggggcacctctggactcactccccagcatgaaggcgctgagcccggtgcgcggctgctacgaggcggtgtgctgcctgtcggaacgcagtctggccatcgcccggggccgagggaagggcccggcagctgaggagccgctgagcttgctggacgacatgaaccactgctactcccgcctgcgggaactggtacccggagtcccgagaggcactcagcttagccaggtggaaatcctacagcgcgtcatcgactacattctcgacctgcaggtagtcctggccgagccagcccctggaccccctgatggcccccaccttcccatccaggtaagcctcgaagtcgggacagggctgaacacccaggcaaggatgctgcgggaccctcggagctcccgattgcctcgcgtaactcttccctcttttcctctaatcagacagccgagctcgctccggaacttgtcatctccaacgacaaaaggagcttttgccactgactcggccgtgtcctgacacctccaggtgagtatctcctctcttggagagggaggtttaaacggcaagtcctggagttggcagacgttttgaaaaattgccactcactcggtttagggaaactgaggccagagagggacaagtgacttgcccatggttgcatcaaatgaatggcagagtcagtttccatgtgatgtgcatttaagccttaaatgcgcctgggccctgccctcccgcagtggccgagggtctggcaaagtagacatgggtccgactaaatacaagtctttctgttccatgttgtatagggagctgtcttcggcagccccctcccagctagtgtcaattccaagtaggaggggtagcgcaagctccgcctgtggtctttggcgccaactgggtgggggcagcgtggggcgcggagttatcagctggaggtacagaccaagtttcctccctggcgccggccagtctgcggacggcccccgcctcggcacgctcggcggaaactgactgctccttggtcttctttcctcccccgcccagaacgcaggtgctggcgcccgttctgcctgggaccccgggaacctctcctgccggaagccggacggcagggatgggccccaacttcgccctgcccacttgacttcaccaaatcccttcctggagactaaacctggtgctcagagcgaaggactgtgaacttgtggcctgaagagccagagctagctctggccaccagctgggcgacgtctccctgcttcccaccccaccccccaagttctaaagtctccttccaaaccgtggaggtgtggaa

SEQ ID NO: 188479 - DNA, 996 bp, Homo Sapiens
ttggataaaattggactcagagtttccattgacactgatatggttgaatttcaggcaggatctgaaggccaacttctgcctcagcattatctaaatgatcttgatagtgctctgatacctgtgatccatggtgggacctccaactctagtttaccattagaaatagaattagtgtttttcattatagaacatcttttttagtgaaagaatgtgccatattacatattgcaacctaatttgttaaaactaactccagcactaaagctgaaatgccacaaacactaaaagtataaatatgtctgatttttgaaacacataagctttgctctttaggcaggaatgatcttttcaaatcattagcacaatatttaaatatctaaaaatttaagagatccatactttctgtagctttacaattaatttaagtactaaaaagacaaggatttcttttaagaaatttatagcatttactgtgttatttaaatgctaagccaaagtatctgcacttaggtatacctctttatgccaataatgattttaatgaaggctcttttcagatgtaaccttatgaaggaaatatctgctttgtgtatatgccagttagaatactggtttctaaagtctgtcaaattgtatttcagtggcacaaaaaccagttttgaggtcttagacttataattctttgaataaaactgataacttatttgtataattggagtggagacctacctccataattagataaactctttttggattataatcagaattttgccttttttcttctcaaattattacatatgtatgtattatatatccacatatatagttttccctgattaaatggatattaaaataattgcgggtgcttcagactttttgcttctatatttaagtatattgtttttatagcaagaacatattctgaatgttttataatctttaataatctatatgtagtaatatttttgtatcacatgcattattttttcctcc

SEQ ID NO: 188480 - DNA, 1947 bp, Homo Sapiens
actttgtacaaaaaagttggctctgatacctgtgatccatggtgggacctccaactctagtttaccattagaaatagaattagtgtttttcattatagaacatcttttttagtgaaagaatgtgccatattacatattgcaacctaatttgttaaaactaactccagcactaaagctgaaatgccacaaacactaaaagtataaatatgtctgatttttgaaacacataagctttgctctttaggcaggaatgatcttttcaaatcattagcacaatatttaaatatctaaaaatttaagagatccatactttctgtagctttacaattaatttaagtactaaaaagacaaggatttcttttaagaaatttatagcatttactgtgttatttaaatgctaagccaaagtatctgcacttaggtatacctctttatgccaataatgattttaatgaaggctcttttcagatgtaaccttatgaaggaaatatctgctttgtgtatatgccagttagaatactggtttctaaagtctgtcaaattgtatttcagtggcacaaaaaccagttttgaggtcttagacttataattctttgaataaaactgataacttatttgtataattggagtggagacctacctccataattagataaactctttttggattataatcagaattttgccttttttcttctcaaattattacatatgtatgtattatatatccacatatatagttttccctgattaaatggatattaaaataattgcgggtgcttcaggactttttgcttctatatttaagtatattgtttttatagcaagaacatattctgaatgttttataaatctttaataatttatatgtaggtaatatttttgtatcacaatgcattatttttttcctcctttccttccaaactataccactgtatttaccacttctaagagtgactgacgacgggccagatgacccttgaagtagtcattatgtagcaataaatgaagcctgaaacaggtttttttacttccactttaatccttagaaatttcttggcaacttcgcatattttcattgacaccggtgtataagtataaatttaaatgaactaattacttttgcatattttaaattctttatatggtagttattttttataacaggatattaacataagttaaatcctatgtatttgaaattgttacagagctttcctctttacttcaaacagcaaaaaagtggggggcatattgtagtcctgtcatttaagttatgtaaaaaatttaatcattattttgatgctttaaacattctcatgtgtaatatatgtttttgtatcaaaaacactcatatatttcaagaaaaagaaattatgttaaatagccctgttttaagaaaaatatttatgaagcatctcaacttgaagatcaagtcaaagttataactcaggatctgaggtctcaagctaggagagactgagaattttaatcagtttgggcatatagtttggactgaatcacatctgtagtacttagccaaagacaatttggaggagaatatcagccttctggaagtagctacttcctgaacaatgtaaagtgtcgcagatattcaataaaatggcaacctgttataatttgtgaaatttattgaaatggtgtaagatgaaaacaattgcatatcaaacccaatttatgttttctaaatatagtgtatgtattctgccatgtaagtaattgaacagtcttaaaataaccaaatggtagagggctgttccatgatgggacagctttggatttgttttcataaaatctctacattcaataaaaattggaattatgtgcctgaagtttggaggcacattttgaagtattctttgtagacatatagtatgtttctgaatgtgtttgtgacttatttggtcccaacttttttgtacaaag

SEQ ID NO: 188481 - DNA, 1590 bp, Homo Sapiens
  misc_feature (415)..(458): n is a, c, g, or t
ttggcgtgaatttgtccgtctccgacttctggagagtgatgatgcgggtgtgctggttggtgagacaggacagccggcaccagcgaatcagacttccacatttggaagcagttgtgattgggcgtggcccagagaccaagatcactgataagaaatgttctcgacagcaagttgaaagcagagtgtaacaagggatatgtcaaggtaaagcaggtaggagtcaatcccaccagcattgactcagtcgtaattgggaaggaccaagaggtgaagctgcagcctggccaggttctccacatggtgaatgaactttatccatatattgtagagtttgaggaagaggcaaagaaccctggcctggaaacacacaggaagagaaagagatcaggcaacagtgattctatagaaagggatnnnnnnnnnnnnnnnnnnnnnnnnnnnnnnnnnnnnnnnnnnnncaactctggccaatgctctgtgcccctaaagaagggaaaagatgcacctatcaaaaaggaatccctgggccactggagtcaaggcttgaagatttctatgcaggaccccaaaatgcaggtttacaaagatgagcaggtggtggtgataaaggataaatacccaaaggcccgttaccattggctggtcttaccgtggacctccatttccagtctgaaggctgtggccagggaacaccttgaactccttaagcatatgcacactgtgggggaaaaggtgattgtagattttgctgggtccagcaaactccgcttccgattgggctaccacgccattccgagtatgagccatgtacatcttcatgtgatcagccaggattttgattctccttgccttaaaaacaaaaaacattggaattctttcaatacagaatacttcctagaatcacaagctgtgatcgagatggtacaagaggctggtagagtaactgtccgagatgggatgcctgagctcttgaagctgccccttcgttgtcatgagtgccagcagctgctgccttccattcctcagctgaaagaacatctcaggaagcactggacacagtgattctgcagagcctgagctgctgctgtggtgtggcccactggagcaaactgctggcacctattctgggttgcttgtgaacttctactcatttcctaaattaaaacatgcagctttttcacaaatttattctattattgagtggccacaatgtagagtggctcaaagtacttcaggattaggaatttgggtttgtcatagatgtattctctggtgagggtggctgggatatacctgacccaccatcttcagaaggacccatgtcaggtctgaccattgggagcaaagccatgttcacactgacctaatgcagagtatggaagcattgggctggttatacatttctgtttcttagatttatcctccgcctctgtagcatggacaacctttaatcagagcatctagagtggcctcttgtttatcctgaagatactgatgggtcttgttttctgttagtctgttttgtaatattcttttcccttccttcatggggaggcttagtttgtccagtccttccatgcccttctatcc

SEQ ID NO: 188482 - DNA, 1000 bp, Homo Sapiens
ttgggctgatgcttctagtaccacctgggcactccctgccgcccccagaacccctcagacttcctcttgatccagcacctaaatggttaatctccagcacagctattggcatcagttctgtggttaaatattttggtatcactccctgttcaggctccagtgatacccgggtatcccttccctctcttcccatcttctccttgggagtaagtggctttgaagttaggaggacaaggggttcactctggttccctcactagaaagacatcatcttgaattcaccttctcccctctcccaggagactggtctctgtgctgacttccacccgagtggggcagttgtggccgtaggactgaacacggggaggtggttggttttggacacagagaccagagagatcgtgtctgatgtcattgatggcaatgagcagctctcagtggtccggtacagcccagatgggttgtacctggccattggttcccatgacaacgtgatctacatctatagtgtttccagtgatggtgccaaatccagccgctttggccgctgtatgggtcactccagcttcatcactcatcttgactggtccaaggatgggaatttcatcatgtccaattctggggactatgagattctttactgggacgtggctggaggctgcaagcagctgaagaatcgctatgagagccgagaccgggaatgggctacctacacctgtgtgctgggctttcacgtctacggcgtctggccggacggctccgatgggaccgacatcaactccctgtgccgctcccacaacgagcgcgtggtggcggtggccgacgacttctgcaaagtgcatctcttccagtacccgtgcgctcgtgccaaggcgccgagccgcatgtacgggggccacggcagccacgtgaccagcgtccgattcacgcacgacgactcgcacctcgtctcgctgggcggcaaggacgccagcatcttccagtggcgagtgctgggcgc

SEQ ID NO: 188483 - DNA, 2083 bp, Homo Sapiens
cttttttataatagccaactttgtacaaaaaagttggatcttctctgtggcggagacagccagaacttaaggcatacagaacgatggagtatatggcagaatccaccgaccgcagccctggacacatcttgtgctgtgagtgtggtgttccgataagtccaaatcctgccaatatttgtgtggcctgtttgcgaagtaaagtggacatcagccaaggtattccgaaacaagtctcgatttcgttctgcaaacaatgtcaaaggtattttcaaccaccaggaacttggatacagtgtgctttagaatccagggaacttcttgctttgtgcttgaaaaaaatcaaagcccctctgagtaaggtacggcttgtagatgcaggctttgtttggactgagcctcattctaagagacttaaagttaaactgactattcagaaagaggtgatgaatggtgctatccttcaacaagtgtttgtggtggattatgttgttcagtcccaaatgtgtggagattgccatagagtagaagctaaggatttctggaaggctgtgattcaagtgaggcaaaagactttgcataaaaaaactttctactatctggaacagttaattctgaaatatggaatgcatcagaatacacttcgtatcaaagagattcatgatggtctggatttttattattcctcaaaacaacatgctcagaagatggtcgaatttcttcagtgtacagttccctgtagatacaaagcatcacaaagactgatctctcaagatatccatagtaacacatacaattacaaaagcactttttctgtggaaattgttccaatatgcaaggataatgttgtctgtctgtctccaaaactggcacaaagcctgggaaatatgaaccagatttgtgtgtgtattcgagtaaccagtgccattcacctcattgatccaaacaccctacaagtggcagatattgatgggagcactttctggagtcaccctttcaatagtttatgtcatcccaaacagctagaggagtttattgtgatggaatgcagcatagtccaagatataaaacgtgctgcaggtgctggaatgatatcaaaaaagcataccctcggggaagtctgggtacagaagacatctgaaatgaatacagataaacagtatttttgtcgtactcatttgggacatcttctaaatcccggagacctggtgttagggtttgatttggccaactgtaacttaaatgatgagcatgtcaacaaaatgaactcagatagagttccagatgtggtattaatcaagaagagctatgaccggaccaaacgtcagcgtcgtagaaactggaaattgaaagagcttgcaagagagagagaaaacatggatacagatgatgaaaggcaataccaagattttcttgaagatcttgaagaagatgaggcaattcgaaaaaatgtcaacatttacagagattcagccatccctgtggaaagtgacaccgatgatgaaggagcacctcgaattagtctggctgagatgcttgaagaccttcatatttcccaagatgccactggtgaagaaggtgcatcaatgctgacataatgagatgttgtagactgtttccatacatgggcttaagaagttggacagagttaccttaagtgtctctactatctttgcctccagatttcaagaggagaaatttagttttaaacctgaataaacatgtttgttttcagtgctcactcaaaccactaaaacagatggatagctttgaggttttagataaggaaagattatggagaatgtagttgttattgatttttggcaattttacatttggaattttatcactgtgcttttttatatgaggcactgtagtattttcacatagtatagtactctggatgtaaaagctcaaaaattgtgattccttgaacgttcactaaatcttcaagcaaaaacacatttttacattatttttacgttgattattttagtgaaagaccatatgaagaagcatttttaatattaacttgttacatactttgatccactttacatcatttttatgttgttgaggtagggaa

SEQ ID NO: 188484 - DNA, 1686 bp, Homo Sapiens
  misc_feature (699)..(708): n is a, c, g, or t
  misc_feature (1139)..(1153): n is a, c, g, or t
acaaaaaagttggcccggcgcgggtggccgaggcgtagcgctgcgacccccgcacccctgcgaacatggcgctgcgagtggtgcggagcgtgcgggccctgctctgcaccctgcgcgcggtcccgtcacccgccgcgccctgcccgccgaggccctggcagctgggggtgggcgccgtccgtacgctgcgcactggacccgctctgctctcggtgcgtaaattcacagagaaacacgaatgggtaacaacagaaaatggcattggaacagtgggaatcagcaattttgcacaggaagcgttgggagatgttgtttattgtagtctccctgaagttgggacaaaattgaacaaacaagatgagtttggtgctttggaaagtgtgaaagctgctagtgaactctattctcctttatcaggagaagtaactgaaattaatgaagctcttgcagaaaatccaggacttgtaaacaaatcttgttatgaagatggttggctgatcaagatgacactgagtaacccttcagaactagatgaacttatgagtgaagaagcatatgagaaatacataaaatctattgaggagtgaaaatggaactcctaaataaactagtatgaaataacgcaagccagcagagttgtcttaaattagtggtggatagaagacttagaatagaaacttttagtattaccgatggggnnnnnnnnnnctactgttaacactgctaatgaaagaaaatgccctttaactttctaatgattatagataaacataatatgtgtctttttcacaacatcctatgatttttagactaggctctagtattcatgaaattatccatgaaattatccatggtaaaaattagttacaaaaattacataattcaaagataatgttgttattcttaagccttatataatattgtaacttgtgtatgtccatacctggacttgggatgaaatacttaatgatctttccattggaaataactgggagtgaagaagtttttgttgcttgtacagtgtcagatgaagaacaacactatcttaattttgcaatacactgcatttgctggtgctgtttttatatagtgaagcaacagctgtacagcaaaataataaaatactcacttcttcgttnnnnnnnnnnnnnnntttacttcttacaattctggaggccaggaagaccatgatcaggtgccagcatctgggaagggccttcttgctgtcctcccatggcagaagatggaagggcaagggagagctaacatgctcccgcaaaccctttttataatggcatcaatcaaatatgaggccagagtccttgtgacctaatcatctcccagaaggctccgcctcccaaccctgttgcattgggattaagtttccaacacatgaattgtggagacaacacattcaaaacatagcattccacaccttgggctccccagattcatgtcctcacatgcaaaataaattcattccatcccaatagcccctaaaaagtcttaacttgttccagcatcaactttaaagtcaaagtccaaagtctcatctaaatcagatatgagtgagactcaaggcatgattcatcatgagacaaaggatgtacatttgcaatgtttgtcatgtcagacaaacaaaatatgtaaatatccatcatatggaactgctgaaaaagttttttt

SEQ ID NO: 188485 - DNA, 1319 bp, Homo Sapiens
ggcgtctgggctttcggcagctgtgggcacgtccaccccagctggagaacctggcctcgtctccagcccgaacgctgaggcaccgatcccggctccgtcgccgcccgcgaggcccgccttggccacgggctctggaggccagtgcctcccgctcgccgcccgctgcgctcctcacccctgcctgcaccatcctccctcctgagagctcattcactccgccccgcccgcctcgcctagtctggtctcgccccatgcccttgactcccctggatgctgtactgtctgccaagccagccccaggggctgagcggtgagggcatacagcgtcaccaagtccactgtgggccctctccgcaccagaccctgggccgcagtgcctcgtgggaccggcgcccgcaggccgagcccctgcagcctccttgctgcgcaatgtcccggggcccccctcccgtggccgcttcgccctcctggtgacgtcctgctgcaactccccgagcactgcctgtcttcccgctctccagccctcgaggctccggcataggcctgagaaagccgtgccggagctgcccctgtgcctgctactaaatgaattgcggtgggtgaggtggcagctggggacccctctgtcctgtgtcccctgccatgtccctgtctgacccaggcctggggtaccaccccacgtgctggaccctacgctggccacccctgtgctccctccctgccctcttgctctttctgcctggaacgggcccataaccccccagccttgcgcagtctcggctccccccgagaagatgtcacctttgctaactctcctgcccccatcctgcccctctgctgggagggtgtctgcttctccccgccagccctcgatcccctaaacctccttctttcagaaggctggggaagcgaggcctggggagggaagggactcacctgcccggcagatggggtcctcacctgcccgctgctgccagctacacctccgttgcccaggccctgggatcaaaccctgcccaccagctcccctcgtccaaccagctgccacgtcctgtaaccaaaagtgaccgggatgaatgcctggctcccccttctccagccctagctcaggcccatcgtccccagctgatgtcgccctgtctgcacgatgcctgggcgcctactccacactcctcactggcctcaggccccaccagccctgcctcgagctagcccctccacccgtcatcactcctgccagactccagatgtccaaggtgctccttggctcccacaagctctcctccagcaccccatcttcccctggttgcccctcggtt

SEQ ID NO: 188486 - DNA, 1492 bp, Homo Sapiens
gccaactttgtacaaaaaagttggcccgttccaggcagaaagagcaagagggcagggagggagcacaggggtggccagcgtagggtccagcacgtggggtggtaccccaggcctgggtcagacagggacaaggcagggggcacaggacagaggggtccccagctgccacctcacccaccgcaattcatttagtagcaggcacaggggcagctccggcacggctttctcaggcctatgccggagcctcgagggctggagagcgggaagacaggcagtgctcggggagttgcagcaggacatcaccaggagggcgaagcggccacgggaggggggccccgggacattgcgcagcaaggaggctgcaggggctcggcctgcgggcgccggtcccacgaggcactgcggcccagggtctggtgcggagagggcccacagtggacttggtgacgctgtatgccctcaccgctcagcccctggggctggcttggcagacagtacagcatccaggggagtcaagggcatggggcgagaccagactaggcgaggcgggcggggcggagtgaatgagctctcaggagggaggatggtgcaggcaggggtgaggagcgcagcgggcggcgagcgggaggcactggcctccagagcccgtggccaaggcgggcctcgcgggcggcgacggagccgggatcggtgcctcagcgttcgggctggagacgaggccaggtctccagctggggtggacgtgcccaccagctgccgaaggccaagacgccaggtccggtggacgtgacaagcaggacatgacatggtccggtgtgacggcgaggacagaggaggcgcgtccggccttcctgaacaccttaggctggtggggctgcggcaagaagcgggtctgtttctttacttcctccacggagtcggcacactatggctgccctctgggctcccagaacccacaacatgaaagaaatggtgctacccagctcaagcctgggcctttgaatccggacacaaaaccctctagcttggaaatgaatatgctgcactttacaaccactgcactacctgactcaggaatcggctctggaaggtgaagctagaggaaccagacctcatcagcccaacatcaaagacaccatcggaacagcagcgcccgcagcacccaccccgcaccggcgactccatcttcatggccaccccctgcggcggacggttgaccaccagccaccacatcatcccagagctgagctcctccagcgggatgacgccgtccccaccacctccctcttcttctttttcatccttctgtctctttgtttctgagcttttctgtctttccttttttctgagagattcaaagcctccacgactctgtttcccccgtcccttctgaatttaatttgcactaagtcatttgcactggttggagttgtgaagacggccttgagtctcagtaggagtgtgcgtgagtgtgagccaccttggcaagtgc

SEQ ID NO: 188487 - DNA, 954 bp, Homo Sapiens
ttggcttcaggtgaccacggattcgccatcgtgagttccagacagggtcagatgtgttactgggctggagtgtggtggcacaatcacgctcactgcatccttgacctcctgggctcaagtgatcttcccacctcagcctcccaagtagctgggactacaggattttcaaaatggctgcagctcctcaagcaccggggcggggatctctccgtaagacgagacctctggttgtgaagacgtcgttgaacaacccatacatcatccgctggagcgctctggagagcgaggatatgcacttcatcctacagacgcttgaggacaggcttaaagctattggacttcagaagattgaagataagaagaaaaagaacaaaacaccttttctgaaaaaagaaagcagagagaaatgcagcattgctgttgatattagtgagaatctgaaggagaagaaaacagatgctaagcagcaagtgtcagggtggacgcctgcacacgtcaggaagcagcttgccattggcgttaacgaagttaccagagccctggaaaggagggaactgctgttagttctggtgtgtaaatcagtcaagcctgccatgatcacctcacacttgattcagttaagcctaagcagaagtgtccctgcctgtcaggtcccccggctcagtgagagaatcgcccccgtcattggcttaaaatgtgttctagccttggcgttcaaaaagaacaccactgactttgtggacgaagtaagagccatcatccccagagtccccagtttaagtgtaccatggcttcaagacagaattgaagattctgggggaaaatttaaagactgaaccctctggaaagccaagacagagagcttttggacactttcatttgaagatctgtcaaaccctaagagaaagcttgctgacggtcgggcaggcttctgtaacattacaaccccttaaa

SEQ ID NO: 188488 - DNA, 980 bp, Homo Sapiens
acaaaaaagttggcctgatccagcaggtccttgccgagggggtcagcagcccagcccctacccaagacacccacatggaaacggacctgctcagcctccggtccagcactcctggggagaagacagagacgctggcgctgcagaggctgggggagctggggccacccagcccaggcctgaactgggaacagccccaggcagcgaggctgtccaggacaggactggtggagggtctgcggaagcgcctgctgccggcctggtgtgcctccctggcccacgggctcagcctgctcctggtggctgtggctgtggctgtctcagggtgggtgggtgcgagcttccccccgggcgtgagtgttgcgtggctcctgtccagcagcgccagcttcctggcctcattcctcggctgggagccactgaaggtcttgctggaagccctgtacttctcactggtggccaagcggctgcacccggatgaagatgacaccctggtagagagcccggctgtgacgcctgtgagcgcacgtgtgccccgcgtacggccaccccacggctttgcactcttcctggccaaggaagaagcccgcaaggtcaagaggctacatggcatgctgcggagcctcctggtgtacatgctttttctgctggtgaccctgctggccagctatggggatgcctcatgccatgggcacgcctaccgtctgcaaagcgccatcaagcaggagctgcacagccgggccttcctggccatcacgcggtctgaggagctctggccatggatggcccacgtgctgctgccctacgtccacgggaaccagtccagcccagagctggggcccccacggctgcggcaggtgcggctgcaggaagcactctacccagaccctcccggccccagggttcacacgtgctcggccgcagaggctttcagcaccagcgattacgacgttggctgggagagtcctcacaatggctcgggg

SEQ ID NO: 188489 - DNA, 1059 bp, Homo Sapiens
ttggaatccttctcagcatcaggtgagctggggtgagaggagggggctctgaagctcacccttgcagctgggcccaccctatgcctcctgtacctctagatgaagacctgatccagcaggtccttgccgagggggtcagcagcccagcccctacccaagacacccacatggaaacggacctgctcagcagcctgtccagcactcctggggagaagacagagacgctggcgctgcagaggctgggggagctggggccacccagcccaggcctgaactgggaacagccccaggcagcgaggctgtccaggacaggactggtggagggtctgcggaagcgcctgctgccggcctggtgtgcctccctggcccacgggctcagcctgctcctggtggctgtggctgtggctgtctcagggtgggtgggtgcgagcttccccccgggcgtgagtgttgcgtggctcctgtccagcagcgccagcttcctggcctcattcctcggctgggagccactgaaggtcttgctggaagccctgtacttctcactggtggccaagcggctgcacccggatgaagatgacaccctggtagagagcccggctgtgacgcctgtgagcgcacgtgtgccccgcgtacggccaccccacggctttgcactcttcctggccaaggaagaagcccgcaaggtcaagaggctacatggcatgctgcgggtctgaggagctctggccatggatggcccacgtgctgctgccctacgtccacgggaaccagtccagcccagagctggggcccccacagctgcacaactggctggacaacaggagccgcgctgtgttcctggagctcacgcgctacagcccggccgtggggctgcacgccgccgtcacgctgcgcctcgagttcccggcggccggccgcgccctggccgccctcagcgtccgcccctttgcgctgcgccgcctcagcgcgggcctctcgctgcctctgctcacctcggtgtgcctgctgctgttcgccgtgcacttcgccgtggccgaggcccgtacttggcacagggaa

SEQ ID NO: 188490 - DNA, 1317 bp, Homo Sapiens
taatttatagacatttaggggaatatggcaaagggaggaaatctgggtttcccactgaaaggctgagcaaactaccccaaggcccttcagtgccagaagggcagggagatgtgtggctcaggtataagccacagtattaagaatggtgggtaggactcaggtcccagctgctggagtgatgggattttctgatttccatctcttcgtgatagccagtcgagttctcttatatctcttccacgccatgcgcaaatatcatgacaaggcctggctcttgcaccatgtcatcccccatgtgctggttctcacaggccatcacgacaacagcctgcttgccagggatgcgcttggccacgtagttctcatagtagcgtcggttcatctgtctagtctctagtgtggccagaccctggggccagctacgctcgtgggcattttcaatcagctcgttgacaatagaagcaggacagccactctccaccagggagcgcttgattacagcctggagcacagcatcaggagttgagatcatccctccccagcgggtcactcttgctggctgaagggagttcacccactctaggatctcgttgtattcaattgtctcctccaggttctgaaggttggggttgacactgcggattgcacgcatgtatgcctttagcagctggatgtctcgcttctgctccgccagctggtgtttgtgttcagctgacgtcttctccagctctgcgatgcgtgtctgctgctgctgtaccactgagcgcaggtgcttaatgcagttatggttgggcagctcatctttgggcatctccaggccacagccctgttcacaggtcacaggccgcttcgggttgtgctcacagtcgctgaggtgagacatgaggttgtcaagccggacaacggcactacagccgaacacagcgttgtcacaggcaatctgcagctttgacaacatgttccgcatgatccgaggtactgggcgcagatgggcgaccgtcacaacactacggtccactggacatgtctgttgctgagagaaccactgggtgatgcaggcgttgcagaaagcatgttcacaatgaggtgcctgtactggctcctccaagactccactgcaaatagggcagataagatcttcgtcaacatccccctggaaacgggttacatcataccccatgtctcatcactgaaacccaggtccgccctggaagcggcctggagtctccgcaacctgacccagtcggagctgaggccgcagcggccacagtactgccctggtgccgggtcccagcctctcccgggaagggaagccaa

SEQ ID NO: 188491 - DNA, 863 bp, Homo Sapiens
ttggctttcccttcccttcccgggagaggctgggacccggcaccagggcagtactgtggccgctgcggcctcagctccgactgggtcaggttgcggagactccaggccgcttccagggcgagtactcctgattgtgacatcacattcatcccctgggcgatggagcttgtcactgggaaggaatactcagtcggagaatagccaacaagatgggttactgggagaatctcttcagtggcactgagtggaggcatcagggggttggagccttgtgaacagggaacctgccccccaacacttggaaggacctgggtttcagtgatgagacatggggtatgatgtaacccgtttccagggggatgttgacgaagatcttatctgccctatttgcagtggagtcttggaggagccagtacaggcacctcattgtgaacatgctttctgcaacgcctgcatcacccagtggttctctcagcaacagacatgtccagtggaccgtagtgttgtgacggtcgcccatctgcgcccagtacctcggatcatgcggaacatgttgtcaaagctgcagattgcctgtgacaacgctgtgttcggctgtagtgccgttgtccggcttgacaacctcatgtctcacctcagcgactgtgagcacaacccgaagcggcctgtgacctgtgaacagggctgtggcctggagatgcccaaagatgagctgcccaaccataactgcattaagcacctgcgctcagtggtacagcagcagcagaaccgcatcgcagagctggagaagacgtcagctgaacacaaacaccagctggcggagcagaagcgagacatccagctgctaaagcatacatgcgtgc

SEQ ID NO: 188492 - DNA, 1297 bp, Homo Sapiens
  misc_feature (98)..(121): n is a, c, g, or t
  misc_feature (299)..(327): n is a, c, g, or t
ttggaccagtttttctcacaacactgaatttggtagcttttcccgaaaaaatcttcacagtaattttttgtctgtatatatttgagggcctttttttnnnnnnnnnnnnnnnnnnnnnnnntataattgtttgatttttgagattaaaacaaacaaaaagagaggcattttcaaaatttcagaactttcaggagggcaagagaatatcaaacaaagatttctggaagtattttgccaaccttctggttgagctgcaagaaaatatttatggtgagaacttttctgtttcccgttattgnnnnnnnnnnnnnnnnnnnnnnnnnnnnnactatgctttggtctgtaaaaatatgcaactgaactacattcagaaggaaatattgtctacatagaatattatatgaagttggtaggtaattctgatgaggaaaaaaaatctttgcaattctttaagccatattgttgtttttctgtgttgttttccctggatgaaaatatcagtattaagtagacagcatattattcaagtgtttagacttattaatatgttcttgtcctgtatttatacatatgtgtattttggaaagtattgccttttttaagggaagctataattcgatacatagtgaaaaagggaatggtgacccctttgtgcctcttccactgaggataacaaacagcattgtaatccattctcttgcaccttcttcttcttatcttgttattacggttttattaattttgtagagggacagggagtgggcaaggggaagaagcagcttatttgactaaccagcccctctgtggtccaccagcgtcttggcttggtgggagggctctcaatcagcagggccccaggagggaagaagaagtggggcaaagcctggcctcgccgctcgggagctttgccatctgagccacgcctcctccaggccatgctccttgaacttggaaatgtcaaccggagcccttacaccagccctccagcatctaatagacttgaatctactctaaacgaatatttaatccaacctcactacattgtagctcagtccaacgactaaccctgaaatgggggtgttccagccttcagcgagatggccaagcggtcccctgggggctgtggcagcggacttatccttctctgttgccaaccttgccgtccgacctcctccgcccccatgcggtgaccccgtccgtgtctgtgtctgtccatacgtgtgagtccagctaaaaaagaaaaaacagaacccgtgggcccagctcggaagtgcgtggagaaagctccgacgtctcc

SEQ ID NO: 188493 - DNA, 1650 bp, Homo Sapiens
  misc_feature (1139)..(1153): n is a, c, g, or t
  misc_feature (1224)..(1275): n is a, c, g, or t
ttgggcggatcctggagctcagccgcgcgcgccctgcccgatcctgtgccgacccaccgcactatgcgcgccgtgccgctgcccgccccgctcctgccgctgctgctgctcgcgctcctggccgctcccgccgcccgcgccagcagagccgagtccgtctccgcgccgcggcccgaacccgagcgcgagtcgcggccaccgcccggcccggggcccgggaacaccacccggtttgggtctggggcggcgggcggcagcggcagctccaacagcagcggcgacgccttggtgacccgcatttccatcctcctccgcgacctacccaccctcaaggcagccgtgatcgtggcgttcgcctttaccaccctcctcatcgcctgcctgctgctgcgcgtcttcaggtcgggaaagaggttaaagaagacacgcaagtatgatatcatcaccactccagcagagcgagtggaaatggcgccactaaatgaagaggatgatgaagatgaggactccacagtattcgacatcaaatacaggtaaaacctgtttcccagcctggtggcatcctgtggaaagttggtcagctgcaacctggggtgtgaaggactggacctggaagccctcttgcgtcggaggtgttgaaaccaaaacgaacgttatgtataaaaccccagctccatcgtgcgtgtcaggcatctgctcagactgtcactggcaagctcgtttccacgtcaccacaatggagttgcttctgccaccctttgggcatccctttaaagtgccccctactttctactccccatgtaagaggctttgtgccttgctaaggagcaaagggtagaaacatgttgattttaaagaagtttttttaagacaattgttgacaatagtaaaagagatcaggaggatcaagaatctaaaacaagcctgaaggatgtccaactgtgtatttagaatttccgacattcttctctactggatctacacattggaccccatctgatcctttgctgcttttttggcttggtcaggtcctggcctcattttggcgttacctgtgtcagagttcaaggtggatgtgcttagagctggtcagccccttccagacctggacacgtctgtggctccttttctttcttccnnnnnnnnnnnnnnnaaaaaaaaaaaaggttcagcagaaatcagcgtggctagttcacaaagaatttccagtatcagggaaaaacnnnnnnnnnnnnnnnnnnnnnnnnnnnnnnnnnnnnnnnnnnnnnnnnnnnnatacctataaaacagtttctccttctctgaagggaaaggaaagtgctaggcagcctgtgattagcaacattctttgtgcttttttgttgttcctctgctctgtcacagttctacgttgtttgccttagaaatgtaatttttaaaaaccattttaaaaatgaacggtgatttggctggctggaaaaaatcacactgtcaggggactatatttgaagtcagtctagacggggctggactaggaacccacctggacccaggagaccccacaggacccagatgtctctgccggaaggcagaggttcagtgagagtggctcacctctgagctggtgaagtgaggacttgcctgtgacatgacccagggatctgctgctgg

SEQ ID NO: 188494 - DNA, 1320 bp, Homo Sapiens
ttggcctggagcatgtttgctgtgggctggatggagctgaaggacgcagtgcgggcccggggcctcctggacaggagctttgccaacatggctgaacccttcaaggtgtggacggagaatgcagacgggtcaggcgctgtgaacttcctgacaggcatggggggcttcctgcaggcggtggtcttcgggtgcacggggttcagggtcacccgagcgggtgtgacctttgaccctgtgtgtctgtcggggatctccagagtgagcgtctccggcatcttctaccaggggaacaagctcaacttctctttttccgaggactccgtgaccgtggaggtcacagctcgagcagggccctgggctcctcacctggaggctgagctgtggccatcccagtcccggctctccctgttgccaggacacaaggtctcctttccccgctcggctggccggatacaaatgtcacccccgaagctgcctggaagttccagctccgagttccctgggaggactttttcagatgttagggacccgctccagagccccctctgggtcaccctgggttcctccagccccaccgagtcactcactgtggaccctgcctctgaataatcaggaacggtggcttcagagacgtctcttgggccttccctctggccacgtctgcacccacccctcctgggcaccctcctagcctgccatccctcacctgcagccaggctctcagggaaggtccatgctgcttggcctgagttcaaggctttctgcctgtagcctggactcccgtggacccccgtgggcaggtggcttccccgtggcatctccacaccgcctctgcctgcccctgtggactgatgctatcgcgcacggtcccacgaccccaccccgagctcctgaagccggggtctgagcctgcatcacctctggcctctcatcccccactctcctgagagcagtggtcacagcggccggccgctctgctgagaaggcagagaggcaggctcaggcctcagcgtggacagcagggataaggggcacgaaggacggggactcggccccttcagaattcctcaggactctcaggtgcagctttgccaaaaaggaacttttcatgtcatgcagttgaggggacttagtctcaatcccaggctcctcttgactctgggcagctttaatcaagttgggcagcctctgctacagcgtggggtgggatggctctcttccctcagccacgccgcttgtgaggacagaggtgggggagtgggaagtgagaagtcaccagataacaggagagggatttgagggcgagaacccagcgctctc

SEQ ID NO: 188495 - DNA, 1523 bp, Homo Sapiens
ttttctcacttcaaagagagctgtcattaggcctttctcaatgcgctgggtgaagttgcagaagccagtatccacactcggaggcacaaactgaagtactgtttgaacttggaacctggactctggcacaaggaaagaaggtttcacagacaggattaaaggagtctggtcacggacaagcttactgtttataagcacatttatgacggatattgccgtgtaaacgaaaggaccggatgttaccagaaaagtgaagtcagtaaatagttcgtaaaccttcagttccactgcacggttgaagtgaatcctcagtacttctttgattgctgtaatgatgtactcctgcacagctcttctggccagcacagttgtgatcagataggcatcggggactgtgatatcacaaacatatggcggcttggcagtagccagtgttggtgtgtcgactgttgcttcgagagtgaaggcagtcacgggacgcagggatggcaggggaggagcagcactactctctggggggctctgacttgcggcgtcacccatcagggtggagtcgaggggaccaccagtggcagcaccggtgctggttgtgctcacttccgtggaggtgttcagtggcacctctgtgggtgtgagtgatgggcccacgacggtcagctctgtgggcagagggaagggggttgcttcagaaacaaacgaggatcctgatggcaggtacgcgtcagtgatcaacaccgtaccagtgggaatggctttggagaaagaggccaggacagacacgtgaccgtctagagcactgatttggtcgtcaggaggtgtcagagttgagaacaaagaagactcagttaaaatgggcgttgtgtggacagtggtcaatggtgatgttgcttgaatcccggcagtcaaaatgtcaaaagactcagagccggggggcaccagtgcagtgactgcggattcatgggaaatgagtgaagactcaagataggaggtagtttcaatgaaagctgaggtaaaatgagcttctgaatccgtcagtgaaaccgtagacgcttcaacaaactcgagagaatcagaagggaagcttgaccatggtgacacctcagaacggctaggtagcaacatgatggtgtttaaaggcagctcggaacttggctggagctgcgaaaactcaagatttgtggaactgggaagagacagctgagatgactgcagatcactagagtcaaacaatgtaaatgtctcaaccaagggagaaaaagactgagatgtgaagggggacaagtcactcggcatcagagacagagacgcaggtgcttccgaaggcgaagagatggagccgctgagttccagcgggggtgttgagaaaaagctggatgcaaaatccaaagcacctctgggtttatgctcagaaaaactggaacgttcttggtcagagaaaagtgaagactccactgaaggaaccagactataaggcgtaaaaacactcgggtctctgacggcaagcgacggtgtgtttttgccaa

SEQ ID NO: 188496 - DNA, 3087 bp, Homo Sapiens
  misc_feature (2601)..(2626): n is a, c, g, or t
  misc_feature (2751)..(2813): n is a, c, g, or t
ttggcgattactacagacctccaatatcaccaaactagagcaaaagaagaatcctcaggctgtgctggatgtcctaaagttctacgactccaacacagtgaagcagaaatatctgagctttactcctcctgagaaagatggctttccttctggaacaccagcactgaatgccaagggaacagaagcacccgcagtagtgacagaggaggaggatgatgatgaagagactgctcctcccgttattgccccgcgaccggatcatacgaaatcaatttacacacggtctgtaattgaccctgttcctgcaccagttggtgattcacatgttgatggtgctgccaagtctttagacaaacagaaaaagaagactaagatgacagatgaagagattatggagaaattaagaactatcgtgagcataggtgaccctaagaaaaaatatacaagatatgaaaaaattggacaaggggcttctggtacagttttcactgctactgacgttgcactgggacaggaggttgctatcaaacaaattaatttacagaaacagccaaagaaggaactgatcattaacgagattctggtgatgaaagaattgaaaaatcccaacatcgttaactttttggacagttacctggtaggagatgaattgtttgtggtcatggaataccttgctggggggtcactcactgatgtggtaacagaaacgtgcatggatgaagcacagattgctgctgtatgcagagagtgtttacaggcattggagtttttacatgctaatcaagtgatccacagagacatcaaaagtgacaatgtacttttgggaatggaaggatctgttaagctcactgactttggtttctgtgcccagatcacccctgagcagagcaaacgcagtaccatggtcggaacgccatactggatggcaccagaggtggttacacggaaagcttatggccctaaagtcgacatatggtctctgggtatcatggctattgagatggtagaaggagagcctccatacctcaatgaaaatcccttgagggccttgtacctaatagcaactaatggaaccccagaacttcagaatccagagaaactttccccaatatttcgggatttcttaaatcgatgtttggaaatggatgtggaaaaaaggggttcagccaaagaattattacagcatcctttcctgaaactggccaaaccgttatctagcttgacaccactgatcatggcagctaaagaagcaatgaagagtaaccgttaacatcactgctgtggcctcatactcttttttccattttctacaagaagccttttagtatatgaaaattattactctttttggggtttaaagaaatggtctgcataacctgaatgaaagaagcaaatgactattctctgaagacaaccaagagaaaattgcaaaaagacaagtatgacttttatatgaaccccttctttagggtccagaaggaattgtggactgaatcactagccttaggtctttcagcaaacagcctatcagggccatttatcatgtgtgagatttgcattttactttgctgactttgttgtaatagatcccattcattgtcccctttggggtatttccaatacttgaatggcagattggagtttttcagagtatgtgtttcatctgctagtctttctctccttcatagcttttcttttcctggacttgctccttttgagttgcttttgcgtttctcatgcctaggcaagtgtaatagaaattatgtagctccttatgttggcaaaggagctctatatagtttcactttgtataaaagttaggaccagctgttgttacatgtaatattttagttcagaacttgacctgaaggaagggaagaaaagtatgtgatttttaccttttttaacaaatgtgaaaaagtcagttttagaaatttcgtggtagtaagttcggcatttgttacatgtatagagagaagactaataatctctatttataactaaatcattgagatagaaaaagattcccattgactgtagacttcttcccattttgtcttcccttctgcctgtttccccttcaggcttggctctaggaaccaaagtgatttgttgttgttccaacctgggctttgtgactttggttagtgccactaccttcttccctcctttcccccttcaatttggaaataaatttctgtatatgttgcaattttaggtttaggtttgttctttttctttttcattaatcctctctcacctcacagataccccctcccatggcaaataatataataaccagtgaattttcaggaatttaaaaattagcttttttccacttaaaggagaaaaatatttgggactagcagcagaggcagtaagagatgtgaaccttggtgagctctgatacagtgagaagagattatactcatgaaagagaatgttagtgttacagagaagcagccgatagcaaatcgactgtagagacttggcggcggtggcattgccccaggtcgtcagcagtgtggtattatctatgagaacttgagcgacagagtatttcttgatgaatttatagatcatttgagatgttgagttacnnnnnnnnnnnnnnnnnnnnnnnnnncaaataagtagagactattgtaaaaaacgagaaaggaaaatgaaatgtgcgtgttgatagcaataatttgtttcttttaaagattctaaaaggtctgagacctgtagcattaattatttgagtgnnnnnnnnnnnnnnnnnnnnnnnnnnnnnnnnnnnnnnnnnnnnnnnnnnnnnnnnnnnnnnnattcattgttttgcttttggagtaggtgttgttcaagtatctgtggtttggttctggcattttgttcccaccatccccttcccccattaacttcccccctgcttgccatcctgcagtagtataaatcatgaaataaaaaataattttgctgttgtagtatacattggagaaactggcaggttttatttccattattttaattccactatatctatgataagatgcatttataaggagagaagtgactgttttttattgaataaggcaagatttt

SEQ ID NO: 188497 - DNA, 2863 bp, Homo Sapiens
  misc_feature (458)..(483): n is a, c, g, or t
  misc_feature (607)..(666): n is a, c, g, or t
  misc_feature (1605)..(1625): n is a, c, g, or t
  misc_feature (1648)..(1889): n is a, c, g, or t
  misc_feature (2038)..(2091): n is a, c, g, or t
  misc_feature (2439)..(2451): n is a, c, g, or t
  misc_feature (2700)..(2708): n is a, c, g, or t
ctttgtacaaaaaagttggccctcctttccccttttcaatttggaaataaatttctgtatatgttgcaattttaggtttaggtttgttctttttctttttcattaatcctctctcacctcacagataccccctcccatggcaaataatataataaccagtgaattttcaggaatttaaaaattagcttttttccacttaaaggagaaaaatatttgggactagcagcagaggcagtaagagatgtgaaccttggtgagctctgatacagtgagaagagattatactcatgaaagagaatgttagtgttacagagaagcagccgatagcaaatcgactgtagagacttggcggcggtggcattgccccaggtcgtcagcagtgtggtattatctatgagaacttgagcgacagagtatttcttgatgaatttatagatcatttgagatgttgagttacnnnnnnnnnnnnnnnnnnnnnnnnnncaaataagtagagactattgtaaaaaacgagaaaggaaaatgaaatgtgcgtgttgatagcaataatttgtttcttttaaagattctaaaggtctgagacctgtagcattaattatttgagtgnnnnnnnnnnnnnnnnnnnnnnnnnnnnnnnnnnnnnnnnnnnnnnnnnnnnnnnnnnnntttattcattgttttgcttttggagtaggtgttgttcaagtatctgtggtttggttctggcattttgttcccaccatccccttcccccattaacttcccccctgcttgccatcctgcagtagtataaatcatgaataaaaaataattttgctgttgtagtatacattggagaaactggcaggttttatttccattattttatttccactatatctatgataagatgcaattataaggagagaagtgactgttttttattgataaggcaagattttcagaaaaatgagtaaaataattaatgaaacatatttagagcacttaatggtctctgttttcaatataattcttgatttcatttttctctggaatatattggccttctacagctattactgaattatagaaactggtttatttctggcagaaagctgcagtgccacctgagttccaaattttaccattctttgtaaacagttggatggattatgataaagaagatgctaccaatgaaatagaaaaccaacgagatgagaagactgtgatcctcatgtactcagaggcacttccctcctaagtcaaagaccatcctcactgactatgtgccaacgcctcgtttcaggcttgtgactcaacaaagggcttttccattgatagaagcagtttgggatttgtagttgcgacttcttcgatagttacctgcacgtccattgctggcaactgacttgtcattaaaacctggctctttggttaagggagctacgctgtggtttattcttaagttacgtggataaactaacctctaacagaaatatactttggttaattttgaaatgtgtcatttttaaacaatcttaaaagtaatacagaattgtgatttattaattttaaaacattcagaacttgttgaaagaaaaattatatctgaatcaagattcatgnnnnnnnnnnnnnnnnnnnnngatacagagtctcactctgtcannnnnnnnnnnnnnnnnnnnnnnnnnnnnnnnnnnnnnnnnnnnnnnnnnnnnnnnnnnnnnnnnnnnnnnnnnnnnnnnnnnnnnnnnnnnnnnnnnnnnnnnnnnnnnnnnnnnnnnnnnnnnnnnnnnnnnnnnnnnnnnnnnnnnnnnnnnnnnnnnnnnnnnnnnnnnnnnnnnnnnnnnnnnnnnnnnnnnnnnnnnnnnnnnnnnnnnnnnnnnnnnnnnnnnnnnnnnnnnnnntgagccactgcacctggcctcatgttttttaaataattgccttttatatttaccctttttgtcatcactttagaatgaaaattcccatttaaatctgaaagttaccttaatagtcctcttgtgttattaggacagtattattatagtannnnnnnnnnnnnnnnnnnnnnnnnnnnnnnnnnnnnnnnnnnnnnnnnnnnnngctgcttttaggggacaattaaaactgggaaactatgaaacatggaacattttatcctacctgaaagtaaacgagtaattgtgaagcataagacactgaggctaatacaactctgtcttcatgtgttgactgcctggcacatagtattcattctcttccctttaacatagaagtgtccagctgcgtacagtctagtaaccagcaactgtaaacgaacctgtgcctctaacaagcgattctaaaccacctatgagtatttcttttagggctcacttaaatacatgtttgtatatactgtattctagccagaataattttagatctgatcaggtagtagctaaaattagnnnnnnnnnnnnntagatgcttaaagaatttgcatccatttttgagtctaaatcttttaaaatatactgagatccacatctagtgaaatgtcagtgtcaaaatattatagattatagctaaaatccagattaatactcatttggggttttttatagtggaacttcatagtaatacaaaaagcagattgtcttcctgtctccgctgctcccacagtaggtattgaaactggtaaaatcagttttttgatagtgtgtgtatatnnnnnnnnntagatacacacattcttttttctcaatcaacacattgattgaacactctagcaaagatgctgtggtggatgaggttggagttccaaggaagaagcaagcgctggcctggccgtgacagaaccgaagtctttcccattcacttctcagaaagctgc

SEQ ID NO: 188498 - DNA, 900 bp, Homo Sapiens
  misc_feature (358)..(372): n is a, c, g, or t
  misc_feature (399)..(531): n is a, c, g, or t
actttgtacaaaaaagttggtgccaaatgctggcaaaaagaagtgctttttggatatggcagcacttgtaaaaataaagcagtaagcaaaatccttttaaacacagaaatcctgagttcttctcattggtggactcaagcaattctgtagcaaataaatcctttgaaagagctccaaattggtggcattatcctttcaaaatctcagggatttgggatgaagtgaagaggtcaaattactttttagaagaagggaatctaaaaaccatctctcctaaacaaatggtggactggctttacttaagggatatttgtctttataggagtacataaatttatcttaatgatatttaagtagnnnnnnnnnnnnnnngggacgaagttttgctcttgttgcccnnnnnnnnnnnnnnnnnnnnnnnnnnnnnnnnnnnnnnnnnnnnnnnnnnnnnnnnnnnnnnnnnnnnnnnnnnnnnnnnnnnnnnnnnnnnnnnnnnnnnnnnnnnnnnnnnnnnnnnnnnnnnnnnnnnnntcagagcacaagaagtaccagtccaccaactcacattttctatattaataattcttaactaaaagaagttccatattcgacagcattttagttttttaatagtacttattagcatcaaccatcttgataatcaccaagggaaaaattaaaaatacctagactgcaataaacctttaaattggattttcagtgagaatttagaagcaatcactacctttctcgtttcatttgtgtaaccatgcagcataggcactgtgttacatcatctttacgctttggtatttgaacttattacagaattttttctctaaattggatgtttctttatatgaccttggaaactgaagtgatcttagcattaaacaaaaa

SEQ ID NO: 188499 - DNA, 1161 bp, Homo Sapiens
  misc_feature (117)..(127): n is a, c, g, or t
ttggcagagttactgtggatttttaagagactcagttaaagaatttaggaatttctgattcatttaaaggatttacaaattcatcaacccctgaaaactaaagcaaattgaacaggnnnnnnnnnnngaagatgggttttttaagtccaatatatgttattttcttcttttttggagtcaaagtacattgccaatatgaaacttatcagtgggatgaagactatgaccaagagccagatgatgattaccaaacaggattcccatttcgtcaaaatgtagactacggagttccttttcatcagtatactttaggctgtgtcagtgaatgcttctgtccaactaactttccatcatcaatgtactgtgataatcgcaaactcaagactatcccaaatattccgatgcacattcagcaactctaccttcagttcaatgaaattgaggctgtgactgcaaattcattcatcaatgcaactcatcttaaagaaattaacctcagccacaacaaaattaaatctcaaaagattgattatggtgtgtttgctaagcttccaaatctactacaacttcatctagagcataataatttagaagaatttccatttcctcttcctaaatctctggaaagactccttcttggttacaatgaaatctccaaactgcagacaaatgctatggatgggctagtaaacttgaccatgcttgatctctgttataattatcttcatgattctctgctaaaagacaaaatctttgccaaaatggaaaaactaatgcagctcaacctctgcagtaacagattagaatcaatgcctcctggtttgccttcttcacttatgtatctgtctttagaaaataattcaatttcttctatacccgaaaaatacttcgacaaacttccaaaacttcatactctaagaatgtcacacaacaaactacaagacatcccatataatatttttaatcttcccaacattgtagaactcagtgttggacacaacaaattgaagcaagcattctatattccaagaaatttggaacacctatacctacaaaataatgaaatagaaaagatgaatcttacagtgatgtgtccttctattgacccactacattaccaccatttaacatacattcgtgtggaccaaaataaactaaaaa

SEQ ID NO: 188500 - DNA, 2011 bp, Homo Sapiens
ttgggtcctatttcaaaacaaggagcaggacctggaggtgattctccataatggtgcctgcagccctggagcaaggcagggctgcatgaaatccatcgaggtgaagcacagtgccctctccgtcgagctgcacagtgacatggaggtgacggtgaatgggagactggtctctgttccttacgtgggtgggaacatggaagtcaacgtttatggtgccatcatgcatgaggtcagattcaatcaccttggtcacatcttcacattcactccacaaaacaatgagttccaactgcagctcagccccaagacttttgcttcaaagacgtatggtctgtgtgggatctgtgatgagaacggagccaatgacttcatgctgagggatggcacagtcaccacagactggaaaacacttgttcaggaatggactgtgcagcggccagggcagacgtgccagcccatcctggaggagcagtgtcttgtccccgacagctcccactgccaggtcctcctcttaccactgtttgctgaatgccacaaggtcctggctccagccacattctatgccatgtgccagcaggacagttgccaccaagagcaagtgtgtgaggtgatcgcctcttatgcccacctctgtcggaccaacggggtctgcgttgactggaggacacctgatttctgtgctatgtcatgcccaccatctctggtctacaaccactgtgagcatggctgtccccggcactgtgatggcaacgtgagctcctgtggggaccatccctccgaaggctgtttctgccctccagataaagtcatgttggaaggcagctgtgtccctgaagaggcctgcactcagtgcattggtgaggatggagtccagcaccagttcctggaagcctgggtcccggaccaccagccctgtcagatctgcacgtgcctcagcgggcggaaggtcaactgcacaacgcagccctgccccacggccaaagctcccacgtgtggcctgtgtgaagtagcccgcctccgccagaatgcagaccagtgctgccccgagtatgagtgtgtgtgtgacccagtgagctgtgacctgcccccagtgcctcactgtgaacgtggcctccagcccacactgaccaaccctggcgagtgcagacccaacttcacctgcgcctgcaggaaggaggagtgcaaaagagtgtccccaccctcctgccccccgcaccgtttgcccacccttcggaagacccagtgctgtgatgagtatgagtgtgcctgcaactgtgtcaactccacagtgagctgtccccttgggtacttggcctcaaccgccaccaatgactgtggctgtaccacaaccacctgccttcccgacaaggtgtgtgtccaccgaagcaccatctaccctgtgggccagttctgggaggagggctgcgatgtgtgcacctgcaccgacatggaggatgccgtgatgggcctccgcgtggcccagtgctcccagaagccctgtgaggacagctgtcggtcgggcttcacttacgttctgcatgaaggcgagtgctgtggaaggtgcctgccatctgcctgtgaggtggtgactggctcaccgcggggggactcccagtcttcctggaagagtgtcggctcccagtgggcctccccggagaacccctgcctcatcaatgagtgtgtccgagtgaaggaggaggtctttatacaacaaaggaacgtctcctgcccccagctggaggtccctgtctgcccctcgggctttcagctgagctgtaagacctcagcgtgctgcccaagctgtcgctgtgagcgcatggaggcctgcatgctcaatggcactgtcattgggcccgggaagactgtgatgatcgatgtgtgcacgacctgccgctgcatggtgcaggtgggggtcatctctggattcaagctggagtgcaagaagaccacctgcaacccctgccccctgggttacaaggaagaaaataacacaagtgaatgttgtgggaga

SEQ ID NO: 188501 - DNA, 1544 bp, Homo Sapiens
ttggctcaggctgcttatgcaaagctccgcggagcagcttctgagccccgagtgttggaaggccactctgagagccctgggctgctgcgcccccagctgccagcagggggcagcgtccaccgagggcgccgtgcttcccagctcttctgatgctctcttgtcagacaagcaggtaatggagactatacagtggctttcagactttttttataagcttcggttatccaagatggactttaaaagctttggtttattctcaaaatggagtccttatatggctgatgtgaagacattcttgggctaccttgtgaaaaggctgattgacttagaaatgacctgtttggcccaagacccaactgccagcaggaaaacagtgctgaaatccctacattcagtaatcattcagctctttaagccatggatcctggttttagaggacaacgaaagcagccaacagcggcattacccctggctagagagtgatactgtggtggcctcaagcattgtgcagctgttcactgactgtattgactcactgcatgagagttttaaagataagctgttgccaggtgatgcaggagccctttggttgcacctgatgcattattgtgaagcatgtacagcacccaaaatgccagagttcattctgtacgctttccatagcacgtaccggaaactgccatggaaggacctgcaccctgaccagatgctcatggaggccttcttcaaagtggaacgaggaagccccaagagctgtttcttatttttggggtctgtactctgtgaagtcaactgggttagtgtgctctctgatgcctggaattccagtccccacccagaaacccgcagcatgattgtctgcctccttttcatgatgattttattggcaaaggaagttcaactggtagaccaaacagattcacctttacttagtctccttggacagacaagctcactttcatggcatcttgtggatattgtgtcgtaccagagtgtgctaagttatttcagcagccattacccgccgtccatcatcctggcaaaagaatcttatgctgaattaatcatgaagctcctaaaagtgtctgcgggcctttctattcctactgacagccagaagcatcttgatgcagttccaaaatgccaagcttttactcatcagatggttcaattcctcagcaccctggaacaaaatggaaaaatcaccttagcagtcctagaacaggaaatgtctaagctcttagacgatatcattgtctttaacccgcccgacatggacagccagacccgccacatggccctcagcagcctctttatggaagtcctgatgatgatgaacaacgcgactattccaacagcagagttccttcggggcagtatccggacctggattggccaaaaaatgcatgggctggtggtgctgccccttttaacagcagcctgccagagcctggtgtccgtccgccacatggctgagactacagaagcctgcatcactgcctacttcaaagaaagccctctcaatcagaaattcacgatgggga

SEQ ID NO: 188502 - DNA, 865 bp, Homo Sapiens
ttggctcccttcctccgccacagatgagcgccttgacctggatgacgggcgctgggaggacgtccacgttatcaccggagccctgaagctcttctttcgggagctgcccgagcccctcttccccttctcgcacttccgccagttcattgcggccatcaagttgcaggaccaggcccggcgcagccgctgtgtgcgtgacttggtgcgctcgctgcccgctcccaaccacgacactctgcggatgctcttccagcacctctgccgggtgatcgagcacggcgagcagaaccgcatgtcggtgcagagcgtggccattgtgttcgggcccacgctgctgcggcccgaggtggaagagaccagcatgcccatgaccatggtgttccagaaccaggtggtggagctcatcctgcagcagtgcgcggacatcttcccgccgcactgactgctggcctgtgactggggcggcggccgcggtcctgccacacaagctgggcggcggaggccacgcagccgggccttcttctctctgggaccctccgccagcgcatagccgcaggccggtgtgacttctgcaccctcggttctgagggtacggtgacccctagtgggcagtttgcaaaatgtgattccttcttcccaactccccatccccccttcccttcccgtcacgtcctgtttgggggttaattcggttttttctctgttgcatcgcgcctactgtgcgtgtgcgatagcgtgtgtgggggtgagagtttgttttctggaatggtaggtgctgggaggaggagtttgatggagggcttcctggctgcttctggccctcacctcgtggaggccttcacagagaccctgtgggccctgggcc

SEQ ID NO: 188503 - DNA, 1054 bp, Homo Sapiens
ttggctttcctccagtggagtgggacttctctggctctgccctaggttggaaagagttggattggaccctacttgccttcccgggcaaggataggacctttcacgcaagtgccatgtttctctaaaattgtggaatctatgtgtgtttgtctggagatggccagttctttctacctcagagtgagtgagtgagtatgtgtgcacacacgtgtgcatgttcctgtgcgctgatgtttacgcccaagcatttctgaacaaatgaaactcttctccatttaaaagaggcactttactttggacttgccactctgaaaaccttccctgcgttttggttcttgacccgggttgtcctgtttgtatagtcccccctctgtggacgtgctttagtagctcctcttacctagagggcttttacagagaattagagcaacaccaaaaggattgcctcttttccttccttcccattccaaaattcagagatggctttggggcaagtgctacctgtggaataaacctgttttccaggtgtctcttctcccaagcacaagaagtcctggagtctttggaaggtagtctgaatagaagggttttcaggtgcaggcatctgaaagctgtgggtatgtgtataaatgatcaggtctgtgaggctaacacgggcaagagggaaagaaaggctaaccatccaaacagggatacaggggaggcggtggggggtggtggggggagcgggtgctcacaagcacagagctgcctgttgtgaatgtccctgctgcaaagttggtgggtgagagaatgggacttcctctttgagagtctggggagagaaaaggtggccaggatcctaggactgaatgactcgattttacctatttgagctgcagtcctgtttgcgctccttgaattggttaggaagctgcttccttttccctcctgcttcccttcagtctcttcaggaccacaggatggatatgcagacatgtggggtcattgggaagggagtgcgcttcttttctctctcttagaaaaggggtcaagggttggctttggaattggg

SEQ ID NO: 188504 - DNA, 1403 bp, Homo Sapiens
ttggctcggctcttcaccaaggttcagcagatccgccgaacccagtaccagggcactatctggttcaccgtgtacaagggcgccgaggtggcgcacttcatgaacgccctgcgctacgatgccatggcactgggaaatcatgaatttgataatggtgtggaaggactgatcgagccactcctcaaagaggccaaatttccaattctgagtgcaaacattaaagcaaaggggccactagcatctcaaatatcaggactttatttgccatataaagttcttcctgttggtgatgaagttgtgggaatcgttggatacacttccaaagaaaccccttttctctcaaatccagggacaaatttagtgtttgaagatgaaatcactgcattacaacctgaagtagataagttaaaaactctaaatgtgaacaaaattattgcactgggacattcgggttttgaaatggataaactcatcgctcagaaagtgaggggtgtggacgtcgtggtggggacactccaacacatttctttacacaggcaatccaccttccaaagaggtgcctgctgggaagtacccattcatagtcacttctgatgatgggcggaaggttcctgtagtccaggcctatgcttttggcaaatacctaggctatctgaagatcgagtttgatgaaagaggaaacgtcatctcttcccatggaaatcccattcttctaaacagcagcattcctgaagatccaagcataaaagcagacattaacaaatggaggataaaattggataattattctacccaggaattagggaaaacaattgtctatctggatggctcctctcaatcatgccgctttagagaatgcaacatgggcaacctgatttgtgatgcaatgattaacaacaacctgagacacacggatgaaatgttctggaaccacgtatccatgtgcattttaaatggaggtggtatccggtcgcccattgatgaacgcaacaatggcacaattacctgggagaacctggctgctgtattgccctttggaggcacatttgacctagtccagttaaaaggttccaccctgaagaaggcctttgagcatagcgtgcaccgctacggccagtccactggagagttcctgcaggtgggcggaatccatgtggtgtatgatctttcccgaaaacctggagacagagtagtcaaattagatgttctttgcaccaagtgtcgagtgcccagttatgaccctctcaaaatggacgaggtatataaagtgatcctcccaaacttcctggccaatggtggagatgggttccagatgataaagatgaattattaagacatgactctggtgaccaagatatcaacgtggtttctacatatatctccaaaatgaaagtaatttatcc

SEQ ID NO: 188505 - DNA, 1368 bp, Homo Sapiens
aactttgtacaaaaaagttggggcgtggttcaggcgggtgtcttcggccgggcttgggaacataaaagtttgtttcaccacgtaagccggacctcgcactccggtcccggtctcgtcgccaagatggtgaagcccaagtacaaaggacggagcaccatcaacccgtccaaggccagcacaaacccagatcgagtgcagggagcaggaggccaaaacatgagggaccgggccaccatccggcgcctgaatatgtataggcaaaaggagcgcaggaacagtcgtggtaaaataattaaacccctgcaatatcaatcaacggtggcttctggcacagtggcaagagtagagccaaatattaaatggtttggaaacacacgtgtgattaagcagtcatcattacaaaaatttcaagaggaaatggatacagttatgaaggatccatacaaagttgtcatgaagcaaagcaagttaccaatgtctcttctccatgatcgaatccggcctcataacttgaaggtgcacattcttgatactgaaagttttgaaactacatttggccctaagtcacagaggaaacgaccaaacttatttgcaagtgatatgcagtctcttatcgaaaatgctgaaatgtccactgagagctatgaccagggcaaggatcgtgatttggtaactgaagacactggtgtgagaaatgaagctcaagaagagatctataaaaagggacagtccaaaagaatatggggtgagctctacaaggtgatagattcatcagatgttgtagttcaagttcttgatgctagagatccaatgggtactcgttcccctcacattgaaacttacctgaagaaggaaaaaccttggaaacacctcatttttgtacttaacaaatgtgaccttgttccaacctgggcaacaaaacggtgggttgctgtcctctcccaggattatccaacacttgctttccatgcaagccttactaacccgtttggcaagggagcattcattcagcttctgcggcagtttggaaagttgcacactgacaagaaacagatcagtgttgggttcattggctatccaaatgttggcaagagctctgtgataaatacattgcgttctaagaaagtttgcaacgtggctcccattgcaggtgaaacaaaggtctggcagtatattactttgatgcgtcggatattcctgattgactgtccaggtgtggtttacccctctgaggactccgagacagacattgtgctaaaaggagttgttcaagtaaaaaaattaagagtcctgaagaccacattggtgctgtacttgaacgagcaaagccagaatatatcagcaaaacatacagattgattcttggga

SEQ ID NO: 188506 - DNA, 695 bp, Homo Sapiens
  misc_feature (333)..(371): n is a, c, g, or t
ttggctcagtggactgcctgctcccacagcctgggctgacgtcagaggccgaggccaggaactgagtgaggcccctggtcctgggtctcaggatgggtcctgggggcctcgtgttcatcaagacacccctctgcccagctcaccacatcttcatcaccagcaaacgccaggacttggctcccccatcctcagaactcacaagccattgctccccagctggggaacctcaacctcccccctgcctcggttggtgacagagggggtgggacaggggcggggggttccccctgtacataccctgccataccaaccccaggtattaattctcgctgnnnnnnnnnnnnnnnnnnnnnnnnnnnnnnnnnnnnnnnaataagaattttcattttaagcacatttatactgaaggaatttgtgctgtgtattggggggagctggatccagagctggagggggtgggtccgggggagggagtggctcggaaggggcccccactctcctttcatgtccctgtgccccccagttctcctcctcagccttttcctcctcagttttctctttaaaactgtgaagtactaactttccaaggcctgccttcccctccctcccactggagaagccgccaacccctttctccctctgcctgaccactgggtgtggacggtgtggggcagccctgaaaggacaggctcctg

SEQ ID NO: 188507 - DNA, 2099 bp, Homo Sapiens
ttggattacaacggtgatggcgggcaagcggtccggctggagccgggcggctctcctccagctccttctcggcgtgaacctggtggtgatgccgcccacccgggcccggagtctgcgcttcgttaccttgctgtaccgccatggagaccgttcaccagtgaagacatatcccaaggacccctatcaggaagaagaatggccccaggggtttggtcagttaaccaaggaggggatgctacagcactgggaactgggccaggccctgcggcagcgctatcacggcttcctaaacacctcttatcaccggcaagaggtttatgtgcgaagcacagactttgaccggactctcatgagtgctgaggccaacctggctggactcttccctcccaacgggatgcagcgcttcaacccgaacatctcgtggcagcctattcctgtgcacactgtgcccatcactgaggacaggctgctgaagttcccgttgggcccatgtccccgttatgagcagctgcagaacgagacccggcagacaccagagtatcagaatgagagttctcggaatgcacaatttctggacatggtggccaacgagacagggcttacagacctgacactggagaccgtctggaatgtctatgacacactcttctgtgagcaaacgcacgggctgcgcctgccgccctgggcctcaccccaaaccatgcagcgtctcagccggctaaaggacttcagcttccgcttcctcttcggaatctaccagcaggcggagaaggcccggcttcaggggggagtcctgctggctcagataaggaagaacctgaccctaatggcgaccacctcccagctccccaagctgctggtttactctgcgcacgacactaccctggttgccctgcaaatggcactggatgtctacaatggtgaacaagccccctacgcctcctgccacatatttgaactgtaccaggaagattctgggaatttctcagtggagatgtactttcggaacgagagtgacaaggccccctggccgctcagcctgcctggctgccctcaccgctgcccactgcaggacttccttcgcctcacagagcccgtcgtgcccaaggattggcagcaggagtgccagctggcaagcggtcctgcagacacagaggtgattgtggccttggctgtatgtggctccatcctcttcctcctcatagtgctgctcctcaccgtcctcttccggatgcaggcccagcctcctggctaccgccacgtcgcagatggggaggaccacgcctgacaaccactcagcccccttccctccacctcctaggggaggtgggctgggccctcgctcctgactgttgctgctccccagcccatggacaggagatcctgggttgggcctccctctgatgaccccagccagatgagcgagtggggctcagcgtggcccatggtgcctgtcactcagcattcccatgcctgatgtttaccaagtgctgtgttggactggctttctccaaacaggatttgcctcctccacgctccctacacacctgagatgtaaactggcagtcagtgttcactcaggacctaggattagaaaatggcagagttggtgctggatccaccttgcacttctatcaagccctgttctttttcctccagcctgaagtcttcggcaaatagctcagagggacacggtcttgcctctcagtgcttattttagtgggaaaaacagctaataccaggggtacaaacattggctcccaaggaactggatcacccaacagccagccagccacatttccctgtgtctggctagagccaccattagactcagacagaatgcttcaggaatcgttgtcaccccttcaactggagcaggacggaaggttgtctgtacttgggagggagtggggagtggtgggaagggagttgcttgtcacacgaatcaggaaactgctctccctcagctgggctggggtctccagggacctgagctacatgcaggttgtgagctggaaaagaaagttctagactgtggcccagaatagggctggggcagctcccagagaatgaatagtgctgtttcctattggactgat

SEQ ID NO: 188508 - DNA, 1312 bp, Homo Sapiens
ttggccagctacgaggaggagcactttgtggccaacatgctcaacaagatcttcggtgaatcagaacccgagatccacgagcagcactggttctggatcggcctgaaccgtcgggatcccagagggggtcagagttggcgctggagcgacggcgtagggttctcttaccacaatttcgaccggagccggcacgacgacgacgacatccgaggctgtgcggtgctggacctggcctccctgcagtgggtggccatgcagtgcgacacacagctggactggatctgcaagatccccagaggtacggacgtgcgggagcccgacgacagccctcaaggccgacgggaatggctgcgcttccaggaggccgagtacaagttctttgagcaccactccacgtgggcgcaggcgcagcgcatctgcacgtggttccaggccgagctgacctccgtgcacagccaggcggagctagacttcctgagccacaacttgcagaagttctcccgggcccaggagcagcactggtggatcggcctgcacacctctgagagcgatgggcgcttcagatggacagatggttccattataaacttcatctcctgggcaccaggcaaacctcggcctgtcggcaaggacaagaagtgcgtgtacatgacagccagccgagaggactggggggaccagaggtgcctgacagccttgccctacatctgcaagcgcagcaacgtcaccaaagaaacgcagcccccagacctgccaactacagccctggggggctgcccctctgactggatccagttcctcaacaagtgttttcaggtccagggccaggaaccccagagccgggtgaagtggtcagaggcacagttctcctgtgaacagcaagaggcccagctggtcaccatcacaaaccccttagagcaagcattcatcacagccagcctgcccaatgtgacctttgacctttggattggcctccatgcctcgcagagggacttccagtgggtggagcaggagcctttgatgtatgccaactgggcacctggggagccctctggccctagccctgctcccagtggcaacaaaccgaccagctgtgcggtggtcctgcacagcccctcagcccacttcactggccgctgggacgatcggagctgcacggaggagacccatggcttcatctgccagaagggcacggacccctccctgagcccgtccccagcagcgctgccccccgccccgggcactgagctctcctacctcaacggcaccttccggctgcttcagaagccgctgcgctggcacgatgccctcc

SEQ ID NO: 188509 - DNA, 866 bp, Homo Sapiens
ttggctttaaaccttttttctttaatcataaagaatctcatgtatttgtctttttattcttctagactttataggccattttatcttcagctgaccaatatgccttttataaattattctattcagaagccctgcagtccatttgatgtagacaagccatctagtatgcaaaagcaaactcaggttaaactaagaatccaaacagatggcgataagtatggtggaacctcaattcaactccagttgaaagagaagaagaaaaaaggatattgtgaatgttgcttgcagaaatatgaagacctagaaactcaccttctaagtgagcaacacagaaactttgcacagagtaaccagtatcaagttgttgatgatattgtatctaagttagtttttgactttgtggaatatgaaaaggacacacctaaaaagaaaagaataaaatacagtgttggatccctttctcctgtttctgcaagtgtcctgaaaaagactgaacaaaaggaaaaagtggaattgcaacatatttctcagaaagattgccaggaagatgatacaacagtgaaggagcagaatttcctgtataaagagacccaggaaactgaaaaaaagctcctgtttatttcagagcccatcccccacccttcaaatgaattgagagggcttaatgagaaaatgagtaataaatgttccatgttaagtacagctgaagatgacataagacagaattttacacagctacctctacataaaaacaaacaggaatgcattcttgacatttccgaacacacattaagtgaaaatgacttagaagaactaacggtagatcactataaatgtaacatacaggcatctgtacatgtttctga

SEQ ID NO: 188510 - DNA, 1067 bp, Homo Sapiens
accccagttgagggttcgggccaagtcgttgccagtacccaggggcaggatggcaacagggggtggcggcttcaggcgtagctggtccagggtggagaggatccagcccaccgtgccgtcgcccccgcacgccaggatccgcaggttgtgcactttgcggtacatctccagcgcctcctggggccctccctggctcaggtcgaagacttgtcggggattgagataccagaggaaagactggatgatctttgcaccctggttgcccccactcttggggttcacaaacaccagcaggggcttcatgagcggggagggggtgggcctgatgatgaagggtctccagcggccctcctcaggccctttcttgctggacttcctcttgaaggatgccctcttcttcttcttgcttgctttcagagtattctggggcctccgggcgcggaggatccaggtgggcgggatgaccacggctgcgtggacccccagcgagcacggctcctcgatctgctgcagcatgaagcaggacaccttgctgtggtatgcctgcttgcaccacgagcagctgatggccacaatctccttgctgtggaaggtgaacttctgctggaatcccttcccacagtgccgacacttgccgtcctggcgtcgtctgtgtacccagtggtgccgtacaaaggttggctcgcggacattcctggagcctgattcacggaaggacggcttacagcggaaatttatcttctccagctgctcgatgcagggcgtgtgcaccacaatcttgcaggctgcgcactttcttcgagacactgacttctgcagcatcctggctacacagtactgctccccaacgtagcagaagtccccggacacgttggtctcgaaccagatgtgctccccatatgtcgctgactcgctccagtccactgtactccggatctgccgctctgactcgctgcacggggccccaggggtgggcggagggggggccaggtgctggaggcccgacttggtgatggctttcctagagaggagaagacagctgaggaggggggtgagcacttgcccaa

SEQ ID NO: 188511 - DNA, 1467 bp, Homo Sapiens
ttggctgcaagtggccgaggtctctgcaaggctgtggccgcctctcccttcgcggcgtggagacgagataacacggaagccaggggaggtctgaagcctgagtatgatgcggtggtgataggagcaggacacaacggactggtggctgcagcgtacctgcagagactgggggtgaacaccgccgtcttcgagaggcgccatgtgatcgggggtgcagctgtcactgaggagatcatcccagggtttaagttctcccgtgcgtcctacctgctcagcctgctgaggccgcagatttacactgatctggagctgaagaaacatgggctgaggcttcatcttcgaaacccctactccttcacccccatgctggaagagggtgcaggcagcaaggtgcccaggtgccttctgctgggcacagacatggcagaaaaccagaagcagatcgcccagttctcccagaaggatgcccaggtctttcccaaatatgaggagttcatgcatcgcttggcattagccattgaccctctgctggatgcggcccccgtggacatggcggccttccagcatggctccttgctgcaaaggatgaggtcgctctccaccctcaagcccctgctgaaggcaggccgcatcctgggagcccagcttccccgatattatgaggtcctcacagctcccattaccaaggtgctggatcagtggttcgagtctgagcctttaaaagccactctagccacagatgcagtgattggagccatgacaagtccccacactccggggagtgggtatgtgctgctgcaccatgtgatggggggcctggagggaatgcagggggcctggggctacgtccaggggggcatgggtgccctctctgatgcgatcgcaagctcagccaccacacatggagcaagcatcttcactgaaaagacagtggcgaaggtgcaggtgaacagtgaaggctgtgttcaaggagttgtgctggaagatggcacagaggtgagaagcaaaatggtgctgtccaacacatcaccgcagatcaccttcctgaagctgacgccacaggagtggcttcctgaggagttcctggagagaatctctcagctggacacccggtcgcctgtcaccaagatcaatgtggccgtagacaggctgcccagcttcctggcggcccccaatgctcccaggggccagccgctgccccatcaccaatgctccatccacctgaactgtgaagacaccctcctccttcatcaggcctttgaagatgccatggatggcctgccttcccacaggcctgtgattgagctctgcatcccttcctcgctggaccccaccctggctccccctggctgccatgtagtctccctcttcactcagtacatgccctatacgctggctggagggcaaggcctgggacgagcagagagagacgcttatgcagacagagtgtttgattgcatcgaggtc

SEQ ID NO: 188512 - DNA, 1328 bp, Homo Sapiens
  misc_feature (105)..(124): n is a, c, g, or t
  misc_feature (878)..(888): n is a, c, g, or t
ttgggtcaaagaccctttttgattacccacactggtggttattacagcatggttcccagccttacagtgtctaagtgcttctcttgtgtcctgtagatgttgtgnnnnnnnnnnnnnnnnnnnntacaccacactgtactttttccccctgcccccgttactgccggtgattattattaaaaattagtttttttcacatcattatatctggcttcctataaacaacagccttaattcagtcaagactccctttggggaattcattttattaaaaattggtgtctggatacttccctgtacatgcataaatatgcatgcatgtacagaaagactgtatgtgtgtgccttgcacacacacccatacctctcagaaaaagtgggtatcttaaaaactcgaaaaacaatgataaatttctcagcttgtccagacctggaacaaaatttctggaataagaaatttgtattaaagtccttttttgcactaacagttggctcttgtagcctgcaggctgaggaagtctcttctctgtgcatcagcagagttactgaaagcctctgattgagaaaaaacctccgtctgcctaaatcacttttctcgcagaagccatgcgactcccacacgacacgggcagcttcacaagccatctctttcatttctgcttgaagcccccttggctgcagcaatcctgtctgccataggtttcttccttccttacctactcaagggctttttctaaggcatgcacacatatctcctgttctctgagagtaccatggtgttccttaaaagaagaaaatttctaattctgaactcaatgttttgcttttactccctttctactgacaaatcatgataagggcacaaaagctgtacagannnnnnnnnnnaaccactcaatcccaaatggaggcctacaaagaacatcgtaataacacatggaagcaaaccctgggtttttaagagcaaattctgtcccccctcactcccccaagtgacaagatactaatgaagaaagttcttcaccatagtgtttgttttaactaaactcattggagtctagttccaaatttggtagggtcatcatctctacattccttaggatttctctccctatcaagctggcccagatacaagtaccaaacagtagtctctgaagttcccccatttccttcagtaccagtctataagctactgtccgccactgattttcatctatcagggtgtcctaatcagaatcagccacccaagcaagcctctctggcccacatatctatctcttgccttcccccatgaacttcagcctgtccacacaaaagccacataaact

SEQ ID NO: 188513 - DNA, 1521 bp, Homo Sapiens
tttgtacaaaaaagttggcatcatagctgctggcttggtgtgaactcgcttaaaagcaatggtgaaaggataacctcgatgatgtaaatccacccaaagatactgttctacaaaaagtagggtgtggacgcaaacctgtgacagcagagggggacgacttcacactcactgcctcatgtggcccctttcccagtggcagctggtgacactaacgattgctactcggttcacttgcccagatgtcttcatatgatgagcaaggccagaagcaaggctagattcgaagtttctgacaccatttccagtttgcacaaaagtcagtattttatcttaaagtggcttgatttccaatagctgaacttgggcagaaaacagcaggccaatgttcctatgtggtttctttgttgttgtttttgtttggggtgggggcaagtacagggtaattcatgagcaagacatttcactgctgtcgaagtctctgggatcccgctgtgggtctgagatggcctgggaaggaccttgtggacaatggttttatctgttctttttgtcactgttaatttctgggctgctgaggttctagaatagaagggctgccaaatgaggtttgctgcaggaggaaagtttaatcccccattccaaaagtccaggccaaatggtgggcttagcctctttgaaaagttctgccttgcccccacaggtgggcacatcctgtgtctcattcaccatgatgcttcctgagggtgttctagaagcccgttccccagtggctgtatccagcctttccttgcatcatcttcctcttgaaggtgaggaagtgaaaactacagacctcccccggacagcccactctctatcacgagcctaacccgcgggaggcggaagagacatccattcgagaactgaagcggcctccgggatgaggtcagaggccccacctgattttcctggtggtggtatccaaaatcttcagtaactaggaaggaaaccagggtctcatggtttaaaagactttgaagcaggaatgttgcatttgacgcctttaaaactacctttttgctgttgggaggagtcgggggcgagccttagcagctgcaccgccatccccatgctggttggtgctgccctgcctctcgtgccgggtgttgcttcagcccagagccagagggctgggtcccgggtcctccacaggtgaccccggtggacacacgcgttcccatcctggcctccgtctctgcttttccacttctacctgcgtgtgggtttgccgccttgtcatcagttgtgtgagtgtcgcagacctttccagagctccggttcactctttccaaacaggcctccctgtcggtggcactgcactcctagaaccttcagtttctacgatggtttgtttggtccttttgaaccaccccaaagaactcaacatggcaaagcaaatggtaaaagcttcccgactgttctactttgggtccgcgcgaagcccactcacgtgtgatctgtgttgcccctctcggtggtccc

SEQ ID NO: 188514 - DNA, 2150 bp, Homo Sapiens
  misc_feature (69)..(93): n is a, c, g, or t
ttgggaatgtctacattgcctaattttagaattcatgtacttggaagttcttgcattttgttactttcnnnnnnnnnnnnnnnnnnnnnnnnngagaccctgtctccaaaaaaaacctgcccatggcggaaaatccacttggtgttgcatccaacttgcgagtttttcttccaggttgtatgtaaactggaggtttatgagaggaatcgaagcccagttcttagctctgcagaaggggttcaatgagctcatccctcaacatctgctgaagccttttgaccagaaggaactggagctgatcataggcggcctggataaaatagacttgaacgactggaagtcgaacacgcggctgaagcactgtgtggccgacagcaacatcgtgcggtggttctggcaagcggtggagacgttcgatgaagaaaggagggccaggctcctgcagtttgtgactgggtccacgcgagtcccgctccaaggcttcaaggctttgcaaggtctacaggcgcggcagggccccggctgttcaccatccacctgatagacgcgaacacagacaaccttccgaaggcccatacctgctttaaccggatcgacattccaccatatgagtcctatgagaagctctacgagaagctgctgacagccgtggaggagacctgcgggtttgctgtggagtgaaaagcaaccaaaggcaacagagtctagctcatggccaccagaccaaaagcatccagcttctgtgcacctcctgcaaagctggcagaggccctggaattccagatcacctgaggggaaagggttgtctctctcctttctgttgggggagggggatgggggacttttgttggtggctcccacccatatatccctcctttaccatagtactcccacccacttccatcacccatccaataaaatgcagccaggtttagcctttggctttggtcacacaggatattctgctgtgttgcaacccatgtggtgataaggctcacagccctgagctctttacgggagcatcaactcacagttaggggactgggcgtggctgattgagggtttggaactggtggctatgccagctattccatctcaaaacagccttgaggccccttttcaatttgagcagctgctagatatcttatcagagctcagattccagatttcacatcccagcagccggttctgggtagcagatcaatttccaactggaaaataactatataatgtatgcttattggaattctgccacagcaggaagcttgagtcaaaatgtgtttcccctttgaaaggagaaggaattggagcagcttttcctggaggcccaggatatttcttttctgggtatcttggctgaaaattttgttttacatagagaaaaacgatcttttaagggtcccttttgctgcattatctgtccagtttgacttttttttcagtgaaaacaccatgtcatggagtgtaggaaagagcagaccaaaatcagccctagagccaaccagtcagtcccaaagctgtgacctctgtgccactgttgtccatagaagagcatcgactgtgtcacttaaaatattagtaaaccatgatgcagcaactgctaagagctaaactaacaaaattgtgtcatcatagctgctggcttggtgtgaactcgcttaaaagcaatggtgaaaggataacctcgatgatgtaaatccacccaaagatactgttctacaaaaagtagggtgtggacgcaaacctgtgacagcagagggggacgacttcacactcactgcctcatgtggcccctttcccagtggcagctggtgacactaacgattgctactcggttcacttgcccagatgtcttcatatgatgagcaaggccagaagcaaggctagattcgaagtttctgacaccatttccagtttgcacaaaagtcagtattttatcttaaagtggcttgatttcccatagctgaacttgggcagaaaaacagcaagccaatgttcctatgtggtttctttgtttgttgtttttgtttggggtgggggcaagtacagggtaattcatgagcaagacatttcactgctgtcaaattctctgggatcccgctgtgggtctgagatggcctgggaaggaccttgtggacaatggttttatc

SEQ ID NO: 188515 - DNA, 2214 bp, Homo Sapiens
gccaactttgtacaaaaaagttggctttttgtttggttgaggtttcacgctagaaggtggctcaggatgtcttcatcacattttgccagtcgacacaggaaggatataagtactgaaatgattagaactaaaattgctcataggaaatcactgtctcagaaagaaaatagacataaggaatacgaacgaaatagacactttggtttgaaagatgtaaacattccaaccttggaaggtagaattcttgttgaattagatgagacatctcaagggcttgttccagaaaagaccaatgttaagccaagggcaatgaaaactattctaggtgatcaacgaaaacagatgctccaaaaatacaaagaagaaaagcaacttcaaaaattgaaagagcagagagagaaagctaaacgaggaatatttaaagtgggtcgttatagacctgatatgccttgttttcttttatcaaaccagaatgctggaaagctgagccaaaaaaggctattccatcttctgtacggattacaaggtcaaaggccaaagaccaaatggagcagactaagattgataacgagagtgatgttcgagcaatccgacctggtccaagacaaacttctgaaaagaaagtgtcagacaaagagaaaaaagttgtgcagcctgtaatgcccacgtcgttgagaatgactcgatcagctactcaagcagcaaagcaggttcccagaacagtctcatctaccacagcaagaaagccagtcacaagagctgctaatgaaaacgaaccagaaggaaaggtgccaagtaaaggaagacctgccaaaaatgtagaaacaaaacccgacaagggtatttcttgtaaagtcgatagtgaagaaaatactttgaattcacaaactaatgcaacaagtggaatgaatccagatggagtcttatcaaaaatggaaaacttacctgagataaatactgcaaaaataaaagggaagaattcctttgcacctaaggattttatgtttcagccactggatggtctgaagacctatcaagtaacacctatgactcccagaagtgccaatgcttttttgacacccagttacacctggactcctttaaaaacagaagttgatgagtctcaagcaacaaaagaaattttggcacaaaaatgtaaaacttactctaccaagacaatacagcaagattcaaataaattgccatgtcctttgggtcctctaactgtttggcatgaagaacatgttttaaataaaaatgaagctactactaaaaatttaaatggccttccaataaaagaagtcccatcacttgaaagaaatgaaggtcgaattgctcagccccaccatggtgtgccatatttcagaaatatcctccagtcagaaactgagaaattaacttcacattgcttcgagtgggacaggaaacttgaattggacattccagatgatgctaaagatcttattcgcacagcagttggtcaaacaagactccttatgaaggaaaggtttaaacagtttgaaggactggttgatgattgtgaatataaacgaggtataaaggagactacctgtacagatctggatggattttgggatatggttagttttcagatagaagatgtaatccacaaattcaacaatctgatcaaacttgaggaatctgggtggcaagtcaataataatatgaatcataatatgaacaaaaatgtctttaggaaaaaagttgtctcaggtatagcaagtaaaccaaaacaggatgatgctggaagaattgcagcgagaaatcgcctagctgccataaaaaatgcaatgagagagagaattaggcaggaagaatgtgctgaaacagcagtttctgtgataccaaaggaagttgataaaatagtgttcgatgctggatttttcagagttgaaagtcctgttaaattattctcaggactttctgtctcttctgaaggcccttctcaaagacttggaacacctaagtctgtcaacaaagctgtatctcagagtagaaatgagatgggcattccacaacaaactacatcaccagaaaatgccggtcctcagaatacgaaaagtgaacatgtgaagaagactttgtttttgagtattcctgaaagcaggagcagcatagaagatgctcagtgtcctggattaccagatttaattgaagaaaatcatgttgtaaataagacagacttgaaggtgg

SEQ ID NO: 188516 - DNA, 1928 bp, Homo Sapiens
  misc_feature (281)..(333): n is a, c, g, or t
  misc_feature (406)..(519): n is a, c, g, or t
  misc_feature (1026)..(1081): n is a, c, g, or t
  misc_feature (1131)..(1182): n is a, c, g, or t
tgagagactcgagtctcaacacgatgagaccctggctgctttgcttaatgtgacatttctgtggctattaactgcattcatgggaatgagtgcaggccgtgaaccactgcaattctggtggcaggaaagagtttattctcagtgcaccttcaataggcaaaagctcttcaacttctcaactactgtgaacaactacacgagaaagcaacaggctggggagaggggggctaactattctcacgatttcttgggacaccaatgggcaggagccaggtcagaannnnnnnnnnnnnnnnnnnnnnnnnnnnnnnnnnnnnnnnnnnnnnnnnnnnnagagagaggaaaacatctacatccaggtcagctcacccacacataacagtaccagaatttcctggatatttannnnnnnnnnnnnnnnnnnnnnnnnnnnnnnnnnnnnnnnnnnnnnnnnnnnnnnnnnnnnnnnnnnnnnnnnnnnnnnnnnnnnnnnnnnnnnnnnnnnnnnnnnnnnnnnnngttaacatgccaaaggacacgaagctagtgggagtcttaaagctcaggttttaaaccctactctctcttgtctctttgagtctccaatgtcatcaggatgggccactgaggttcttcaaacctcagttccacctgttattacataagaatgagggacttacagaaaaaaactatactatgctggtgaaatccacgaaataatgtaaatggggctgtgtctctttcaagagatcaagggaactccctaaagacaggatatcaactttattttaattattaacatctccttcccgtgtgctgagcataggactcaaagctcaggcttttacttaggtttgtcttagagaaaggaaagaggccaatcttcaatgagtcatttctcttttagtttctttgcctttggggatagaagctacagacgaatggaaatgagaattcctgctctcaaactttttatagaagtgttgtccaataggactttcttcgatgatgaaaatgttccatatnnnnnnnnnnnnnnnnnnnnnnnnnnnnnnnnnnnnnnnnnnnnnnnnnnnnnnnngtggccagggcgactgaagagctgcatttttaattaaaattaaaactgannnnnnnnnnnnnnnnnnnnnnnnnnnnnnnnnnnnnnnnnnnnnnnnnnnntatgggtgtggtgagtaactgggatgtctctaagttctgtctttccccagagggctgggtccactccagagtctctgaaaaagcttgggaaagaggaaagtaggttaggctttgtcacacgctgggctcgttcctgtcgcctgccctggaccttgggggctgaatggctcacattttataatctgaacaattttgggggaagaaggtcctgtttaacaccaaatcagactataacacagggtcattttaaaacatttaaaacttcatgggcaccatttcctagctgttttggattgggacccgggtgctacaatctaggggccaagagaagtctccactgctcttgcttaagcccatgacaacgttggaggagaaaagccgatctctttttctcctccgcctgagacttgtgctccttctagggttttgcttccagaagctgacctctgagttctgaaacgatgtctgtgaggtcaaacggcagaggcatcgaagcatcatccttttcccagtatggccgacattctggcttctgatcagcaggtaatgttcgggcaattcgtgactggcacctggcatgccattctctcctcaggttctggcgtgcagtgagcgaggcaaggatggcagtcaagatttcattcctttgttccacggggagcccctctcttttaacttcatgaagcacagcatttgtctaacaaactatgtgtgcaaggtaaaggcttcaacctgcagttccccaa

SEQ ID NO: 188517 - DNA, 1292 bp, Homo Sapiens
ttggcaccgactctggaggaagactggagcctttgcggcggcgctgcccctcccctggtccccgcgagctcggagggcccggctggtgctgcgggggccccgggaggttgaaaactaagcatggggaagagctgcaaggtggtcgtgtgtggccaggcgtctgtgggcaaaacttcaatcctggagcagcttctgtatgggaaccatgtagtgggttcggagatgatcgagacgcaggaggacatctacgtgggctccattgagacagaccggggggtgcgagagcaggtgcgtttctatgacacccgggggctccgagatggggccgaactgccccgacactgcttctcttgcactgatggctacgtcctggtctatagcacagatagcagagagtcttttcagcgtgtggagctgctcaagaaggagattgacaaatccaaggacaagaaggaggtcaccatcgtggtccttggcaacaagtgtgacttacaggagcagcggcgtgtagacccagatgtggctcagcactgggccaagtcagagaaggtgaagctgtgggaggtgtcagtggcggaccggcgctccctcctggagccctttgtctacttggccagcaagatgacgcaaccccagagcaagtctgccttccccctcagccggaagaacaagggcagcggctccttggatggctgaagagctgccgttcctctttcacgatcccagccccatttcagtgtctggggctctggtagatgtgttgagggcaaagtagaggacaagctgtctttcccagtcagccagggagctccccgccaggccacgccccagccactttgctccctctcacctctgggaagtgcaaatactcttggttgacatccccttcctcagccctcccagcctactccccatcccagcttttagaggatctgctccactgtctcctggggcagttgtgggtcactgtcccttccagctgccccagacaggaagcagagtcaccacgcagcagtgtcccttcttgggtctgagttcctattataggtaggggccccaccctctgggcttcccatcagcgacacacacacacttatggcaccagcctggactccagaaaaagggtgtccaggtattgtgtgtatgcatttagttgtgcacacacaaatatgctcctatactggcattaggcgtctcctcatccctcaccctgacctttctcctgtccttttcttggctggaagaagttggcctcctgggagtgtagttttctgttttaaatcccccacccc

SEQ ID NO: 188518 - DNA, 1314 bp, Homo Sapiens
  misc_feature (314)..(325): n is a, c, g, or t
  misc_feature (1096)..(1114): n is a, c, g, or t
taataaaacaatttgaggctgtataaaaactttagtaaaaaattagctttgagagctaacagatttttattatgaactattgctggcactcctccccagccgccagaccttttccagtagttcaggcccaaggcctgggactggagtgccagagaaaagggatggggtgggtcggggcaggactgtggactgttaggacaaagcggccaaggtcaagtgaggaaagagcatcacatgacataaaaatattgcatcttcaccaaaatgtcccccactgagtgtttcaaaaaaccgtgatattccttttaggaggnnnnnnnnnnnncaatgcacagaaaaagggtaaaacaaaataggttgatgtggtggagacctttgacctcccaggtgcccccacaagcagctggcccaccctggagcaccaaagttgggggccacagccaccactgcctcttggagtccctttttcatggaaatgaagacaccttggtcgtgggccactagtgtacatgggctggaagtggggatgtccatggcccaagagacccctccagcttccagcccctggcaacagcgggagagcaaacccagcaccagggacttggcgtgagccagggccgggaggcccccaatcaggctctggggtatcagagcaaccaagttgacgtagtgtgaaaaaatagtattcctttgataaaaaatactgtcccttggtcttctctaagtttgaaacaccctgggagcttatttttagcaaagcaattccccatacccacccaaaaattatacatacaagtttaggtaaacagcagattaaacgtaaaaacttaaccttaacttctgaaagtcctttgaatttaatctttagttactgttttccatgttacatcctgcagctagacacacgtgaatagaaaaaacagtacagttagtgttaaaggcaaaacgcagagagccagggggccgcccggcactgcctgcgagttcattcatggttcctcgctccctccacctccactccacatggtgctttcagagccagccatcaaaaatgaagcgaagagttctctatgaacaaaccaaaagctgttaggcnnnnnnnnnnnnnnnnnnngtccccaaagtctctccagctgctttggggtttgggaggaccagagagggcgggcttgtccaggcccctgtgtcagtgtgtgctaggtcaggtgtcggctcccggtgggcaatggtctgcaggccaccggtctccacagacaacaccatgtcgtctccaggcccctgccctaccctgcctccacccaggcgcttgcccaa

SEQ ID NO: 188519 - DNA, 816 bp, Homo Sapiens
  misc_feature (86)..(101): n is a, c, g, or t
tctattattgataacctttaaagtgttaataattctgctaacaatttgtttcttttcactctgcaaaatcagtgtcttacatatcnnnnnnnnnnnnnnnncttaatatttattcttcatttctttggattactttacacagatgcgttcaggtcagctttctcgaaaattttggggatcgagcaagcggctcagccagatttcagctggagaaactgaatataatactcaagattccaagtgattgttatttccattttctgttatgattactgaaacctgatttattgctttgtcactttaaccacatctctcaactctctgcaatgttgcaaggcttttatccctgaaaatcatttacagataaccacaatttgctgtggtatataaactaattcttggtctatactaagatgtatttgagaaaatacatttgatttgattttgtggcccattcctaaaggtcattgtatccatttttaaaacaaactaaaatgagaacattaggttcaattttcttattattccaaatgataaaatttaagatttttctaataaaagagtacagataatgggacagttgagagagatggctttaaatacattcttaagtaatcattttcctatttactgaccactgtaatgaaaatatatcaatttatttatggaactcctgattggggataatattttaaaggtatctgttgcacacttggattttcaaaactcggtgaaagttacaagtttgcatggtaagataaataagaatattgaaactggtacattagctaattctattactacttagcgtgtttc

SEQ ID NO: 188520 - DNA, 1270 bp, Homo Sapiens
  misc_feature (810)..(862): n is a, c, g, or t
ttggagaactggaagaattaaatggaatccatctttggtgcccaccattccccagcctcctatctccctcccacagggagcctgtctatcccttctcacaccaaagctcttagctccttttcacactgacacacactctcggagagtgtcagtacaatgatggagtcttggtcaaagaggccagaatcagaggcctcagctcaagctcctcccagatgagtgtcttacaggttccttcccttcctacagaagtggaataatggccccctcccatccagcctcccaggcctcctcaaggcctgatttaagctgattcaagtgggggagaggggttcctttcctccaggaaacccccttctaatgccacttggccaccttccccagctgaaccctgaatgcctggagcaccacgtgactgtgagacacagacactgacaatggcaggggtgccacagagacccatctcaggaggagcagaagacacatcagtgataccatattccatatttcttgacttcagtgatggttacaagagagtctgcttcagaattatttattattttgtacagtcttcatttaggtaattttttcttatgtctgttatattctaaacacacacacacaaagttcaacaaagaaacacatctcagtgaaggggcactcccctaagccattcttctatttggtggtacccagccataaccatgaatctcagggcaaaactttccttgtgctcactatgagtctctaaggttggaatgtaagtttctgctgcatttttaagtttgccaattataggagataaatgannnnnnnnnnnnnnnnnnnnnnnnnnnnnnnnnnnnnnnnnnnnnnnnnnnnngctctagaatacatgcatgataaacatttatagacacacatttttacatagcactgtcctctaggagtcgtctatggtaatgcctacttcccttctaaactacaagcctcctgaaggcagggggccccaactcctccacacccagcctggggagggtggtgcccagggaggtcacagcctgagccatctgggaccccattctcatcagagctacttcccagacccagggcccagtggcttcaggtggaggtgaaagccattcttggagcgcaggacaagctggggcatcttgatgggcagccgtgaggggtccagagagaactcaaagcggagcaagcacatggctgtgaccaccttcatctcactcatggcaaactgctgcccaatgcagttcctgtagcaagcagc

SEQ ID NO: 188521 - DNA, 3577 bp, Homo Sapiens
  misc_feature (3152)..(3200): n is a, c, g, or t
ttgggccaccacaaacatctctgttgttcctcatcgtacattcctcagagtcgactgagatacacacctcatccagcatatgctaccttttgcaggccaaaggagaactggtggcagtacacccaaggaaggagatatgcttccacaccacagaaattttacctcacacctccacaagtcaatagcatccttaaagctaatgaatacagtttcaaagtgccagaatttgacggcaaaaatgtcagttctatccttggatttgacagcaatcagctgcctgcaaatgcacccattgaggaccggagaagtgcagcaacctgcttgcagaccagagggatgcttttgggggtttttgatggccatgcaggttgtgcttgttcccaggcagtcagtgaaagactcttttattatattgctgtctctttgttaccccatgagactttgctagagattgaaaatgcagtggagagcggccgggcactgctacccattctccagtggcacaagcaccccaatgattactttagtaaggaggcatccaaattgtactttaacagcttgaggacttactggcaagagcttatagacctcaacactggtgagtcgactgatattgatgttaaggaggctctaattaatgccttcaagaggcttgataatgacatctccttggaggcgcaagttggtgatcctaattcttttctcaactacctggtgcttcgagtggcattttctggagccactgcttgtgtggcccatgtggatggtgttgaccttcatgtggccaatactggcgatagcagagccatgctgggtgtgcaggaagaggacggctcatggtcagcagtcacgctgtctaatgaccacaatgctcaaaatgaaagagaactagaacggctgaaattggaacatccaaagagtgaggccaagagtgtcgtgaaacaggatcggctgcttggcttgctgatgccatttagggcatttggagatgtaaagttcaaatggagcattgaccttcaaaagagagtgatagaatctggcccagaccagttgaatgacaatgaatataccaagtttattcctcctaattatcacacacctccttatctcactgctgagccagaggtaacttaccaccgattaaggccacaggataagtttctggtgttggctactgatgggttgtgggagactatgcataggcaggatgtggttaggattgtgggtgagtacctaactggcatgcatcaccaacagccaatagctgttggtggctacaaggtgactctgggacagatgcatggccttttaacagaaaggagaaccaaaatgtcctcggtatttgaggatcagaacgcagcaacccatctcattcgccacgctgtgggcaacaacgagtttgggactgttgatcatgagcgcctctctaaaatgcttagtcttcctgaagagcttgctcgaatgtacagagatgacattacaatcattgtagttcagttcaattctcatgttgtaggggcgtatcaaaaccaagaatagtgagtggctctttcactggcaattctcaaatgatacacatttaaagggcagattttttaaaaagatactactataataaacatttccagttggtcattctaagcatttacccttttgatactctagctagtcaggtactccaaattgactttgcagcagggtggcagggtcaggagagtctggtcctgcctagctcagatttcatggcacctgcacttgaagcaagtcacttctttatcacaggtgtcttgaaacattagcttcttttaccaacctgagaaaattaggatgacctggcaaataagatcttgaataggccaaaagcaagtatcttgctgtgtgtagtctcttggttaaagtgaagaaacagtactgttcacacctttcttcactgagattccagtgtacatgagaacatatatttattgcatgattttctagatacacagtctatgcattattcatatacatttattttagcctaaagtggttttcaaatccagttcttcaagccataaatgaccaagatccaagcaatctgaatttgtttttgtgattatttgactggaatgcttcttaagtggaataactatactccgttatccacccgatttcctaatgtaattgaaagattttctattttgccacacacttggagacaataagggtttttagttttatctactcttctattgaagttaaagaaagaaaaaaagatttttttatttgtattaatgaaaagctttagtttaaaataaggagatccagaataaaaagaagagactgatctcttcaattattgtcatctgtagccaccagcacatcactcttatgtaatccccaaaggcttggcatgccgtaagtgtgtggtgggtagactgctgccggggaatcgtacttcttatttagtaatgataagacttttcattatttttggaattttaaagatgacataaataagtttaaatatcaatttggggagtaaggtttaatattgccatcgggtattgagacaggaggaagtttctgtttttctccatttagacataggtcaattaaaatatttgggtttaaaatgactaaatgctttaaacatattgtagcttaagatatatgtgttaagatatatacatgagaaactttaaaaggtaactactgtgcatgcctgatgcttaatagaatacttagtggcatcaaatgtttgcagcagtctccataattatattcagtcccttctaatactgtatcaatgtaaatgaaataaatatattcaaattggctttttgatatgcatcaagtggcattttgttcctgtgtttaatagtgatctgtatacagctgtgcacatattgtcatcacttattctagcatcactgttaaggctgtgattatgtttgatattcacctggattttaatacaagccaatatcagcttcccattgtgtaataacttgggtgtttaggagtcttttcacattttttggggatatgaactagatgttcaagaactccttctggactgtggatactgaatcagtgtactattggctgcagaatttgtttcaattgaaaatagactcaggaagattgctgctcagaatatcatataatgnnnnnnnnnnnnnnnnnnnnnnnnnnnnnnnnnnnnnnnnnnnnnnnnnaagtcagcttggaacttttttcctgggtagtatttgggagagggaaaggctgtactatatatttatttctaaatgttttgactgggcatttttcttttaatgaaatatgtggactgctctagcaaaccctattttcagctactatttgaatattcttgaacaccaccactgaagagtttcatatacaccaaataatgtctcatctctatagtacagggaatataaaattggtttcctgtggtcatgatcaagataatagtattattacacaagaaacttggtctgcagtcctggaagcttgtctgctctatagaaatgaaaatgcagcatgaagttgacatttgtggaaatgaaataattggggtattagaaaatct

SEQ ID NO: 188522 - DNA, 2820 bp, Homo Sapiens
actattatgttatatcttggcttatgtgactttcattcttagtgtttgaaccttaaataaagcaaccgttttaaagttttttgctgtatactaagttgaatttcccccctgcaaaatcttttaatgggtctcctacaggaagcataaatttgtctttagatgacctttcaaatgtttcttctgatgactcagtacaacttcatgcctacatttcaaacacaggcgtttgtaatgatcatggcaagacatatgcattatatgccatcactgtacaccggcgcaacctaaacagtgaggagatgtggaaaacctatcgtcgttatagtgacttccatgacttccacatgaaaatcactgaacagtttgaaagtctctcaagcatattgaaacttcctggaaaaaagacttttaataatatggatagagattttttagaaaagagaaaaaaggatctaaatgcatatttgcagttactgttagctcctgaaatgatgaaggcatccccagctttagctcactatgtgtatgatttccttgagaacaaagcctacagtaaaggaaaaggggattttgctcgcaagatggacacttttgtaaatccacttcgcaattcaatgaggaatgtttcaaatgcagttaaatcccttcctgatagcttggcagagggaatgactaaaatgtcagacaacatgggcaaaatgtcagaaagattaggtcaagacataaagcaatcattttttaaggtgcctcctttaattcctaagactgattcagaccctgaacatcgccgagtttcggctcaacttgacgataatgtggatgacaatattccacttagggtaatgctgcttctcatggatgaagtattcgacttaaaagaaagaaatcagtggttgcgaaggaatatcaaaaacctacttcaacagcttattagagctacatatggcgatactattaatagaaaaatagttgaccatgttgactggatgacttcacctgaacaagtagccgactcagtgaaacgtttcagagatgcattttggccaaatggcattttagcagaggctgttccatgcagagataaaagtattcgaatgagaacaagagtagcaggaaaaacgaaattacttgcaattatgccagatgagctgaagcacattattggggctgagacaacacggaaaggtattcttcgtgtttttgaaatgtttcagcacaaccaattaaataggagaatggtttatgtcttcttggaaggctttttagaaaccttatttccacagtataaattccgtgaacttttcaacaaactgcattcacggtcaaagcagatgcagaaatataaacagaaacttcaaactactcaagcgccttctttgcagaaaaggtgacactccactctatgaagctggggttcattttgtccaggactaatggtatggacagatcttctggggcttaactcaaatactgtttgtgtctgcaccagtcttttagtgtctcaaaatagattattaatacatccataagtctgtggttcttctcattctcatctataatccaccactaccaagagagatttctgtgtcttaaatgatttggtgcatattttgcaacattgagagaaaactgcccccatctcaagcaagaatggcgttggtttcttccatttcaaactaatcagcattctccagcaatgacaaagtgccagagtgtatatatgaaagctaaggaaagcacaaaacaatggttcagagataaattggctaatttgtttaacagttggagactgtgcaatgtacgacttggaggagtttgtttggcataatgattttgtaggtctgtcagcattttgatatattgtggattagccaggtgaatgatccttgaaacatctctttcaggtctggagaaagagacagaatgcccttaaagtgtgaaataaccttatacctgaattacagttttgtgatataaaataaagctgagtataaaataaaaccaatcaaacacagaatttgattggatttgttattcattggtatacaacaatttttattcttatgtgtgctttaagggctgtgttttgctcttagggtactcaattttatgtttccttttggcattctttgtgcaaaaagaagcatgtggtggctctcatttaaatttcaaaattattagttttatctttaacagattactgattatacagaagatataatttattggaagaactgccaaatacattttgtccttctaaaaatatggaaatttaaatagtagtctggaaagttaccatatgataatttttaattgtgtgatctagacatgccttaggtaactgcagaaatagcaaattaaatgattaatgagcttattagtcatagtaaacatacagattcctaattctatgacagtgtacatatatgaaaataaatgatgaaaaaagaactataatatttttaaaaatatgcttttatttatatttcacataatgtaaagttctacaaaataaagctagtaggcaagacccctcagtgtatacctttaaacccataaattaattttatatcaataaaataaaatactttctctagttttggagcttctgtatttcctatagttttctgactgtccattttatccatcttagaagtattcacatcccttctatgcacgatttctgcatagttttaaatactttcattgcctaagggtttgggtgtgtcagctttttttgttttaaaaatatttaacactaaaaccttaaaataatgaagctacttatcagaccactgagcccagatcctggtattaaaa

SEQ ID NO: 188523 - DNA, 1121 bp, Homo Sapiens
caactttgtacaaaaaagttggcaatattggagagctagaagcagtcagagataaggcagcagaagaattacagtatcttagatctctagatacagctggtgatgatatcaacactatcaaaaatcaaataaatagcttactattcgtaaagaaggtatgtgactcaagaatacagcgattgcagtcaggcaaagaaataaatactgtgaaacttgcagcaaactttgggaaactttgcacagtccccctggacagcattcttgtagacaatgttgcactacaattttttatggattacatgcagcaaactggaggtcaagcacatctattcttttggatgacagtggaaggataccgggttaccgcccaacagcagctagaagttttattaagtcgtcagagagatggaaaacatcaaaccaaccaaaccaaaggtcttttaagagcagctgctgttggaatttatgaacagtatttatcagaaaaggcatctccaagagttactgttgatgactatttagtagcaaaattagcagatactttgaatcatgaagatccaacccctgaaatctttgatgacattcaaagaaaggtatatgaattgatgctacgagatgaaagattttatccttccttcagacagaatgcactttatgtgcgcatgttagctgagcttgacatgttaaaagatcctagtttcagaggatccgatgatggggatggagaatcttttaatgggtctcctacaggaagcataaatttgtctttagatgacctttcaaatgtttcttctgatgactcagtacaacttcatgcctacatttcagacacaggcgtttgtaatgatcatggcaagacatatgcattatatgccatcactgtacaccggcgcaacctaaacagtgaggagatgtggaaaacctatcgtcgttatagtgacttccatgacttccacatgagaatcactgaacagtttgaaagtctctcaagcatattgaaacttcctggaaaaaagacttttaataatatggatagagattttttagaaagagaaaaaaggatctaaatgcatatttgcagttactgttagcttctgaaatgatgaaggcatccccagctt

SEQ ID NO: 188524 - DNA, 1578 bp, Homo Sapiens
ttgggggagcggagacagaggcggaagctgcagccctagaggtcctggctgaggtggcaggcatcttggaacctgtaggcctgcaggaggaggcagaactgccagccaagatcctggttgagtttgtggtggactctcagaagaaagacaagctgctctgcagccagcttcaggtagcggatttcctgcagaacatcctggctcaggaggacactgctaagggtctcgaccccttggcttctgaagacacgagccgacagaaggcaattgcagctaaggaacaatggaaagagctgaaggccacctacagggagcacgtagaggccatcaaaattggcctcaccaaggccctgactcagatggaggaagcccagaggaaacggacacaactccgggaagcctttgagcagctccaggccaagaaacaaatggccatggagaaacgcagagcagtccagaaccagtggcagctacaacaggagaagcatctgcagcatctggcggaggtttctgcagaggtgagggagcgtaagacagggactcagcaggagcttgacggggtgtttcagaaacttggaaacctgaagcagcaggcagaacaggagcgggacaagctgcagaggtatcagaccttcctccagcttctgtataccctgcagggtaagctgttgttccctgaggctgaggctgaggcagagaatcttccagatgataaaccccagcagccgactcgaccccaggagcagagtacaggagacaccatggggagagaccctggtgtgtccttcaaggctgttggtctacaacctgctggagatgtaaatttgccatgacttcctggaggacagcagcatggagaaagatcctagaaaaggcctctgacttccctcacctcccaaccatcattacaggaaagactgtgaactcctgagttcagcttgatttctgactacatcccagcaagctctggcatctgtggattaaaatccctggatctctctcagttgtgtatttgttcatcttcatatgctggcaggaacaactattaatacagatactcagaagccaataacatgacaggagctgggactggtttgaacacagggtgtgcagatggggagggggtactggccttgggcctcctatgatgcagacatggtgaatttaattcaaggaggaggagaatgttttaggcaggtggttatatgtgggaagataattttattcatggatccaaatgtttgttgagtcctttctttgtgctaaggttcttgcggtgaaccagaattataacagtgagctcatctgactgttttaggatgtacagcctagtgttaacattcttggtatctttttgtgccttatctaaaacatttctcgatcactggtttcagatgttcatttattatattcttttcaaagattcagagattggcttttgtcatccactattgtatgttttgtttcattgacctctagtgataccttgatctttcccactttctgttttcggattggagaagatgtaccttttttgtcaactcttacttttatcagatgatcaactcacgtatttgg

SEQ ID NO: 188525 - DNA, 1608 bp, Homo Sapiens
gcaacactgaacaatgaacctagagaggaaggcgtcttcagagagcaggtgcagccagcctcagcacctcctgtccaaagaaaccttccaccctcttgccccaggggagcctttctccaagaaagccacatggagacgagcttcacaaggacgcacttgccacaaccattcacaaaaccccaccttttattacagtctgcggtgctgcttgttgcagggacactgagacaaacgggagagtcatgtgcgatgaccgtgctatcggcatgtgggccacaaactcccaagacacaaacggctctttacacagaaaacaaccactcaatgctgttttccagaaagacgaaaatacactaggaacagctactggcgggaatggaggagtcagggccctgggccagggcatctacgcagcagagaatgggggcggccggcgtgggccaaaggggaggccagctggcggggccacggtggcggtgacaggccacagcgtgcactgggtcatggaatatcaaaaagatacagaacgtttactgaaaaaacacaacgcatgttaaattgaacttcacccttctgtaataaaaaattaaaaacttttgttgactctgtttgaacacaatagactaggaactcttccctagacagtgttagaattggcaagaaatgtcaccagcaacttttaagaactttccggtggtccacaccttccgctcggccaaatcatcttcagagaggaggctcaaatcaggccctgtcctgacccccaggcgcagatctgggggaccacctccaagacaccctgtttcttgccaatccgggtcaacttcccgacagtctctcgcgggcaggagcaaagggacttagcagtcactcttccacagtttaattgttttgtcattttctagcgcagcagaggcgatgatgttttctgttgggtgacaagctgttgagatcacgacatctgtgtggccttgtagtttctgtacaatctctttcgtctgaaggttccagatgtaaacaaggttatcctctgagccagacacaatccacttcccaccagtaacagagaaattggcaaatatgcagtatttctcattcttgtggccagtgtacgtcttcaggcactgaaacaggaggggacaggctggtcacagagtcatggttccccttgattttgtgtaattctacgttctaagcaaggcgtttcactactcacttcacttatttctgaaaagtacaagtaccaaacccacacaatcgaagatttaacttgcagactgccaccctacaaatacccaggtctttcaggaattcgcaccaaacccagcggagatggctctctgagctcctctcctttgtcatcaccggggccagctctgtccccaccagaggccatgacccagggatggtgcaccatgggggcccaagcctgcgggggctcaccttccccttgctgtagtcccagagcttcagagtgttgtccagcgtggcggccaggatgtatttgccgttcggggagaacttcacaaaagacacgggggggttgtcgtcatcgatgagcgtcttcaggcactggcctgaggcggtgtcccagatgcgacagaccaa

SEQ ID NO: 188526 - DNA, 1509 bp, Homo Sapiens
  misc_feature (390)..(427): n is a, c, g, or t
  misc_feature (534)..(549): n is a, c, g, or t
  misc_feature (699)..(725): n is a, c, g, or t
  misc_feature (1011)..(1025): n is a, c, g, or t
aaaaaagcagtcagatggaatggaagaatacaaaaccctttggtctaggacttactaatgttaaaaaaaataggtgacagggaacaggttaagaaaactatgtaaatgtaggaaagatgggaggaaataaagccctgttctggatcccccatcccctccagaataagagcatgttctgcatgtattaatcttttatgctgtttatgaaacaggcaagataagtctgtttttccttctggaaccataagggtaaccagattttcatctacagacaagtggtagtcatttgtgtttatcatgcaacttacttacaaacaccaagatattaattgctgcaacttgatgtcaaatcacattactgggtaatttttaagactatgtacccacacnnnnnnnnnnnnnnnnnnnnnnnnnnnnnnnnnnnnnnaacctgtgtgccaagtgacagctatttttttatatacatggtaattcattaaaattgccttagtaatatattagaatatacaaatatgtgtgtataaaataaacatnnnnnnnnnnnnnnnnccctatgtagtttttaaaacactggcaatgacccactccccttggaaatgcatgtatgaactaccctatgaaatgtaagctgcagaatagataaaacacaggtttccactaataaaagacatctgaacgtcctgaatatagagacagaannnnnnnnnnnnnnnnnnnnnnnnnnnaacatgtttaaccaacagaagttatttacagaaattcatatgtccaggcaacacaaaactcctttattcaaaatcactgctatctttgggactaaacacaggctactttctgtttactcctaacaaaataaagcaagcaaatttgagtcaaatattggtgcactttaatactatcacatctttgaaaactcaatttgagttttaccaattaatgtgtctcatgaagagaagacaccagttttaaaatgagccacaaacagtaaagccctatcagtataaaatttgnnnnnnnnnnnnnnngatgattgtatttctagattagcaagaaattagttaattctggctgatttctatttctagctaatttggtcattctttgccatagcttactctattcaaataaacatatattcttgcttgcatcctagattggaaattaaaatttttcaaagaacaaagcttcaatattggatactgaagagtatacatgaaagaaaattccttttgaagctattaaaccatttttttcctatgtgaaagttgaggacaatttatataactcactttttgtcatgtaaaaaaggttactcaagttgtactacccacataactgaaaatattggccatttggccttatctgtgagatttgacactaagtttttgttagagattggaaattatactagtccttttaaggggtaaaaaattcaattcaatactgacaaacttttgcttgtagttttactgtacatttatttttaaagaaaaagaaaacaaaagccaa

SEQ ID NO: 188527 - DNA, 1552 bp, Homo Sapiens
  misc_feature (1294)..(1308): n is a, c, g, or t
ttggatttttgtgacttataaagtactttgatatattctcattaaatctgtaaatcacctctataagtaagtggtaataataaagcagatatttttgtccccatttaaaaaatgaagaaattaatgcttaatagggtggtaccctggaaaggatctgggaagtggtagaatttctggtctgtacttttacaaatggagcccttgggaggtgggttaggtaaaagaagctttttacttaacgttgtcttatttccagtctaattttacgctgtagcagaaccagatggctgagaaaattctggaactatggatcttgaccccaaggatatattattttattccaagaaagatcaggtaggcgaaaagatgacaggatacagagtcaatccataaactaaatatttataactgttctgaattatacagagtctaaaaatatgtgtcagctacttcattcctgtaaatactcttgctgtgttataaatatggcaagaaataaacatgaccaatatcaatagacttcttgaggctactataagttttgagaaataaggttcaaaaaataagaatgctaacacttaagcacagactagagcttgcttgggtttcttcctgcattacaaggtaaaaatttgttaatgtttgtttttattcagcttgggaaagctttgtgccatgaatacgtcgcatttaataacaagcaacacacggcatatagaaataactttaattaaaaaacttacatagaagattataatatcagacgtgacaaagatttgagtttatttgcctggacaacttgggtttgtctggcttttgttttctttttctttaaaaataaatgtacagtaaaactacaagcaaaagtttgtcagtattgaattgaattttttaccccttaaaaggactagtataatttccaatctctaacaaaaacttagtgtcaaatctcacagataaggccaaatggccaatattttcagttatgtgggtagtacaacttgagtaaccttttttacatgacaaaaagtgagttatataaattgtcctcaactttcacataggaaaaaaatggtttaatagcttcaaaaggaattttctttcatgtatactcttcagtatccaatattgaagctttgttctttgaaaaattttaatttccaatctaggatgcaagcaagaatatatgtttatttgaatagagtaagctatggcaaagaatgaccaaattagctagaaatagaaatcagccagaattaactaatttcttgctaatctagaaatacaatcatcnnnnnnnnnnnnnnncaaattttatactgatagggctttactgtttgtggctcattttaaaactggtgtcttctcttcatgagacacattaattggtaaaactcaaattgagttttcaaagatgtgatagtattaaagtgcaccaatatttgactcaaatttgcttgctttattttgttaggagtaaacagaaagtagcctgtgtttattccccaaagatagcagtgattttgaataaaggagttttgtgttgcctggg

SEQ ID NO: 188528 - DNA, 728 bp, Homo Sapiens
ttggcgttgaaaaatggcgactgtggcagagttgaaggctgttttaaaggacaccttggaaaaaaagggggtattagggcatttaaaagcaaggatccgagctgaagttttcaatgccctagatgatgaccgtgaaccccgaccatcattgtctcatgaaaaccttctaattaatgaattaattcgagagtatttagaattcaacaaatataagtatacagcatctgtcctcatagcagaatctggtcaacctgtagttccgttggacagacagtttctcatccatgaactaaatgcatttgaagaatcaaaggataatacaatacctcttttatatgggattttagcccatttcttgcgtggaactaaggatggcatccagaatgcatttctgaaagggccttcacttcagccttcagacccaagtcttggcagacaacctagtagaagaaagccaatggatgaccacctaagaaaggaggaacagaaaagtactaacattgaagatcttcatgtttctcaggcagtcaacagataatgctttgtttggggtatcttttgtcttaaaattgtattattaattaaataacttatttattgtcccaatgttaccaaaatgcaccactaatgtttgtagaaattggagtttctacaaaacacccctcatgtttaactacatttgtgaataaaagctaactcttgtcatctagcttattggatttgacttg

SEQ ID NO: 188529 - DNA, 1470 bp, Homo Sapiens
  misc_feature (1086)..(1123): n is a, c, g, or t
ttggccagccatgaaccggtttggtacccggttggtgggagccacggcgacttcttcgccgccgccgaaggcccgcagcaatgaaaacctcgacaaaatagatatgtctttggatgatatcatcaagttgaatcgaaaggaagggaagaagcagaattttccaagactaaatagaagactcctccagcaaagtggtgcccagcaattcaggatgagagtgcgatggggaatccaacagaattctggttttggtaagactagtctgaatcgtagaggaagagtaatgcctggaaagagacgtcctaatggagttatcactggccttgcagctaggaaaacgactggaattcgaaaaggaattagtcctatgaatcgtccacctctaagtgacaagaatatagaacaatattttccagtgttaaaaaggaaggcaaaccttctgagacaaaatgaagggcagaggaaaccagtagcagttctcaagagacctagccagctaagcagaaaaaataacattccagctaattttaccaggagtggaaataaattaaatcatcagaaagatactcgtcaggcaacttttcttttcagaagaggcctgaaggtgcaggcccagttgaatacagaacaactgctagacgatgtagtagcaaagagaactcgtcaatggcggacttccaccacaaatggagggattttgactgtatctattgacaatcctggagcagtgcaatgcccagtaactcagaaaccacgattaactcgtactgctgtaccttcatttttaacaaagcgggagcaaagtgacgtcaagaaagttcctaaaggtgttcccctgcagtttgacataaacagtgtcggaaaacagacagggatgacgttgaatgagcggtttgggatcctgaaggaacaaagagccactctcacatacaacaaagggggaagccgctttgtcaccgtgggataggtcccatgtcaaaggaacttttgagtgatgactctgagaagttgaattgcttgaagagttcatcacggaaattcaagaaactttacttcaaaatattcacaaggctaaataactcttannnnnnnnnnnnnnnnnnnnnnnnnnnnnnnnnnnnnncgtataaaataatgccctgaaagaataatagggattatacctgtctgttcttaaagatttcatggttggctcagacagaacaatcatctgtttgacttctttggttcctcatgcagcagaaggaagacagaaagatagaaattgattatttttatgatagcggtattcaggatctcatcacctttgcccgtgttttagactttgtcatggtaaatcctggtcttcataaacatgagtaggtcccttggttgctgtcacttgccctttaatagtgttgatgtagtcagtgccgttgccttttcttcattagagacacagaacaatgtattagaatttccagctgtggg

SEQ ID NO: 188530 - DNA, 2969 bp, Homo Sapiens
  misc_feature (66)..(75): n is a, c, g, or t
  misc_feature (916)..(997): n is a, c, g, or t
ttgggaaaatgcagtgtttcatttttcagggataaatgctaagataaaattgcttttccaggtcannnnnnnnnngtggtaagaataactaatggaaaataatgaaacaccctgggttttgggggtgctaacaacttgtggctttaactgacaggagcaattaaaaagagcaagagggttctgcattggcatagcttagggaagggttaatgatgtcgccacaggtcagctcctgatccttgccgacttgatgttgctgtaccagggcttcctccccagaggtgcagcttgcgttttgagggtgattgctacatatgttgttgctaaacagctcagtaacacacttgaatgaatttggataccagattgtcctcattacagttcttttactcttagggcactctacactgggggttggggttgggagtggttagtacatttattacatttattaagaaacgtaatgacataaaaggttagctctgggccagacttctcttactctgtgggtaatggcaaggatgtgtaggtaaacttggttcttttttttccctaagatgacagcttgattttatcatctgcagtcaaataactgagccaatccaaatttaaatgatagatgctttaattgagtttttaagtagctgaaactgctgagacactaaactttaaccttctgatgactttttaaaatgcctcaaatgtgcacatgtatataggatatttttataacttccctgatgaataatctgatattaaagtagtatttggacccagagccagaactcggtggtggaggctgctggtctctcctcaccaccttcttttgcacttggaaagaacagcaacatctggatagagttctagctttgacttctcatttccttgtctttttgggtgcattcctcagcacacnnnnnnnnnnnnnnnnnnnnnnnnnnnnnnnnnnnnnnnnnnnnnnnnnnnnnnnnnnnnnnnnnnnnnnnnnnnnnnnnnngtgatttgcaatgatgtgcttgcccagctaacttttgaattgcactttttaataaatattcttaacaatttttgaagaaggatattttatctcatttgagatcatggggttaagaaaatatgcctgttgatgaaagctaaaagcaaatttatgaaactaaaagggtgattgacatccatgtttacactccgctctaatgtttgatatataaataagttattttcaaattaggaaaaaacagtgagtattacaaagggcttcagatgtttagagtactaggttatttatgttttacaaagtttgaatcttctataaactaagaaaggggatgatccttagatttgcattaaaatatagaagtcttttaaagtaaatgtgaaccttgtctaagtactgtaatccacacaacacattataagaagcaaaccagcatcttaaggaattataaaattaccctatttaaaagccatgctattgttctgctattaccagatttattgtgccacacaaaaggatcatgtgtgtcagcaggggccgtttggaacaaacctagtcattaatgagtaagatactcctgttagttcagggaccaagttttatgacccagaggcttaatgatgtttggatatatttcaaatcggcatgcttacctcactgatttaaattattttctaaatagtggccattgtagacctgactcaggctgaagctaaatagagaacaatttagaaagttaactaacaatacagtgcattctacccgtagggccaccatgcccttctgcccctggctgatttgatcctgtgtctgatcccattgcaccctgactgggcagtccctacagaaccagtgttaatttgaagggcctccactcaggctccaaatgtggcagccaaagagaacaatccagggaacctacatttatttttaaggacaaatatttcctcctcagtggtcctaatgttcagggctttagagggaacccaggtggtctcttcaccctgtgtcctagaatgggagagtaagtagacagtggtgataaccccacactgcttataagtgcatctttatagtatttggggctttcctacccctttagccttctgtacctagtaccatattccagttttaaagaactggcagaatgtgatggataacagaggaagagctcaatttatgtttattggaagaacattttacttaaatgatttgaggggtgggagggagtgaactactgagtttgccagagtgaaaatccatctgaaaaactcagctacctttagtttttagtcctcatttttggtcttgtctctgcggactgtgaagaatcacaatgctctatatgccctggactgtgtggcaaatgcaggttgcagcgtgtgtgttacatgaggatcttccacaatttcagaatgcacgccagagctgaagggggaaacttggtaacttgcccattattctctgcttttagccagagttaaacagactgatgggtctggtagccaacaacttggcaacttccactccttctcacctcgtgagattaagggctgtgaaaagaaatctagtctaactccaacagaaatctgtctctgttaagtgttttaccttctgtaagtagagatggtagagccaagatttttcttttggtaatttccctgtctataaagtgagaccaaagggatatctgttccctgttacctttttggagaattcataacatttgaagatcaaaaaattgaatgataaatatgaatggcttttcaattctgtggactttgtaccatttggcttcaccttgtactgcaagatgaatttgtaaacaaaacaaaattggactgtctggaaagctaaagttctgaaatatggaatgtactgcctctaatttttctttgtcttcctctcactggcatttttttctctcccaggtttcttaagaataatgttttttaaagatgctttttgcccatca

SEQ ID NO: 188531 - DNA, 1677 bp, Homo Sapiens
caagataaaaaagtacataacccggggaagagtagtgactcccatacatgaactttggttcaggcatttcctggtagcgtgtcagtagtctctccagccgttcttatttagggcccctactggcttactgagatcccggaaggttcctggatttgacaaatctagttctgagctggaataatcatgtattatccatggaaacacagggtactgggagaggtcgttgcagctgcggtcggccaggttgttgaggtgaaggaggtactgatagttggaaaggtgtccacgctgccactgcagcatgtagctctcagcagtgtgctccgccacatggtgctctaggtatgtggcaatgtaaaaatagagatcatctctatcttgaggttcatagaactttaggtagatgtcggaacacagatcatcttctgtgcaaaatacttccaagcccagaggcatgaggccgtgcctccttttgtagatgcggcggacatcttggagtgttatctggaccacaggtttcgggtagccgttgaggggctgaaaatacaggtttgtgtccgtgatgcacacgtgtccaggattagtcaccagaggcgtcaccatttctgctttgcattccatgtgcagcttttcagaaatgttttggaacctgtttttgtcaaatgatgttctagctaaacgagactgcaaaatagctgttatcatggcggtttggtcacccaatttgtcaaggcaggatgctctgtgaagctgaagcaacgtctccacaacatcttccactttcccgggaacatccaattcaaaaacatattccattttgcccctttctattttatatggtgcaacaacattatgttctttaatgaaatatacctgactgaaaatgagtgaaataccccccagattttgcctttgtgaagtgtctattggctccattttctccatgctttcctatttttatacagtctctcaaaggaatcttgatgatgggctgggatattgaatctggttcaaaaatcaccgattttgaacatatttttaaggagcctctgattttcctttcatggtgactgcccttgtgcaaaatgtgattggctctatgctgttcaaagtagtactcctccaagttaagcagcagcaaggaaaatctctccttggagtagagctgcagctgctgctcctgctgcttcttccggataaacgccatggagggtaggcgcgggcgggcgcagagcgcacaggcaggccccgccgccgcctgccgaggaggtccggaggagccggggagggcgggattggtggccggctggggagcgcgcggctgccggcctggcttcccctgcggcgccgctgggcggccgagagcccgacgcggcgtcccggccgcgctcaccgcagcatcctcgcgtggggactccggcggcaccgtgactcaggcccggaggaggggcgcgcggtgacacgaggcgccccaaactcaggccgcctcagaggatcgccagggccagcggccagactaggatccgacctcacacactaaacgtttcaccactttaccaaccattgcaggctgcgttttaaatattttacgcataaaaagggatgctggcccataaaccaccaatctgttggccacaaagacttgaaataacaacgttttgtgtcctccattgccaa

SEQ ID NO: 188532 - DNA, 951 bp, Homo Sapiens
gccaactttgtacaaaaaagttggcctggacacgtgtgcatcacggacacaaacctgtattttcagcccctcaacggctacccggtgtgtagaccacagggtcagaaacctgtggtccagataacactccaagatgtccgccgcatctacaaaaggaggcacggcctcatgcctctgggcttggaagtattttgcacagaagatgatctgtgttccgacatctacctaaagttctatgaacctcaagatagagatgatctctatttttacattgccacatacctagagcaccatgtggcggagcacactgctgagagctacatgctgcagtggcagcgtggacacctttccaactatcagtacctccttcacctcaacaacctggccgaccgcagctgcaacgacctctcccagtaccctgtgtttccatggataatacatgattattccagctcagaactagatttgtcaaatccaggaaccttccgggatctcagtaagccagtaggggccctaaataaggaacggctggagagactactgacacgctaccaggaaatgcctgaaccaaagttcatgtatgggagtcactactcttccccgggttatgtacttttttatcttgttaggattgcaccagagtatatgctgtgcctgcagaatggaagatttgataatgcagatagaatgttcaacagtattgcagaaacttggaaaaactgtctggatggtgcaacggattttaaagagttaattccagaattctatggtgatgatgtgagctttctagtcaatagcctgaagttggatttgggaaagaaacaaggaggacagatggttgacgatgtggagcttcccccttgggcttcccttcccgaggactttctccaaaaaaccagacatgcattggaaagcaattatgtgtctgaacaccttcactaatggattgat

SEQ ID NO: 188533 - DNA, 1097 bp, Homo Sapiens
ttggagctaagctggaagggtgcttatccctgcgtagaaacgcctgccaatgctttctcatttggacccagactccagatcgggagcagtcttatagctggatcagctaccaagagaagttctaaaccaagaagagaaaagcatttcaatttgggacatttatttgcacctggaaatggggaatgggctgtcagaccagacttctatcctgtccaacctgccttcatttcagtctttccacattgttattctgggtttggactgtgctggaaagacaactgtcttatacaggctgcagttcaatgaatttgtaaataccgtacctaccaaaggatttaacactgagaaaattaaggtaaccttgggaaattctaaaacagtcacttttcacttctgggatgtaggtggtcaggagaaattaaggccactgtggaagtcatataccagatgcacagatggcattgtatttgttgtggactctgttgatgtcgaaaggatggaagaagccaaaactgaacttcacaaaataactaggatatcagaaaatcagggagtccctgtacttatagttgctaacaaacaagatttgaggaactcattgtcactttcagaaattgagaaattgttagcaatgggtgaactgagctcatcaactccttggcatttgcagcctacctgtgcaatcataggagatggcctaaaggaaggacttgagaaactacatgatatgatcattaaaagaagaaaaatgttgcggcaacagaaaaagaaaagatgaatatcagtacctattatatctgtgtggagtaggttttctctggtctgattttgacaaatagaagagtgtctacagcgtggtttgcctgtctgccctcctggatgctattaaagctttgttttgttgaacaatcagatgcccaactctgttgccttgtggaagatgagtaaatgcagtgcttcttaaagtggtctcttctccctaccccacaaatcttttggtactaccatttggggaagccaagcaaggatagtaaattgaccagaacacagttgtgggaatttggtctgaagttagtgaaataaaactttaaagagtg

SEQ ID NO: 188534 - DNA, 1078 bp, Homo Sapiens
  misc_feature (143)..(176): n is a, c, g, or t
aggattcgagtccacttccttccacgaaggaagtgctgttgctgacagtggggagagcgagctgggatctccagggcactgacgcttcctccaagccttgctgcatgggcgctcatccaggcagcttgacggagctatgcgtnnnnnnnnnnnnnnnnnnnnnnnnnnnnnnnnnncccaccccaagtctgtcttttctcaaactaaaggagaaactaagggatggtgtggcctccggcgggcctccgtagttaagagatgatggctggggaccaccggggcagagtcaggttgtctgcactggctgagcgcttcctcgcggatcttcttaggtccttgtacttgtcctcgcagaggcgagagatggcctcaagcttgtgagccctctccctgctcaggggctccaagggaaagctcaggttgttcgcttctgccagagaacgaagatcaaaataatacttggcatagacactggaaggaacattgatgttgaactgcagcaattcaagaaactgtcgctctagctcgttcatgtcctccaccgtgatgtctttcaggatctggcagtaatccacattccatacagcctggtcatcccacaccttggaggccagcaggatcgcccctaaaacaatccgcttccagttggccggacagatatctatctctgcgtatgttaaaagtctttcaaggtacaccagggtgacgatggcacattcagccgtcagctgagcagcactgaacagtgtccgaacgaaccggtaaatctgcttctgctctgggttgtgtttgtcataatctggtggcacttcggatttcgaaagagggtgaagattttcatcaaaaatatctaagagcatccttccatctgggtccctgtttttgatgtgataatatattgcaagagcgacacatttaattgtatacttgaggtttggttgactgactgtgctatcatctaggaaaatggtggagcaggaactgtatttccttgctatttgtcctggaggatgatggttaatgaagagactcttgcgtttttctctcacgtccgtctgagatttactgaggaatccaa

SEQ ID NO: 188535 - DNA, 1511 bp, Homo Sapiens
  misc_feature (1025)..(1045): n is a, c, g, or t
ttggcacctcctccacccacctcggcctccccatctttactgagtaataggccacctcccccagcccgagaccctcccagtcggggagcagctcctccacccccaccacctgtgatccgaaatggtgccagggatgctccccctcccccaccaccataccgaatgcatgggtcagaacccccgagccgaggaaagcccccacctccaccctcaaggacgccagctgggccaccccctcctcctccaccgcccctgaggaatggccacagagattctatcaccactgtccggtctttcttggatgattttgagtcaaagtattccttccatccagtagaagactttcctgctccagaagaatataaacactttcagaggatatatcccagcaaaacaaaccgagctgcccgtggagccccacctctgccacccattctcaggtgaagcctggcttggtcccgttcctcaggaaaaggatggaccttctcttcttctcagatggtcccttccattcccctgaaacctgcatgagagctcctaacatgtttctccaatgcaatcaagccctagactccaaatgtcctcccagctcacctccatctatgcatctcatctctggatttggtgatcagactctatattgacagtaggatctcaaaccctgcatccatccttcctccagcaagccctgctagccacatgaggaacaagtttccgtgtcttctgccttcctcttggggaaaggtgccttgttgtgatgaattaactcactgttagggcagggtggagaatggtactccttccttctcctgtccactgtgggggaagcttggcaggtatattatatttcatcatttagaggctggcatgaccaggacttatgggtgggaggggagcatttttagtgaagcaagaaaggagtttgccaagaagtgatctgttttaaaggtcatatttggagaaagggcaaggaattgggtctgctttatttttgggggtattttgtttttgttctcacctgctgnnnnnnnnnnnnnnnnnnnnngggataaattggatataaacactaaatactaatcagttgaacttaacatttaataaaaagaaagggtgaaataaactgaagaccattttagaactagtcagttctctgcagcaaagggaacaggagccatttgaaccctctgggacccctcaccccactgcttcagggtgctaggctgagggatgtttttcctcccccttaccgcccatgcccttgaaagaaaagtcactttttgtggagggcatcattcatttctgattcacaaaccccaaaaacctctggtgggagataggaagataaggcgtgggcctgggcgttaacctcaatcttgtgtctgcctcagtcttttctgactggccctgaagttgtcagtggctctttctgtccttcaaccctggaaggtgctccaggataacaaagaaaggcaggttgaaacccccccatggaaagagctggctttgtgggg

SEQ ID NO: 188536 - DNA, 1127 bp, Homo Sapiens
  misc_feature (179)..(201): n is a, c, g, or t
  misc_feature (875)..(918): n is a, c, g, or t
ttggattcaaataaaacttcaactggtttgaagtaactttttaattatttgatatccaggaacttttttgccagcaatagtattaaacagttgtaaaggagtgcatgagtagtgctctttatgaaacgcaacatgcaataatagagtaggtatggtttcagaagtcagagcagcagggnnnnnnnnnnnnnnnnnnnnnnnacactatgctaatttcagacaaacagttttcaatttagaaatacaaaaacttttaaactcgaaaaatggcgaacactggttttttgggaattgtgtttttactttgcatcaagatgaatttaggagaaaatcacggtgcttttattaaatgaacttcagatatatgtaaatttgttttttaaagttacatcattaacattagtaacctagcattttcattattggtataggaattaatgtttattgtacagtatctaaggtaaaatgtgtttctgttttgtaaaaactactgtagatttttacttacaagtgcctttttgccacctaatgtttttatttataggaatgctgatcttttgtacatacattttgttttaaaatcatgtttaataaatgtttgtatataaatgcatatgtacagaagcctatttcaaaaggaaatcaaagttgctagtaaaatgtttgagattacatttagaactaactgataatgcatatagattgtagaaaattttgtgatttgtttctgtgtgataagggaagctgttggtctttgaattcatttaattatgtcaaaatagttccccaaagatttaattttaagttgcttcttaaagagtaattttattttttatgtcatgtggcttcatattagtattgtgtgagttacatgnnnnnnnnnnnnnnnnnnnnnnnnnnnnnnnnnnnnnnnnnnnnctgcagtgatccatgtatctgctttccctatgtgtggttatctaagttaatatttatgtacaatgtaatttgtaaatttaaagcaaatctgaaaaaattaaatgatctttttaatccaatctgtgataatctttgaataaattggaatctactataagattcaagcattataagtaaattgtcctaaagtctttaaaattgtctataaa

SEQ ID NO: 188537 - DNA, 1101 bp, Homo Sapiens
  misc_feature (175)..(187): n is a, c, g, or t
ttggtttaaattttactagcaaaagtcttaggtgaacaatcaactagtatttgttgagctcctatttgcccagagatggtcatatttaaacagaagtatacgtttttcagtttcaacatgaatttttttatttctgtcagttatgacatccacgagcatcactttttgtgtctgnnnnnnnnnnnnncttggactaaattcaactgcatggaagcggtggtcaaaaggttgttttatacgagaacaggcagaaagtgcccattgttcaggattctaatagctacatctacttaatatcttcatttctaaattgactgcttttacctttttctcatgtttatataatggtatgcttgcatatatttcatgaatacattgtacatattatgttaatatttacacaatttaaaatatagatgtgttttattttgaagtgagaaaatgaacattaacaggcatgtttgtacagctagaatatattagtaagatactgtttttcgtcattccagagctacaactaataacacgaggttccaaagctgaagactttgtataaagtatttgggttttgttcttgtattgctttctttcaacagtttcaaaataaaatatcatacaaatattgagggaaatgttttcatatttttcaaaataggtttttattgttgaatgtacatctaccccagcccctcaaaagaaaaactgtttacatagaaattcctacacatacgtttgcgtatatgttattttaaacatctttgtggtgagaattttttccccgatattctccttctgtcaaagtcagaacaaattcagggaatttattttctggcagttgtgctccagtccttttaaaattgtacatgaacatgttttagaaacaatatggaggatgatgcatacatgtcggtcaagttcagcgctcgacattttatggaaagatttttttaaccttaccacgaaatacttaactactgtttaagtgaattgacttatttcactttagtttttgaactgtgattattggtatactgttatatcctcaacttggatttatggtaaccccttttagttcatggagaccaaaatttggggtattta

SEQ ID NO: 188538 - DNA, 1235 bp, Homo Sapiens
aaaaaataaattgaaaaccagaaattcaaactgcccatagacaatcatataaaagttgggaaaatgagaaatggagcttaaccattgaaagtctcccctcctccattcctagctcacacaattccaggaacagaatcctcaacataaacgtaagcttcccctctgctgcattaagaaagtgtcacttctttgcgtcgaatgggttgaaagctttgggagatgaacgggaaatttcaagtccaccactttcatcaatttcccttgttcttcccgttctcagtccgcactcccaaggcacgggcagcttcgccgggaagcggcttgagggagttggcctgcctcgtggccgtgggggagggcagggaaggcgcggtggcgcacagcggagtcctcttcagctttatcacccgctggggtgtaggcttcttgtcggagagtagcaccttagctggaggtaagtgcgtgcctccattttcagcgctcgcagccccaggggaagcctgaggatgcccaggtgcccccgtgcccaccagggccgtggctctggaaggtgcagagcgctgagctgcctttctgcggctaccactttgaaaccggtttgctgtcgccccagccgacgtctggatggcactggctggagacaccgtgactgaggccgagttcttgactttaatttgggtacttgtggaagggcccaaaaatctaactggcttaggaccagtcttatagttcacactttcgtccgcttcattgaacgttatcagtcgcctctttcgaattggagccatgtgacgcaggcttccaagtaaaggccgttcttctagagtccaacactctatcagctcatgaggcacccgccagtagctaacaccttttccttcccaagcatcaaaggcatccatcattttcttcaactctgctactgaataatagctccaaatgtactgaacattatttcccgcctctcttttaaaaatgcctttgctgtgaattcttcctcccagctgcttttcaatagcgtctgttccatcagtttttgtggcatatacaccaataattctactctcacagcttgcaccagatgtgttaagatagtggagaacccaaactgttggtttattgcagactaagccatatgaatcacagaagtctgttaaagcctttttaagttctatatttgaccttaaagaatatgtctccatttcattggccaaatccaacttttttgtacaaag

SEQ ID NO: 188539 - DNA, 1628 bp, Homo Sapiens
  misc_feature (1018)..(1026): n is a, c, g, or t
ttggcccagaccgagacctcgggaatgctccggccccctgccgccgtctcccggcccggttctctttcactaaaaataggcgattctggcagcgcccctcctatggggccttgggggcaattggggttttgtcttagagcccgtgtggacccggatggcgacggcagcccgaggagagggagggctgactgtatggttggctttccgacgaccagaccctgcaggattcggcctttccctttggagttttcctccatccccctccgtccctcccaggggatgcccgcaggccacagtggtcactgaaggtcaaccctgagccgaaggagaagtggcctcgaccctggggaccccttcaggtgcagcttgagggggaacggccgcctttcccgttgggcacccagctgtggctgtgccctgtcctcgcccagctcccggcataggcatgcgctctgggccggggccggggccccccgcctccccgggaggaatcgctgggttgactctgggtcagcaaagggagcccggccctttctagcggggggacgtcctgcagccgctggaggaggctgagtcacgcttttcccaccagaagtctacctgcctcttgcgagctgatgttttttaagatctgaagtttgatatatacagtcattaattcagagttaagactgcagaagtagatgaagaaattctggaattccttaatttatttgtggcagcactcagaatgcaaagtttcacaagtgtctccatttttttctcctttgcaattaaaagggctgtttaatattaagctttcacggcttggaagattcctgtgaatatttcaatactgtccagtcttaaagctgcagagaatcgggctttgcagaacactccactgtttttaatggcatgaatttaacagtgtttggcatggtgtcactgcccaacactttcagataactcaactgaagaagttgaccctatcttctgcaaaataacatgagtatatacttgagaaaagcctcaacannnnnnnnnggctgccatttttagctacctcaaaggagataacagaaaaacaaggagtactgatgatggaagcatctggtccctcttgcagagtgatgaatgattttattggtggcagctgggtggcaggacaatccaggcatccagttatgcctgatccccaataagtgaaatctttgttcattttctttttatacacccgtctgcttcctaaaacctgacaccatttaatggtgcccttggtcaaatctaaatgatcttactttcataattctttgattctagcttgcagagtcaagacgaactctaactcatgggatggacaaactggaagatgtaaaataagtaaggctttctgggccaaaaagcctcttcttacagaaaatcaaattttaaaagaacattgacctcaaaacaataaaaactgtcctggttatgcaatagaaatagctatataaaatggaatcatatccttaatgaacacctcctgtgggctacccaacttttcacacatcttactgattatacgccttgctgtgatagctttcttgctctatctgaagtattcccaccagagttgtttccaactttatttcccatatttatgaaaa

SEQ ID NO: 188540 - DNA, 979 bp, Homo Sapiens
ttgggttttaatgagtgactggtctgtgagctttacttctctatataatttgctgaagacaaaactttgcccctatttctacgtttgtacctatcagtttactgtcctgttccgagcagcaggattagctggaagtgacttaatcacagctctcatatctccaacaactcgaggtttaagagaagctatgagaaatgaaggtattgaattttctctgcctttaataaaagaaagtggccataagaaggagacagcatctggaacaagcttgggatatggggaggagcaagccatcagtgatgaggatgaagaggaaagtttttcctggctggaagagatgggtgtgcaagataaaattaaaaagccagacatactttctatcaagctgcgtaaagagaaacatgaagtacaaatggatcacagacctgaatctgttgtgttggtaaaaggaatcaacacctttacattgctcaattttttgattaactctaagagtttagttgctacctcaggtccacaggcaggacttcctccaaccctcttgtcccctgttgctttccgaggtgccacaatgcaaatgcttaaggcacggagtgtgaatgtgaagacacaagctctttctggatacagagaccaatttagtttggagattacaggtcctatcatgcctcattctctgcattcactgaccatgctgctcaaatcttcacagagtggatctttctctgcagtactgtatccacacgagccaactgctgtatttaacatctgcctgcaaatggacaaagtacttgatatggaggttgttcataaggagcttactaactgtggtttgcaccctaacactctggagcaacttagtcaaataccgttacttgggaaatcatctttacggaatgtggtgctgagagactacatttataattggagatcctgaacaccaaagtaagccctaaaaggaatctttgacgaaaaaagc

SEQ ID NO: 188541 - DNA, 927 bp, Homo Sapiens
ttggctttaataaaattctctatttctcaatgggcaaaaactgcccactgtcacctttggattttaggatcccaaactctcctctgagctccgttgtaccttccagcagagccttatctattggctccaccctgctttgtcttggctaccactgttccctcgtattggagctgatagaaaaatggctggaaagacaagtccttggtcaaatgatgcaaccctgcagcatgttttaatgagtgactggtattgaattttctctgcctttaataaaagaaagtggccataagaaggagacagcatctggaacaagcttgggatatggggagtatgtgattaaaataactttatatcatccactgacttatggactcatgaaatagatttgcacaggaacagcttgtgaaatagggactctaactgtagcaatttcctagggagcaagccatcagtgatgaggatgaagaggaaagtttttcctggctggaagagatgggtgtgcaagataaaattaaaaagccagacatactttctatcaagctgcgtaaagagaaacatgaagtacaaatggatcacagacctgaatctgttgtgttggtaaaaggaatcaacacctttacattgctcaattttttgattaactctaagagtttagttgctacctcaggtccacaggcaggacttcctccaaccctcttgtcccctgttgctttccgaggtgccacaatgcaaatgcttaaggcacggagtgtgaatgtgaagacacaagctctttctggatacagagaccaatttagtttggaaaatacaggtcctatcatgcctcattctctgcattcactgaccatgctgctcaaatcttcacagagtggatctttctctgcagtactgtatccacacgagccaactgctgtatttaacatctgc

SEQ ID NO: 188542 - DNA, 1489 bp, Homo Sapiens
actttgtacaaaaaagttggagttttttgtcgatggtagtacaaggagcgtctctttgggaagaagtacgtctggttcctcattgggtggtatgctgacaattggttcaagatctacgacccttctatcaactgcacagtggatgagatgactgaggcggtggagggccacatcacaactgagattgtcatgctgaatcctgccaatacccgcagcatttccaacatgacatcccaggaatttgtggagaaactaaccaagcgactgaaaagacaccctgaggagacaggaggcttccaggaggcaccgctggcctatgatgccatctgggccttggcactggccctgaacaagacatctggaggaggcggccgttctggtgtgcgcctggaggacttcaactacaacaaccagaccattaccgaccaaatctaccgggcaatgaactcttcgtcctttgagggtgtctctggccatgtggtgtttgatgccagcggctctcggatggcatggacgcttatcgagcagcttcagggtggcagctacaagaagattggctactatgacagcaccaaggatgatctttcctggtccaaaacagataaatggattgttatatccagaactcacagcccaacctgaacaacctgactgctgtgggctgctcactggctttagctgctgtcttccccctggggctcgatggttaccacattgggaggaaccagtttcctttcgtctgccaggcccgcctctggctcctgggcctgggctttagtctgggctacggttccatgttcaccaagatttggtgggtccacacggtcttcacaaagaaggaagaaaagaaggagtggaggaagactctggaaccctggaagctgtatgccacagtgggcctgctggtgggcatggatgtcctcactctcgccatctggcagatcgtggaccctctgcaccggaccattgagacatttgccaaggaggaacctaaggaagatattgacgtctctattctgccccagctggagcattgcagctccaggaagatgaatacatggcttggcattttctatggttacaaggggctgctgctgctgctgggaatcttccttgcttatgagaccaagagtgtgtccactgagaagatcaatgatcaccgggctgtgggcatggctatctacaatgtggcagtcctgtgcctcatcactgctcctgtcaccatgattctgtccagccagcaggatgcagcctttgcctttgcctctcttgccatagttttctcctcctatatcactcttgttgtgctctttgtgcccaagatgcgcaggctgatcacccgaggggaatggcagtcggaggcgcagacaccatgaagacagggtcatcgaccaacaacaacgaggaggagaagtctcggctgttggagatgagaaccgtgaactggaaaagatcattgctgagaaagaggagcgtgtctctgaactgc

SEQ ID NO: 188543 - DNA, 1130 bp, Homo Sapiens
ttggtgaggcagacccctgcctctcgcggccctgcctacacgggggcgtctgcagcgccgcccaccctggcttccgctgcacctgcctcgagagcttcacgggcccgcagtgccagacgctggtggattggtgcagccgccagccttgtcaaaacgggggtcgctgcgtccagactggggcctattgcctttgtccccctggatggagcggacgcctctgtgacatccgaagcttgccctgcagggaggccgcagcccagatcggggtgcggctggagcagctgtgtcaggcgggtgggcagtgtgtggatgaagacagctcccactactgcgtgtgcccagagggccgtactggtagccactgtgagcaggaggtggacccctgcttggcccagccctgccagcatggggggacctgccgtggctatatggggggctacatgtgtgagtgtcttcctggctacaatggtgataactgtgaggacgacgtggacgagtgtgcctcccagccctgccagcacgggggttcatgcattgacctcgtggcccgctatctctgctcctgtcccccaggaacgctgggggtgctctgcgagattaatgaggatgactgcggcccaggcccaccgctggactcagggccccggtgcctacacaatggcacctgcgtggacctggtgggtggtttccgctgcacctgtcccccaggatacactggtttgcgctgcgaggcagacatcaatgagtgtcgctcaggtgcctgccacgcggcacacacccgggactgcctgcaggacccaggcggaggtttccgttgcctttgtcatgctggcttctcaggtcctcgctgtcagactgtcctgtctccctgcgagtcccagccatgccagcatggaggccagtgccgtcctagcccgggtcctgggggtgggctgaccttcacctgtcactgtgcccagccgttctggggtccgcgttgcgagcgggtggcgcgctcctgccgggagctgcagtgcccggtgggcgtcccatgccagcagacgccccgcgggccgcgctgcgcctgccccccagggttgtcgggaccctcctgccgcagcttcccggggtcgccgccgggggccagcaac

SEQ ID NO: 188544 - DNA, 1754 bp, Homo Sapiens
aaaaagtctccctgaggactgcagcaggacacacgtatctttcctcttggtggagtgcagagcgccctgccgaggctcttctttcctgagtcatttatcccagtgggcgaaaggtggatcatttgggtgcatcacttggctggattccaaaggtcttgagggggccatcaagtaccccaaggggcctggggctggttgtcaaagaaggcaaagtccagcctgggctcctggctcttcaggtgctgggccatgtcgcagggaatggggttattccagaggcggatgacttggatgctagacccctgggccagtccttcagccaggagccaggcccccaaagctgtgatctgattcttctccaggtccactctcttcagccggcccatctgcggcagcacctgggccagctcggcagctgcctcatccccgaggagattccaggacagcaagattacttccagggcagggcagctcgtgaagctggaggtgaggagcttggcagtctggttgtcaatcttacaggaaaccaggtctatctgtctgagcagcgggagctccatacagaaacgcaggacccctccagccaggttgttttccgccaagctgatctcttccaaatggggggatccatccagggcctgggccaggctcagggccccacctgggcccagatggctgaatggtaggtgtaggaccctcaggtgctggggcagctcctgagccagccccagggctgtgggatcccccagggcattgcagccaagcatcaactcctccaggcgcctgcaaagaacgagagactctgccaactgcactcccccggctgagctgatgctattccctgagaggtctatcttcctgagctctggcagcccaggcaggatggtagctaagtgctggacaccagcgtctccaatctggttgtggctcaagtccagctcctctaggctggtggcagccctgagagcctcagaaaggtggcagcaaccgacatcaccgatactgttcctgttcagtctgaggctctgcaggcaggtcatctggcttagtctgtgagtaagcaaggccaaggtggagctgttcagcagaaggtgactgaggtccagcctctttagcatccatttcccctcaagggccctcatcagcgccttggtgccctcctcatcaaattgattgttagacaagtccagctcctccaagtggtggcagtggcccagaccagatgccaggtgggcgaggccctcggtgctcacacagctggaggtcagccgaaatgtcttcagctcagagagggacagcaggaggctctgcagcagcagggaactggcatcatcgtcctcacagaggttaacctgagacaagctgagctgctgcagcctggcacatgtctccatcagctgcccgacaagaaggctgtggtgggctccaaggtcacagtagccaacctgagtgccacagcttctggattctcttcctggcgaggaaattccagctggacacagagctgctgctgggtctcggagatgctgatttcagtgacactgcctgaggcctgggcgcagacttctaacagggagagaaccctggctctgtccgcccacggctcctgcaccctgaggctgaacagccctgcgggtcgccccaccaagctcaggaggatggccagctgcttctggcccaggcagcactgggtcagcgtgagctccgtcagctgcagggacttgctcaagccggtggccagcctggacacccaa

SEQ ID NO: 188545 - DNA, 1217 bp, Homo Sapiens
  misc_feature (927)..(959): n is a, c, g, or t
ttggagaaatgacacaacatttggcaatgacatttaaccaagtaatccagacggggccagatgaagaaggtagtgatgacaaagcagttactgctatgggaattctgaatacaattgatacacttcttagtgtagttgaagatcataaagagataacccaacagcttgagggaatctgcttacaggtcattggtactgttttacaacagcatgtcttagaattctatgaggagatcttctctttagcgcacagtttgacatgtcaacaagtgtctccacagatgtgggctactaccccttgtatttgaagtctttcagcaagatggctttgattactttacagatatgatgcccctccttcataattatgtaacagttgatacagacacacttctgtctgacaccaagtatcttgaaatgatatacagtatgtgcaaaaaggttcttacaggagttgcaggagaagatgcagagtgtcatgcagcaaaattgttagaggtcatcattctgcagtgcaaagggcgtggcattgaccagtgcattcccttattcgtggaagcagccttagaaagactgacaagagaggttaagacaagtgaacttcgaactatgtgtctgcaagttgcaattgcagctttgtattataatccacacctactactcaataccttagaaaatcttcgcttccctaataatgttgaaccagttacaaatcattttattacacagtggcttaatgatgttgactgtttcttggggcttcatgacagaaagatgtgtgttctcggactctgtgctcttattgatatggaacagataccccaagttttaaatcaggtttctggacagattttgccggcttttatccttttatttaacggattgaaaagagcatatgcctgccatgcagaacatgagaatgacagnnnnnnnnnnnnnnnnnnnnnnnnnnnnnnnnnaaccgaggaactggggagtgatgaagatgatattgatgaagatgggcaagaatatttggagattctggctaagcaagctggtgaagatggagatgatgaagattgggaagaagatgatgctgaagagactgctctggaaagctattccacaatcattgatgatgaagataaccctgttgatgagtatcagatatttaaagctatctttcaaactattcaaatcgtaatcctgtgtggtatcagcactgactcacggtc

SEQ ID NO: 188546 - DNA, 2316 bp, Homo Sapiens
ttggctcttgcagaggatcacattaatttcactattgggcgccagtcctatactcttagacagctggataatgctgtgtctgcttttaggcatattctaattaatgaaagtaaacaatctgctgctcaacagggggctttcctcagagaatatctttatgtttacaagaatgtaagtcagctgtcaccagatggtcctttgccacagcttcctttaccgtatattaacagttcagcaacacgggttttttttggccatgacagacgaccagcggatggtgaaaaacaagcagctactcatgtaagtcttgatcaagaatatgattctgaatcctctcagcagtggcgagaacttgaggaacaagttgtttctgtggttaacaaaggagtaattccatccaattttcatcccacacaatactgtttgaacagttactcagataattcaagatttccacttgcagttgtagaagaaccaattacagtggaagtggcttttagaaaccctttgaaagttctacttttgttgactgatttgtcattgctttggaagtttcatcctaaagatttcagtggaaaggataatgaagaagttaaacaactagttacaagtgaacctgaaatgattggagctgaagttatttcagagttcttaattaatggcgaagaatcaaaagtggcaagactaaagctctttccccatcacataggggagctgcatattctgggagttgtttataatcttggcactattcagggctctatgacagtagatggcattggtgctcttcccggatgtcacacaggaaaatattccttgagtatgtcagtccgagggaagcaggatttagaaattcaaggtcctcgacttaacaacacaaaagaagagaaaacatctgttaaatatggccctgatcgacgtttagatcccataatcacagaagaaatgccactgttggaggtgttctttatacattttcctacagggcttctctgtggagaaatccgaaaagcatatgtagaatttgtcaatgtcagcaaatgtccacttactggattgaaggttgtttctaaacgtccagagttctttactttcggtggtaatactgctgttctaacaccactaagtccctcagcttctgagaattgtagtgcttacaagactgttgtgacagatgctacctctgtgtgtacagcactcatatcatcagcttcttctgtagactttggcattggcacaggaagtcaaccagaggtgattcctgttccccttcctgacactgttcttctacccggagcctcagtgcagctgccaatgtggttacgtgggcctgatgaagaaggtgtccatgaaattaactttttgttttactatgaaagtgtcaaaaagcagccaaaaatacggcacagaatattaagacacactgcaattatttgtaccagtcggtctttaaatgtacgggccactgtctgcagaagtaattctcttgaaaatgaagaaggcagaggaggcaatatgctagtctttgtggatgtggaaaataccaatactagtgaagcaggcgttaaggaattccacatagtgcaagtatcaagtagtagcaaacactggaagttacagaaatctgtaaatctttctgaaaacaaagataccaaacttgccagtagggagaagggaaagttttgctttaaggcaataagatgtgagaaagaagaagcggccacacagtcctctgaaaaatatacctttgcagatatcatctttggaaatgaacagataataagttcagcaagcccatgtgcagacttcttttatcgaagtttatcttctgaattgaaaaaaccacaagctcacttgcctgtgcatacagaaaaacagtcaacagaggatgctgtgagattgattcaaaaatgcagtgaggtagatttgaatattgtcatattatggaaggcatacgttgtggaagacagtaaacagcttattttggaaggtcaacatcatgttattcttcgcactataggaaaagaagccttttcatatcctcagaaacaggagccaccagaaatggaactattgaaatttttcaggccagaaaacattacagtttcctcaaggccatcagtagagcagctttctagtctcattaaaacgagtcttcactacccagaatcatttaatcatccatttcatcaaaaaagcctttgtttagtaccagtcactcttttactttccaattgttctacggctgatgtagatgtcatagttgatcttcggcataaaacaacaagtccagaagcactggaaatccatggatca

SEQ ID NO: 188547 - DNA, 895 bp, Homo Sapiens
ttgtattatgtgtatttttcctcctctctccctctctgctcgctctagagagagataccaaatactggcttggtgctatactgttttttcctagttaatatttttattatttctgtctacgtaagaaacttcaaatattctgaatgcaaccacacaatcgagtaagttgacagacatgacaaaaactacgaaaagagggaggtaactagtattaatacttggcaacctttcgttatttttagtttagagcggcctccctctgacattttggagtcaaagatgaaaactcaactttgaagcataatggacataattacacatttaccacagtcatctacaattttatataacatcacaaaaagacatctaaacatttttctacgtctttttttcatttgttaaaacagctatgttaaatacattttcagaatgcatttgttagccacttgataaacatactaaaagccatacaagacgaataacatcagttacctttatatctaataactgtaccaatcactgtaagaagatacaactgaaggggaagtattagatcacccatgacgtactgcaaaggtgttacaccttagacctaagaatgatctgaaggtgctgaaagaggtgattctctagaaggtgacccagggttttcttcaggtggaaaaactgtgagtgtacaggctcgaatgccaccaagtgactctggaagatcaaaaactttatgccactcatctttttctgggtcatatttctggacaatttctaccatacaacgattattccaagaatatccaccaacaacatagattttattttcaaagacggcaactccaacatcactttggcctcttaacatggcggcaattggggtccactggtcaagggttggtgccaa

SEQ ID NO: 188548 - DNA, 1106 bp, Homo Sapiens
gggctcctgagaagatgacggtgtttggacgagccttgaaacaagctgcttctttctgctgtctcagttctcttccagctggtgcttccaagtctgtgccttcagagcactcttctgtcagtctccaagcagaaaggttcaatctgggtcacattctttatttcttctctggcaggttaatggtgtcaaaatgaggcaagggaagtgccttgaacttgggcacctcccctttctgcagttcttttattttcttctccttctgtaactgacgttctttgtctcgagaatcaaacgagaaagggcatatttccacagttcttgcctctgggatttggggcttaaaaggcaccccataatgtggcacaggttgagcttttatcactaccggttcgtcctcttcctcatcttctttggtgggcattcgaattctgttcttcaatgcaaaggctggtgacttggggacggtgattggaagtaccttcttttcaggaacacccacaacatcttccaaaatcttagtagggcaaggtctggaatgaaattcaaagtgttcatcctctgttttcttctttgattctcgctcctggattcttttctcaatttccaaatcaaagccaataggctcggtgggtggtttcacaggtggtttcttgggcaagatgggcccaccttcaagtattctgggatcaagttcacgtgctttgaatttgtattgttgcaatttctcgagctcctcagcctccagctctgctgtacttttgcaggtcacagcccgtgcacggtgtttggtttgcagtacaggagtctgtgggtctctgcaaatcttggtcacagaagatttggagggtaacaggttaatatcatccttcttgctcctcaaatgatatctgttaggggttcgtttatggaagtcttcaacttgctgtgcaaggggcacatatgtagaaactgtttcatcaaatgttcttttctttccttgggacaggttgaaaggcttaacaatggtacatcccttagtcactcgggcaggagatgaaggatgctttcgtagttcagatgtaaagttcacttccttatattcctcctggttcttaggatgttgccaa

SEQ ID NO: 188549 - DNA, 898 bp, Homo Sapiens
ttggcgctgagatgtacgaacttccggttctccgggcagctgccactgctgtagcttctgccacctgccacgaccgggcctctccctggcgtttggtcacctctgcttcattctccaccgcgcctatggtccctcttggagccagcgtggcgggcctggcggctcccgggtggtgagagagcggtccgggaacgatgaaggcctcgcagtgctgctgctgtctcagccacctcttggcttccgtcctcctcctgctgttgctgcctgaactaagcgggcccctggcagtcctgctgcaggcagccgaggccgcgccaggtcttgggcctcctgaccctagaccacggacattaccgccgctgccaccgggccctacccctgcccagcagccgggccgtggtctggctgaagctgcggggccgcggggctccgagggaggcaatggcagcaaccctgtggccgggcttgagacggacgatcacggagggaaggccggggaaggctcggtgggtggcggccttgctgtgagccccaaccctggcgacaagcccatgacccagcgggccctgaccgtgttgatggtggtgagcggcgcggtgctggtgtacttcgtggtcaggacggtcaggatgagaagaagaaaccgaaagactaggagatatggagttttggacactaacatagaaaatatggaattgacacctttagaacaggatgatgaggatgatgacaacacgttgtttgatgccatcatcctcgaagataagaatgtgccttttgatgaaagaactttatctttctacaatgaagagtggaattctatgtttaaggaataaaaacccactatatcaatgttggggggggtatttaagttacatatattttaacaacctttatt

SEQ ID NO: 188550 - DNA, 1328 bp, Homo Sapiens
tttcaaatgaagacaaagattcctctgataaagactgttaccagacgcaccaagattatctacgatcttcagagcttgactgcatgaaagaacagcttctttaggtctatgcattttgacttgggcttctgccagatgataccatccacttgtgcagacagggctttcctttaacccttctgttaggttcctaacagcatcttcatactttttgtcttgtaatgctttaatgcctaagccaatgaggcctggaccactttttgaatccatttccactaatctacaacaatactgctgcccctcatcagtaagatttcctgattcaattaaatgcaaacaaagcacttctaatggatactgtacagtaggatagatgtttatcattccttcacaggccttcttcaatctagcagactcatgaggaaatttggataaactctgaatgaaatgcctataaagtacttggtgatcttcactaggaatcttatctgataatcccagtgcattctcaaaagcagtaaaaagcaattgctgagtttcattattctggtcctctgtactttcagccaggaactgagtcaattttctccatagttgatgaagctcttcattttctgcaccttgttcctgccgtgtttttatcaacttgtgccatgttcgagccacctctaggtgtttcttttcttggtaatatagatccacaagtttcttgcagacatcacaccacttctgcttgtcaacactctcataaagatccaggagcttttggtaaacaccaggcaagtcatccttagcatttatgtgattatatttctcatacaagtttgctaacccctgccaagctagtaattggtctggctctaattcagcagcttttttataggcactctgggcctgatcaggttgttctagttcagctgcagcaacgccaataaaaacccaggcattatagttatttttctcttgctttaacactgtcttacagtgtttcaaagcttctttgtattctttgtttctgattgcatctctagcactttttagagcagtcttcacttccttgctggacattcttatctgaaattatcttggtatatatttataggtgaaagcttcagaatgatttttttgtagtttgcaaatcttgattggagtaggtaacaaatttcaatgctgatttcacaattttctcaaaccagtttcctttggttaaaaaaaaccctgcagacttttaccaattattaccacctctatattcttcccgaattgaatttgattgttccttacccattttccatctggagcagatgctcctcttctacaaacgccaa

SEQ ID NO: 188551 - DNA, 1335 bp, Homo Sapiens
ttgtcgttaatatataacttttcattctttccaaaaattttacaactatacagctgttgctccataattggcataggaaatgaccacaataccaaaaataagagggaaaagaagcaaaacagcaacccgatttctgcttttcatgtaggtgtgtttccacgtataaacatttgaagcctcttacaaaattatttacatcgtttgtcatctatttacatcttttaagagcaacttttctaacaaacaaaactataatttatcaagttatgaaaattgtcttctaaaaaaacttactatattaccacaaaataaataaagataaacaatattttaaaaacaaaattaaattttcatttcaattaagaccccttttggcattttgcttatttattctgccctttggttaacagcatcagcatcacattactattttatattgcatatatgtagcatttgcttccttaagttttcaacatatcatttatatttaaaggcagacactgagtcagtattaatagattaactaaactgcactgtaatttagataaaattactgtgtctcactgtgtattacatgcaaaatccacataaattgtcatttaaccaacagtactgcacgagcgaacatctcgatatatgaaaactgcatcatcaattcaacgttttggtacttgaaactgcatcataaatgcaacattgtcatatgtgaaaacgacaccctaagtccttctttttaaaaatgacattgcgtttagcttattgtaagaggttgaacttttgtattttgtaactatctttaagctcttcagtttataattcatataaaatgccttttgtatttaaaataatcctattttaatcagtgcatgaaatttgcttttttaaagttcatttgaatgattattccttccctctaaagaaatgattttggtaatgttgagaggtaccttaccacaaatcctaactgtaagtgtattcatggttattttcaaaagaattatgactcttccccaaaagaatcctaaaaaacttgtaataaacctataaagctgatttgcatatttacaaaattttgaatagcaaatataggcaactcatatatgtatataatttttaaaaacccacacatttgttcaatggctatttgtgaattgccaggtatactgtatctctaaggaattacctactattgaaaaaaactactcaatgccaagtaaaatcttgacatacaatccattcttcttctggtgcctgccaactgatttgtttactgaacactgtcacattaaatgatggtgccatagggtaaaaacgctccaacttttttgtacaaag

SEQ ID NO: 188552 - DNA, 868 bp, Homo Sapiens
gcatcatcaaatcaaggtttggtacttgaaactgcatcattaaatgcaacatgtcatatgtgaaaacgacaccctaagtccttctttttaaaaaatgacattgcgtttagcttattgtaagaggttgaacttttgtattttgtaactatctttaagctcttcagtttataattcatataaaatgccttttgtatttaaaataatcctattttaatcagtgcatgaaatttgcttttttaaagttcatttgaatgattattccttccctctaaagaaatgattttggtaatgttgagaggtaccttaccacaaatcctaactgtaagtgtattcatggttattttcaaaagaattatgactcttccccaaaagaatcctaaaaaacttgtaataaacctataaagctgatttgcatatttacaaaattttgaatagcaaatataggcaactcatatatgtatataatttttaaaaacccacacatttgttcaatggctatttgtgaattgccaggtatactgtatctctaaggaattacctactattgaaaaaaactactcaatgccaagtaaaatcttgacatacaatccattcttcttctggtgcctgccaactgatttgtttactgaacactgtcacattaaatgatggtgcctaggtaaaaacgctgcacacactcccctccacccccaccccttacccatgttgagacgtggctgcctgtcatgagatgagatctgcttgagtaaagccatatacattacagcaagcattccagattcttaaaatgaccaaacactttggtattaatacaatgtattccctgttttctcaaatatacaaaatatacatttccagttttagccaa

SEQ ID NO: 188553 - DNA, 1303 bp, Homo Sapiens
ttggtgaaagcacaaaatggctccatcacttgtctgtgcttctgaaatcagcgcttctggtagtgcatgctgtggatcaggatcagcggccggtgctagtacactgctcagatggctgggaccgcaccccccagattgtggcattggctaagctcttgctggacccttattaccgaaccatagagggtttccaggtcctcgtggaaatggagtggctggattttggccataaatttgctgaccggtgtggtcatggggagaactcggatgatctgaatgaacgttgcccagtgtttctgcagtggcttgactgtgttcatcagcttcagaggcaatttccttgctcttttgagttcaatgaagcattccttgtgaaactggtgcagcatacctattcctgcctgtttggaacattcctgtgcaacaacgccaaggagagaggggaaaagcatactcaggaacggacatgttccgtgtggtcacttcttcgggcaggcaacaaggctttcaaaaacctactgtattcctctcagtcagaagccgtgctgtaccctgtgtgccatgtgcgtaacctgatgctgtggagtgcagtgtacctgccctgcccatccccaaccacccctgtggacgacagctgtgcaccatacccagccccaggcaccagccctgatgatccccccctgagccggctaccaaagactagatcatacgacaatctgaccacagcctgtgacaacacagtgcctctggccagccggcgctgcagcgaccccagcctgaacgagaagtggcaggagcaccggcgctcactagagctgagcagcctggctggccctggagaggatcccctttctgccgacagcctagggaagcccaccagagtgccggggggtgccgagctttctgttgcagccggagtagctgaggggcagatggagaacatcttgcaggaggccaccaaagaggagagtggagtagaggaacctgcccacagggcaggcattgagatacaggagggtaaagaggaccctctcttagaaaaggagagcaggaggaagacacctgaggcctcagccattggacttcaccaagacccagaactgggtgatgctgctctgaggagccatctggatatgagctggcctctgttctcacagggcatttctgatagcagagtgggctcagtgttctcctcagttctctccaggtcccccccaggggagaggattccctggagtccctgtggagcagtttcgaatagaagagatgcaaagggtagggaggaagcagttcttccaatccc

SEQ ID NO: 188554 - DNA, 1574 bp, Homo Sapiens
  misc_feature (1279)..(1287): n is a, c, g, or t
ttggggaagtggaggggctacacgaagcgccgctgggtctgggtgcccggaggcagcagcgttcgcggagttcgcccgctggcccccgatcaccatgtcggctttcgacaccaaccccttcgcggacccagtggatgtaaaccccttccaggatccctctgtgacccagctgaccaacgccccgcagggcggcctggcggaattcaaccccttctcagagacaaatgcagcgacaacagttcctgtcacccaactccctgggtcctcacagccagcggttctccagccatcagtggaaccaacccagccgaccccccaggccgtggtgtctgcagcccaggcaggcctgctccggcagcaggaagaactggacaggaaagctgccgagctggaacgcaaggagcgggagctgcagaacactgtagccaacttgcatgtgagacagaacaactggccccctctgccctcgtggtgccctgtgaagccctgcttctatcaggatttctccacagagatccctgccgactaccagcggatatgcaagatgctctactatctgtggatgttgcattcagtgactctgtttctgaacctgcttgcctgcctggcctggttctcgggcaacagctccaagggagtggactttggcctctccatcctgtggtttctgatcttcactccctgtgccttcctttgttggtaccgacccatctataaggcctttaggtccgacaactctttcagcttctttgtgttcttctttgtatttttttgtcaaatagggatctacatcatccagttggttggcatccctggcctgggggacagcggttggattgcagccctgtctacactggataatcattccctggccatatcagtcatcatgatggtggtggctggcttcttcaccctctgtgccgtgctctcagtcttcctcctgcagcgggtgcactccctctaccgacggacaggggccagcttccagcaggcccaggaggagttttcccagggcatcttcagcagcagaaccttccacagagctgcttcatctgctgcccaaggagccttccaggggaattagtcctcctctcttctctccccctcagcctttctctcgcctgccttctgagctgcactttccgtgggtgccttatgtggtggtggttgtgcccagcacagacctggcagggttcttgccgtggctcttcctcctccctcagcgaccagctctccctggaacgggagggacagggaattttttccccctctatgtacnnnnnnnnncaaagctctctttccttctctggtgatggtttggtaggattcttttgtctctggaagcagtgggactgaagttctcttcgtcctgtgcacacacagacacccccacacagttgggatcacaggctgacctgggcccatcccagctggagctttctgccagggtcctgggccttgactcccccaccctgcaggcctggcctgaatctggcttcttagacacagcccagtcctttcctgcctgggctgggaataagcctctcacaggttctggtggacagatctgttcc

SEQ ID NO: 188555 - DNA, 911 bp, Homo Sapiens
ttggcttgaatcgcgtcacaaatcagcgaccgaactctggcggtggtggttaagacggcgaaggcggcagcggcggcgacagctctggggtttgcgtctcggggtgtgtcggccgccgctgctgcttgggcctggtgggtacagatggctggttaggattctcggcaccattttccgtttctgcgaccggtcggtgccccctgcccgggccctcctgaagaggcggcgctcagacagcactctgttttctacagtggacactgatgaaataccagccaaaagaccaagattagattgctttattcaccaagtgaaaaacagtctctacaatgctgccagcttatttggattcccattccagctgaccacaaagcccatggtaacttctgcttgtaatggaacacggaatgtggccccttcaggagaggtattttcgaactcttcatcttgtgaactgacaggttctggatcctggaacaacatgctgaaactgggtaataaatctcctaatggaataagtgactatccaaagatcagagtgacagttacccgagatcagccacgcagagtcctgccttcctttggttttactttgaactcagaaggctgtaatagaagaccaggtggccgtcgccatagcaaaggtaatccagagagttctttaatgtggaaacctcaggaacaggctgtaacagagatgatttctgaagagagtggcaagggtctgaggcgtccccattgtactgtggaggagggtgttcaaaaagaggaaagagagaagtaccgaaagttattggaacgacttaaagaaagtggtcatggaaactctgtctgtcctgtaacttcaaattatcacagttctcaaagaagtcagatggacacattaaagaccaaaggctggggggaagagc

SEQ ID NO: 188556 - DNA, 2288 bp, Homo Sapiens
ttgggatggccgccgcgaggccgggaaggtgaagcgcaatgtccctgctcttctctcgatgcaactctatcgtcacagtcaagaaaaataagagacacatggctgaggtgaatgcatccccacttaagcactttgtcactgccaagaagaagatcaatggcatttttgagcagctgggggcctacatccaggagagcgccaccttccttgaagacacgtacaggaatgcagaactggaccccgttaccacagaagaacaggttctggacgtcaaaggttacctatccaaagtgagaggcatcagtgaggtgctggctcggaggcacatgaaagtggctttttttggccggacgagcaatgggaagagcaccgtgatcaatgccatgctctgggacaaagttctgccctctgggattggccacaccaccaattgcttcctgcgggtagagggcacagatggccatgaggcctttctccttaccgagggctcagaggaaaagaggagtgccaagactgtgaaccagctggcccatgccctccaccaggacaagcagctccatgccggcagcctagtgagtgtgatgtggcccaactctaagtgcccacttctgaaggatgacctcgttttgatggacagccctggtattgatgtcaccacagagctggacagctggattgacaagttttgtctggatgctgatgtgtttgtgctggtggccaactcagagtccaccctgatgcagacggaaaagcacttcttccacaaggtgagtgagcgtctctcccggccaaacatcttcatcctgaacaaccgctgggatgcatctgcctcagagcccgagtacatggaggaggtgcggcggcagcacatggagcgttgtaccagcttcctggtggatgagctgggcgtggtggatcgatcccaggccggggaccgcatcttctttgtgtctgctaaggaggtgctcaacgccaggattcagaaagcccagggcatgcctgaaggagggggcgctctcgcagaaggctttcaagtgaggatgtttgagtttcagaattttgagaggagatttgaggagtgcatctcccagtctgcagtgaagaccaagtttgagcagcacacggtccgggccaagcagattgcagaggcggttcgactcatcatggactccctgcacatggcggctcgggagcagcaggtttactgcgaggaaatgcgtgaagagcggcaagaccgactgaaatttattgacaaacagctggagctcttggctcaagactataagctgcgaattaagcagattacggaggaagtggagaggcaggtgtcgactgcaatggccgaggagatcaggcgcctctctgtactggtggacgattaccagatggacttccacccttctccagtagtcctcaaggtttataagaatgagctgcaccgccacatagaggaaggactgggtcgaaacatgtctgaccgctgctccacggccatcaccaactccctgcagaccatgcagcaggacatgatagatggcttgaaacccctccttcctgtgtctgtgcggagtcagatagacatgctggtcccacgccagtgcttctccctcaactatgacctaaactgtgacaagctgtgtgctgacttccaggaagacattgagttccatttctctctcggatggaccatgctggtgaataggttcctgggccccaagaacagccgtcgggccttgatgggctacaatgaccaggtccagcgtcccatccctctgacgccagccaaccccagcatgcccccactgccacagggctcgctcacccaggaggagttcatggtttccatggttaccggcctggcctccttgacatccaggacctccatgggcattcttgttgttggaggagtggtgtggaaggcagtgggctggcggctcattgccctctcctttgggctctatggcctcctctacgtctatgagcgtctgacctggaccaccaaggccaaggagagggccttcaagcgccagtttgtggagcatgccagcgagaagctgcagcttgtcatcagctacactggctccaactgcagccaccaagtccagcaggaactgtctgggacctttgctcatctgtgtcagcaagttgacgtcacccgggagaacctggagcagaaattgccgccatgaacaagaaaattgaggttcttgactcacttcagagcaaagcaaagctgctcagaataaagccggttggttggacagtgagctcaacatgttcacacacca

SEQ ID NO: 188557 - DNA, 991 bp, Homo Sapiens
ttgggtccctctgccccaccctgttctcgccactggccctgcccccatttgccggcgcccttcctcttcgcttccccgtagctcccgctttcgcctcttcgtttatgactccgttgggctccggccctcctagagaggcctccatagcgcaggttcgtgggttctcgcggacctttttccgtgtagctttctgcttcttcccggcattcctgtttccgttttctcacagccctctggcttttccaccactgagacactttgcgctcaggacttcagtgacgtcatctttctgcggcgcgcggacacccgccggtggaagaagaaacagctccgccgtccttcgcttcttttgctgggctgctgctccttcggcatcatggcgccgtcgctgtggaaggggctggtgggcatcggtctctttgccctagcccacgccgccttttccgctgcgcagcatcgttcttatatgcgattaacagaaaaagaagatgaatcactgccaatagatatagttcttcagacacttctggcctttgcagttacctgttacggtatagttcatattgcaggagagtttaaagacatggatgccacttcagaactgaaaaataagacatttgatacgttaaggaatcacccatccttttatgtatttaatcatcgtggtcgagtacttttccggccttcggatacagcaaattcttcaaaccaagatgcattgtcctctaacacatcattgaagttacgaaaactcgaatcactgcgtcgttaagatttttacaaattataataataggacaggacacagagctggaatattggagtttggggtataaaacactcctccctgcccccattagtatttatattgatctttcagacctactttagtaaaaaaaccatggcccttgtttatatactgttaatccaatcattaatgcagtgtaagttatatgtgaaatgagtctttggtatttcataataggaatta

SEQ ID NO: 188558 - DNA, 1069 bp, Homo Sapiens
ttggagaagataaatgacacaattgctaaaaacaaagagttatatgatatcaatcctcctgagatatctgaagagattataggatcacccatccctcaacctaggcaacgctcaagacttctaagatctcaatcagaaagctcggatgaagttacagaattagacctttcacatgggaaaaaagatgcttttgttttggagattgatgacacagatgccatggaagatgtccattctctacttactgatgttcctcctccttcaggcttttatagttgtaatacagaaattatgcccggtataaataattggacctctgaaatacagatgttcacttcagtaagagtaatcagattaagcagcctcaacctgactaatcaagctctcaataagaactttaatgatctctgtgaaaatttgctcaagagcctgtactttaaactacgatctatgatcccctgctgcctttgccatgtaaattttacagtatctctgcctgaagatgaattaattcaggttacagtcacggcagtcgcaatcacttttgacaaaaatcaggctttacaaaccacaaaaacccctgttgaaaagtcattgcaaagagcctcaacagataatgaagaacttttacaatttccactggaactgtgttcagattcacttccttctcatccttttccaccagctaaagccatgacagttgaaaaagcaagtccagtgggtgatggaaatttccggaatcgttctgctccaccttgtgcaaattccacagttggggttgttaagatgacacctctttcttttattcctggagcaaaaataactaagtatcttgggataattaacatgttttttattcgagagactacttctcttcgggaggaaggaggagtcagtggttttctccatgcttttattgctgaagtgtttgcaatggtgagagctcatgttgctgcattagagggaatgctgttgtctcctacataatgaagcagtgtgtcttcatggagaatccaaataaaatcaggcacagtgtcttataaatgtaagtggtgacgcagtgtttttg

SEQ ID NO: 188559 - DNA, 901 bp, Homo Sapiens
ttggaaacaaatgggcaatttagaagatgcagaaacaaaggatctcttagttgcagcagaggcattttcagaattgaatcacttaagcccggttcaaggaactgaagcttctctttgtgcaccatcagtctatgaagggaaaatcttcacccagaagtccaaggtaccagtgttggacgaaggattaacatctgttgaaacctacacccctgcaattagagcaaatgacaataaatctatggctgatgtccttggtgatggtggaaactcctcgctcactatctctgaaggtcctattgtctctgagcgcaggcttaaccaggaagtagcgctgaacttaaaagaagatcatgaagtagaagttggtgtactaaaagaaagtgttgacttaccagaagaaaagcttccaatttctgacagccctcctgatactcaagaaattcatgtgattgaacaagaaaagcttgaagctcaagattcaggagaagaggctaggaatctttcatttaatgagttatatccctctggaacacttaagcttcagtacaattttgatactattgaccaacagttttgtgacttagctgataacaaagacactgctgaatgtgacattgctgaagtagatggggaactttttgtggctcaaagcaactttaccttgatattggaaggtgaagaaggagaagttgagccaggtgattttgcatcatctgatgtgttacctaaagcagctaacacagcaactgaagaaaaacttgtatgcagtggggaaaatgataatcatggacaaattgcaaatttgccatctgccgtaactagtgaccaaaagtcccaaaaagtagacactttaccatatgtgcctgaacctattaaagtagcaattgcagaaaatttacta

SEQ ID NO: 188560 - DNA, 887 bp, Homo Sapiens
aacaaaaaaagttcggcagcacggggcaaggttttgcaggcgcggagcggtgcggcggcgggaggcggaagcgagggtgcgatggcgcggagcccgggacgcgcgtacgccctgctgcttctcctgatctgctttaacgttggaagtggacttcacttacaggtcttaagcacaagaaatgaaaataagctgcttcctaaacatcctcatttagtgcggcaaaagcgcgcctggatcaccgcccccgtggctcttcgggagggagaggatctgtccaagaagaatccaattgccaagatacattctgatcttgcagaagaaagaggactcaaaattacttacaaatacactggaaaagggattacagagccaccttttggtatatttgtctttaacaaagatactggagaactgaatgttaccagcattcttgatcgataagaaacaccattttttctgctaacaggttacgctttggatgcaagaggaaacaatgtagagaaacccttagagctacgcattaaggttcttgatatcaatgacaacgaaccagtgttcacacaggatgtctttgttgggtctgttgaagagttgagtgcagcacatactcttgtgatgaaaatcaatgaacagatgcagatgagcccaataccctgaattcgaaaatttcctatagaatcgtatctctggagcctgcttatcctccagtgtttctacctaaaataaagatacgggagagatttatacaaccagtgttacctttggacagagaagaacacagcagctacactttgacagtagaagcaagagatggcaatggagaaagttacggacaaacctgttaaccaagctcaagatcagattcgtatttttggatgtcattgaca

SEQ ID NO: 188561 - DNA, 2975 bp, Homo Sapiens
ttggcatccctgtccccatggcaacccaaatccaacaacttctccaggacaagcagtttgaattggctctgcagctcgcagaaatgaaagatgattctgacagtgaaaagcagcaacaaattcatcacatcaagaacttgtatgccttcaacctcttctgccagaagcgttttgatgagtccatgcaggtctttgctaaacttggcacagatcccacccatgtgatgggcctgtaccctgacctgctgcccacagactacagaaagcagttgcagtatcccaacccattgcctgtgctctccggggctgaattggagaaggctcacttagctctgattgactacctgacacagaaacgaagtcaattggtaaagaagctgaatgactctgatcaccagtcaagcacctcaccgctcatggaaggcactcccaccatcaaatccaagaagaagctgctacaaatcatcgacaccaccctgctcaagtgctatctccatacaaatgtggccctggtggcccccttgctacgcctggagaacaatcactgccacatcgaggagagcgagcacgtgctaaagaaggctcacaagtacagtgagcttatcatcctgtatgagaagaaggggctccacgagaaagctctgcaggtgctcgtggaccagtccaagaaagccaactcccctctgaaaggccacgagaggacagtgcagtatctgcagcatctgggcacagaaaacctgcatttgattttctcctactcagtgtgggtgctgagagacttcccagaagatggcctgaagatatttactgaagatctcccggaagtggagtctctgccacgtgatcgagtcctcggcttcttaatagagaattttaagggtctggctattccttatctggaacacatcatccatgtttgggaggagacaggctctcggttccacaactgcctgatccagctatactgtgagaaggtgcaaggtctgatgaaggagtatctcctgtccttccctgcaggcaaaaccccagtcccagctggagaggaagagggtgagctgggagaataccggcaaaagctcctcatgttcttggagatttccagctactatgatccaggccggctcatctgtgattttccctttgatggcctcttagaagaacgagctctcctgttggggcgcatggggaaacatgaacaagctcttttcatttatgtccacatcttgaaggatacaaggatggctgaggagtactgccacaaacactatgaccgaaacaaagatggcaacaaagatgtgtatctgtccctgcttcggatgtacctgtcgccccccagcattcactgcctggggccaatcaagctggaactactggagccaaaagccaacctccaggccgctctgcaggtcctcgagctacaccacagcaaactggacaccaccaaggccctcaaccttctgccagcaaacactcagatcaatgacatacgcatcttcctggaaaaggtcttggaagaaaatgcacaaaagaaacggttcaatcaagtgctcaagaaccttctccatgcagaattcctgagggtccaggaagagcggattttacaccagcaggtgaagtgcatcatcacagaggagaaggtgtgcatggtgtgtaagaagaagattgggaacagtgcatttgcaagataccccaatggagtggtcgtccattacttctgttccaaagaggtaaacccagctgacacttgagcccagcatcctggggatccagcggatggacagcttggctctcccagagaggtgaaggagcacctggccttaggaatcctggctgccaccaccacaaggctccccatttggacattactggctatcttgtgccctggaacaactctgaattaattagactcatggtctggcattgccagctttttaatgggaaaagagattagttataccttataccattatgttgtgggcaattccagagaattcagtacctgcttggtcaggaggatgtgcaccatcttgcctttgcacaccagtcacctgaacaaggaaacttgtcacaagtgtttgtaaccatggggttgttcatcaagggcttttctattaagtacatgacttcacaaggaccgctcagcatggctcactggagagttccatgagagaacagcactcaagcttctggccgcatggacccgatggctcgcattctgtgtagtgttttacgtctccatggtaactgtgccctgcacccctcggtagccgccctgttagttttcagtctccttttctttctcaccatttatcacttccctcactgccctacccaggctttctctcccacttccctgactctgggaataactaatatttaagcaaggtaagatgagaagcaaggggtctcagttctaggaatacagtgctagttgattgtcaggtatgttgtaaatagaccctctttggccatacactccatgcctagatgcctcggagagcatcattctctgcctaggcaaggccctgcatcccttgcctcaggccgggctgagtgtgactgcagctcctgaggatgggcctgccctgtctggggtatgcgtgatccctagatacatgttcccacagaggtgcctgctccgtcttcgctcaccagacactcaggcaggctggcttagtctttgtgcgtggcgattttgtgctctgggccctttctctttttccagccagtttccattcacttgccttacagcctgccctggccgtcactccccagctttgttcaacaatggtgtggttggagagttgtgctgggatagcgcacgaacgtgggtcccggcaacacgcacgggatgagtggacctggaactgacaatggcgtgctgccaagtgttcctgagagatgtttatgcacagcagaggggacgcggggggcaagaacagcagacgctggtttaaaaataactcaccgccaaa

SEQ ID NO: 188562 - DNA, 1023 bp, Homo Sapiens
ttggcctggagggccgcactcccgttccagccaggctgagccttctgtcccctgcctctggggcctgggaaccccccttcttctttctcctgaatggcacccccgccctagaatccagacaccgagtttcccactgtggctggttcaaggagctccctggtgacagtctgtggctgagcatggccctcccagccctgggcctggacccctggagcctcctgggccttttcctcttccaactgcttcagctgctgctgccgacgacgaccgcggggggaggcgggcaggggcccatgcccagggtcagatactatgcaggggatgaacgtagggcacttagcttcttccaccagaagggcctccaggattttgacactctgctcctgagtggtgatggaaatactctctacgtgggggctcgagaagccattctggccttggatatccaggatccaggggtccccaggctaaagaacatgataccgtggccagccagtgacagaaaaaaagagtgaatgtgcctttaagaagaagagcaatgagacacagtgtttcaacttcatccgtgtcctggtttcttacaatgtcacccatctctacacctgcggcaccttcgccttcagccctgcttgtaccttcattgaacttcaagattcctacctgttgcccatctcggaggacaaggtcatggagggaaaaggccaaagcccctttgaccccgctcacaagcatacggctgtcttggtggatgggatgctctattctggtactatgaacaacttcctgggcagtgagcccatcctgatgcgcacactgggatcccagcctgtcctcaagaccgacaacttcctccgctggctgcatcatgacgcctcctttgtggcagccatcccttcgacccaggtcgtctacttcttcttcgaggagacagccagcgagtttgacttctttgagaggctccacacatcgcgggttgctaagagtctgcaagaatgacgtgggcggcgaaaagctgctgcagaa

SEQ ID NO: 188563 - DNA, 1150 bp, Homo Sapiens
gaagatggtgtggtccttgacagtgaggacgaggtggactcggccgtgcagcacccggaattgccagtgaagacgttgggcttctttataatgtgtgtctatgtgtacctcatcctccccctcccccactatgtgagtggactctttctgggaattggccttggattcatgactgcagtttgcgtgatttggttttttacaccaccaagtgctcataaatatcacaagttacacaaaaatctgcgacactggaacacaagatctctggatatcaaagaacctgaaatactgaagggatggatgaatgagatttacaactatgatccagaaacctaccatgcgactttgacacattcagtctttgttcgacttgagggtggaaccttaagactttcaaagcccaataaaaatatatccaggagggccagctacaatgaacccaagccagaggtcacctacatcagccagaaaatctatgacctctcagacagcaagatttatcttgtacctaaaactttggctcgaaagcgaatctggaataaaaagtaccccatttgtatcgagcttggtcagcaagatgactttatgtctaaagctcagactgataaggagacttcagaagagaagccgccagctgagggaagtgaggaccctaagaagccaccccgccctcaggagggaacaagatctagccagcgagatcagatactctatctctttgggagaactggccgagaaaaagaggaatggtttaggagatttattctggcatctaagctaaagtcggaaatcaagaagtcatcgggtgtctctggaggtaaaccagggcttttgcctgcacacagcagacacaacagtccgtccgggcacctgacccacagccgcagcagcagcaaaggcagtgtggaggagatcatgtcacagccaaagcagaaggagctggcaggcagcgtgcggcagaagatgcttctcgactacagcgtgtacatgggcaggtgtgtcccccaggaaagccgaagcccccagaggagccccctgcagagtgcggagagcagccccacagctgggaagaagttgccagaggttccaccctctgaggaggaagaacaggaagcctgggtgaatgccttgcttggaagatattttggga

SEQ ID NO: 188564 - DNA, 1524 bp, Homo Sapiens
  misc_feature (446)..(488): n is a, c, g, or t
ttggggcagaacagccaaagaaagatctccatttcctgatggaatgtaatcacgagtataaaggttttcttggctgcttccctgacatcattggcactcacaagggagcaatagaaaaagtgaaagaaagtgacaaactagttgcaacaagtaaaatcaccctacaagacaaacagaacatggtgaagagagtcagcatcatgtcttacgcgttgcaagctgagatgaatcactttcacagtaaccggatctatgattacaacagtgtcatccgcctgtacctggagcagcaagtgcaattttacgaaacgattgcagaaaagctgaggcaggccctcagccgctttccagtgatataggacagaacgggccttgaagagaatgccgcgtgctttctcctgacttggggcaatgcaattcaaaactttttttcccctattattcannnnnnnnnnnnnnnnnnnnnnnnnnnnnnnnnnnnnnnnnnnctgcatttattttattagccaccctaaatgcgtcagttatttagggatggtcttttgttcatttccgcatccattatttaaaccagtggaaattgtctctatttttggaaagtacttaaaagttaccagaattttcaatggaaaatgaggggtttctccccactgatattttacatagagtcataatttatatgtcttataaattataagtcttatataatttataagtctcccacaatcttccagttcttacccagtgtcagataattaattactaattactttcttaaaaacatgaactatgccagaataaaaaatatctatgtttgtatatttttataactcctttcagtcctctggggctcctgtcattgagggaagtcgttacgcctttcactgccacagttacagctcaagtgcttacacttcaagagggaggacgctgggggcccctggggctgctagtgccatcgtggtgtgtggcaggtgggccatcccatgtccctccagggggaccccacagcctggcagatgagcagatacccctggccacccatgtcctcagcgacatttctgatgtgctgctcttatgtgaggaccagtgctttctctctttgcacttccttcctaatcttggttaaggcatgttttatgccatgaagaatacattagaagaattgagggactttgtagagaattttgtggctttggtccaacgggtgagtggctgtgcggaggcctgtgttcgggagggcctgggagaaggagggcacccagcaccccggcgtctctggccctttcttattctttggctcctcatccaccgtgatgagaagcgctgctgtggcaacggcacactgcttggcttgggtggcgggttcatggccagttggtgtcatcagcaaagagaaaaagcacatggttagctcccctttagatgggaaaagtgtagggactgataggggctgcagcctcaccatggtacaaagtccccggcgctctgaaggttggagagaaagaacaaacaacgcccctt

SEQ ID NO: 188565 - DNA, 1340 bp, Homo Sapiens
aaattttgacatgaatgtgccacactggcagccactaaccaacaggggctgggatcaatctgcatgatttatctcgtacagaacttgttaatgctatgatcttaggaatctaatcaccaaggtgaggcagcctgcagtactgacctcaccatccatgacccttcttcacagatgcccagactcaggtaaccatgatgttgtattcagaacctgtaggtttaatttcagaccctcgggatgcatctaaggccaatctgtgagccattacaacctccaaaaggcatttaggactaatctgatgatctttgcactgccaataattaaagatggcaaccaatgggctaaatggtaacaacactcatatccttacattcatagtatttctccccagtgtgaattctttcatgcatacttaggcatgaggaaagagcaaatgctttcccaaattctttacatacaaaaggtttctctctggtaggagttcacaggtggggtgaggaatacagaaattctttcccacatatcttgcatttacctttctccactgtgagttttcaaatgtttactacgatgggaagaagtaatgaaggtcttcccacattcaacacattcataaggcttctctcctgtgtgaattcttctatgttgagtaagcgttgaagatctattgaaggctttcccacattccttacactgatagggtttctctccagtgtgatttcgtatgtgtatagcaaggcccgtgtactgagtgaaggcttggccacattccttacattcatagggttttattccagtgtgagttcttacatgttgagtaaggtgagttgatctagtgaaggctttcccacattccgtacatttgtgtggttttattccagtgtgaatttgaatgtgaacattaaaggatgaggaatttctaaaggatcttccacattctttacattcaaaggacttctctcctttatgagtttttgcatgtgcagaaagttgagaaaaattagtgaaggatttcccacagttcttagtcttttcggatttctttccagtatgaactgctacacactgctttaagtgtgaggaagttgtgatggctctctcacattcctgaaattcacagagtttctctccaatgtggattcccatgtgattatcaaggcttgcaaaatacttaaagccttttccacattccttacatttgtagggttgtcttccattgagaatttcaagatgcacagcaaggcctggagttaaggtgaagacttttccacatggattaaatttggaaagttcttgccaacttttttgtacaaagttggcattataaaaaagcattgctc

SEQ ID NO: 188566 - DNA, 1399 bp, Homo Sapiens
ttggcttccttggccaagctgcaggggatttgggggatgtgggacctccaattcccagccccggcttcagctctttcccaggtgttgactccagctccagcttcagctccagctccaggtcgggctccagctccagccgcagcttaggcagcggaggttctgtgtcccagttgttttccaatttcaccggctccgtggatgaccgtgggacctgccagtgctctgtttccctgccagacaccacctttcccgtggacagagtggaacgcttggaattcacagctcatgttctttctcagaagtttgagaaagaactttctaaagtgagggaatatgtccaattaattagtgtgtatgaaaagaaactgttaaacctaactgtccgaattgacatcatggagaaggataccatttcttacactgaactggacttcgagctgatcaaggtagaagtgaaggagatggaaaaactggtcatacagctgaaggagagttttggtggaagctcagaaattgttgaccagctggaggtggagataagaaatatgactctcttggtagagaagcttgagacactagacaaaaacaatgtccttgccattcgccgagaaatcgtggctctgaagaccaagctgaaagagtgtgaggcctctaaagatcaaaacacccctgtcgtccaccctcctcccactccagggagctgtggtcatggtggtgtggtgaacatcagcaaaccgtctgtggttcagctcaactggagagggttttcttatctatatggtgcttggggtagggattactctccccagcatccaaacaaaggactgtattgggtggcgccattgaatacagatgggagactgttggagtattatagactgtacaacacactggatgatttgctattgtatataaatgctcgagagttgcggatcacctatggccaaggtagtggtacagcagtttacaacaacaacatgtacgtcaacatgtacaacaccgggaatattgccagagttaacctgaccaccaacacgattgctgtgactcaaactctccctaatgctgcctataataaccgcttttcatatgctaatgttgcttggcaagatattgactttgctgtggatgagaatggattgtgggttatttattcaactgaagccagcactggtaacatggtgattagtaaactcaatgacaccacacttcaggtgctaaacacttggtataccaagcagtataaaccatctgcttctaacgccttcatggtatgtggggttctgtatgccacccgtactatgaacaccacaacagaagagattttttactattatgacacaaacacacgggaaagagggcaaattaaacattgtaatgcataagatgcacgaaaaaa

SEQ ID NO: 188567 - DNA, 2013 bp, Homo Sapiens
ttggcgcagaataagacatcaaaagaacatgttgcaaaaatgatgaaagatttagagagcttacaaactgcagagcaaagtctaatggacttacaagagaggcttgaaaaggcacaggaagaaaacagaaatgttgctgtagaaaagcaaaatttagagcgcaaaatgatggatgaaatcaattatgcaaaggaggaggcttgtcggctgagagagctaagggagggagctgaatgtgaattgagtagacgtcagtatgcagaacaggaattggaacaggttcgcatggctctgaaaaaggccgaaaaagaatttgaactgagaagcagttggtctgttccagatgcacttcagaaatggcttcagttaacacatgaagtagaagtgcaatactacaatattaaaagacaaaacgctgaaatgcagctagctattgctaaagatgaggcagaaaaaattaaaaagaagagaagcacagtctttgggactctgcacgttgcacacagctcctccctagatgaggtagaccacaaaattctggaagcaaagaaagctctctctgagttgacaacttgtttacgagaacgactttttcgctggcaacaaattgagaagatctgtggctttcagatagcccataactcaggactccccagcctgacctcttccctttattctgatcacagctgggtggtgatgcccagagtctccattccaccctatccaattgctggaggagttgatgacttagatgaagacacacccccaatagtgtcacaatttcccgggaccatggctaaacctcctggatcattagccagaagcagcagcctgtgccgttcacgccgcagcattgtgccgtcctcgcctcagcctcagcgagctcagcttgctccacacgccccccacccgtcacaccctcggcaccctcaccacccgcaacacacaccacactccttgccttcccctgatccagatatcctctcagtgtcaagttgccctgcgctttatcgaaatgaagaggaggaagaggccatttacttctctgctgaaaagcaatgggaagtgccagacacagcttcagaatgtgactccttaaattcttccattggaaggaaacagtctcctcctttaagcctcgagatataccaaacattatctccgcgaaagatatcaagagatgaggtgtccctagaggattcctcccgaggggattcgcctgtaactgtggatgtgtcttggggttctcccgactgtgtaggtctgacagaaactaagagtatgatcttcagtcctgcaagcaaagtgtacaatggcattttggagaaatcctgtagcatgaaccagctttccagtggcatcccggtgcctaaacctcgccacacatcatgttcctcagctggcaacgacagtaaaccagttcaggaagccccaagtgttgccagaataagcagcatcccacatgacctttgtcataatggagagaaaagcaaaaagccatcaaaaatcaaaagcctttttaagaagaaatctaagtgaactggctgacttgatggaatcatgttcaagtggcatctgtaaactattatcccccaccctccactccccaccttttttttggtttaattttaggaatgtaactccattggggctttccaggccggatgccatagtggaacatccagaagggcaactgtctactgtctgcttatttaagtgactatatataatcaattcatcaagccagttattactgaaaaatcattgaaatgagacagtttacagtcatttctgcctatttatttctgctttgttctcagtgatgtatatgcaacattttgttgaaagccacgatggacttacaagctttaatggactcgtaagccagcatgggcttgcaaaaatttcttgtttaccagagcatcttcttatctttccacagagctatttacatcctggactatataacttaaaagaagtaaaacgtaattgcactactgttttccagactgg

SEQ ID NO: 188568 - DNA, 925 bp, Homo Sapiens
ttcatcaaacaccaaccaccgcagccgactaaaatgaatgttctttgtggattttatatgatccaccaggcgtccaggagttgagataaggatatttattcctttgcggagtctggccttttctgattttctcttctctcctcccattaacactccaggcacaatccaggtgaaaggcttaagcagtttctggacagtgtcaaagctttgtagagctagctctctcgttggcacgagcaccagggcataggggccatcactgcgctgtatttttgactccattgcttgaagggactggaccacagggatgcaataggcaagagttttacctgagcccgtctgggatctcacgagagcatctctgccttccagcaacacaggaatactttgcttctgaacactggtcatactagacatttttaagaccgtatttattgtggaaattaaatgtgggtggaggcccagctcatgaaaagcagctgaagtaaacactttttcttgcacctgctttaccacaggtctgtggagttctggaatgtcagggttgtttttaaacagtgatgaagtcttaatgcactgtctctcctcctggtttctatcacttgtgctaaccgaatgcttctttggagaaaacattttttgtgcgttccccttaaaagtcctctgagtttctttaacactagttttcttggctgggagaaatgaagtttcgttcctccgtttcgctgggggagcctcactggacgcttggtattttcttttcgtagcctttgcttgccgactcgcctgggctgggggacgtctggagaacgtcctggggttgtcgaagagcgaaccgtcggcggctgccatggtctgcgtgggtgacgcgtggtgcagcagcgagcccggtgcgcagactgctgggcccgggaccccacgccaa

SEQ ID NO: 188569 - DNA, 1041 bp, Homo Sapiens
gcccccacaggcaatactgagatggcccgggtcaccgtggtgccctccagaatggagccctgagtcccccaagcagagggcaggagggagagagggccgaggctcatgcggggccagtaaccccagctgggcccctcccaggcgtggcccacagctccctctcctcaggccctcggggtgtgagatgctgcggcagctgtgtgggtgggggtggtccctcacgtcctctcccccattcctctccttcttgcaaaaggccttcctgggcgggaacctcaagtgcagccaggctgggggacagagttccccccaagctgagacaggaggggtctcaggcggcaaaattcctcctccaactcctccagctgcttcatggtctcctccaagctgagcaggttctcctggatttcctgggtccgtgctgggctcagggggccgccccctgggcccccatccccatctcgaggaggccccgccccattgtcttcctccgccggaaacagaagctgcttcagggacagcactttccgaagggccgtggcagcgagctggccctcggggcctggtctgcagaagggcaggaggtcactgaggattctctcggtccgggcatcagctggagacgtctctcggccaccattgccgttctcagagctgctgaggaggggttctcgggtgctgctcgggctgggccggggcttagggcgagaggcaggggcagggactttcagggatccggcagtctcagtgatgagagcacaccagtttttccgctccgacacagtctgtgccaccagctcgtatatctgggcctcctggtcccaggtaaaaaggacgtagaaggctttgtgatcggtggccacctcgcgggtcatggcggaggtgagccgcagcacgggccgcagcatggtcttgccatcgggcgtgggcgtcagtgtccggctatgggacttgagcagcagccgctcgtcctggcgctggagcagcagcagcaggtcgtccagcagcaggacatgcacctccaacttttttgtacaaagt

SEQ ID NO: 188570 - DNA, 828 bp, Homo Sapiens
ctttgtacaaaaaagttggccctgcccgacgagccacgtatgtcaaccctctcccttcccccatccactaaggcagcctggagaatcagggagggattgttgtcagagtcacagaggaatgggcgttggagaccgaggtcattgaggccaactgtggtcacagaccttggaggaggagggggtagaatgcttctagagatctgggaactctagtgtggtccgatctagagacctggtctgctgcacgggccaccctgcgggcatcgaatgccaaggccactgaccggggttgaacgctctaagaggctgaaggctgcttcttgggatggcccaagctggggccctaacaaggcctctgtccacagccccgagcctggagatgagggggagccggggcggtcgggactggagcttgaaccagaagagcctcccggctggcgggaactcgtccccccagacaccctgcacagcctgcccaagagccaggtgaagcggcaggaggtcatcagcgagctgctggtgacagaggcggcccacgtgcgcatgctgcgggtgctgcacgacctcttcttccagcccatggcagaatgcctgttcttccccttggaggagctgcagaacatcttccccagcctggacgagctcatcgaggtgcattccctgttcctcgatcgcctgatgaagcggaggcaggagagtggctacctcatcgaggagatcggagacgtgctgctggcccggtttgatggtgctgagggctcctggttccagaaaatctcctcccgcttctgcagccgccagtcatttgccttagagcagctcaaagcc

SEQ ID NO: 188571 - DNA, 910 bp, Homo Sapiens
ttggaggcttctccgtccaaaggcaatgacttgttttcgcccgacgaggagggcccagcagtggtggccggaccaggcccggggcctgggggcgccgagggggccgcggaggagcgccgcgtcaaggtctccagcctgcccttcagcgtggaggcgctcatgtccgacaagaagccgcccaaggaggcgtccccgctgccggccgaaagcgcctcggccggggccaccctgcggccactgctgctgtcggggcacggcgctcgggaagcgcacagccccgggccgctggtgaagcccttcgagaccgcctcggtcaagtcggaaaattcagaagatggagcggcgtggatgcaggaacccggccgatattcgccgccgccaagacatacgagccctaccacctgcaccctgaggaaacacaagaccaatcggaagccgcgcacgccctttaccacatcccagctcctcgccctggagcgcaagttccgtcagaaacagtacctctccattgcagagcgtgcagagttctccagctctctgaacctcacagagacccaggtcaaaatctggttccagaaccgaagggccaaggcgaaaagactgcaggaggcagaactggaaaagctgaaaatggctgcaaaacctatgctgccctccagcttcagtctccctttccccatcagctcgcccctgcaggcagcgtccatatatggagcatcctacccgttccatagacctgtgcttcccatcccgcctgtgggactctatgccacgccagtgggatatggcatgtaccacctgtcctaagaagaccagatcaatagactccatgatggatgcttgtttcaaagggtttcctctccctctccacgaagcagtaccagccagtactcctgctctgctaaccctg

SEQ ID NO: 188572 - DNA, 1702 bp, Homo Sapiens
ctttgtacaaaaaagttggggccggtccagagctgtggggtggcctccgcgcggtctctggcggagtcggggaatcggatcaaggcgagaggatccggcagggaaggagcttcggggccgggggttgggccgcacatttacgtgcgcgaagcggagtggaccgggagctggtgacgatggcggggccgcagcccctggcgctgcaactggaacagttgttgaacccgcgaccaagcgaggcggaccctgaagcggaccccgaggaagccactgctgccagggtgattgacaggtttgatgaaggggaagatggggaaggtgatttcctagtagtgggtagcattagaaaactggcatcagcctccctcttggacacggacaaaaggtattgcggcaaaaccacctctagaaaagcatggaatgaagaccattgggagcagactctgccaggatcgtctgatgaggaaatatctgatgaggaagggtctggagatgaagattcagagggactgggtctggaggaatatgatgaggacgacctgggtgctgctgaggaacaggagtgtggtgatcacagggagagcaagaagagcagaagccactctgcaaaaacaccgggcttcagtgtccagagtatcagtgactttgagaaatttaccaagggaatggatgaccttgggagcagtgaggaggaggaagacgaagagagtggcatggaagaaggggatgacgcggaagactcccaaggcgagagtgaggaagacagggctggagatagaaacagtgaggatgatggtgtggtgatgaccttctctagtgtcaaagtttctgaggaagtggagaaaggaagagccgtgaagaaccagatagcactgtgggaccagctcttggaaggaaggatcaaactacaaaaagctctgttgaccaccaaccagcttcctcaaccagatgttttcccattgttcaaggacaaaggtggcccagaattttccagtgccctgaaaaatagtcacaaggcacttaaagcattgttgaggtcattggtaggtcttcaggaagagttgcttttccagtacccagacactagatatctagtagatgggacaaagcccaatgcgggaagtgaggagatttctagtgaagatgatgagctggtagaagagaagaagcagcaacgaagaagggtccctgcaaagaggaagctggagatggaggactatcccagcttcatggcaaagcgctttgccgactttacagtctacaggaaccgcacacttcagaaatggcacgataagaccaaactggcttctggaaaactggggaagggttttggtgcctttgaacgctcaatcttgactcagatcgaccatattctgatggacaaagagagattacttcgaaggacacagaccaagcgctccgtctatcgagttcttggcaaacctgagccagcagctcagcctgtcccagagagtttgccaggggaaccggagatccttcctcaagcccctgctaatgctcatctgaaggacttggatgaagaaatctttgatgatgatgacttttaccaccagctccctcgagaactcatagaacggaagaccagctcctttggatcccaacgatcaggtggccatgggaaggcagtggccttgcatcccgaagtttacgaagcaaaatccacaaaaaagtagatagaaag

SEQ ID NO: 188573 - DNA, 1774 bp, Homo Sapiens
tgtggagagtcagataatagctcccaacagtccttcagttgcagccccttccctcctaagttttcttccctccgttctccatacgtttgggcatacattctgcatttgggcttttggaggctccacttctttttgccacacataagtcttcttagaccatgtcagttttcaccctggttatgtgttccttgcattatgtgttaacacttgatttggttaatctcaccaaattacgattaagcctttatttaaaatttatcctaaattattgaaagtttcccgtcccccttctaattagttgtataaacatcagttctatactggttgtactccttttaaaattaaagcataatttctgctagaaatagatggaaatagactttgctaactttgccttccaagcttaaaagtaatcttttaaaatttgagggtaatattttgcaactttttgttctagtacaaaatggttcgttacatcagaaggatacagttcatgacaatgactttgagccctaccttactggacagtcaaatcagagtaacagttacccctcaatgagcgacccctacctgtccagctattacccgccgtccattggatttccttactccctcaatgaggctccgtggtctactgcaggggaccctccgattccatacctcaccacctacggacagctcagtaacggagaccatcattttatgcacgatgctgtttttgggcagcctgggggcctggggaacaacatctatcagcacaggttcaattttttccctgaaaaccctgcgttctcagcatgggggacaagtgggtctcaaggtcagcagacccagagctccgcgtatgggagcagctacacctaccccccgagctccctgggtggcacggtggttgatgtgcagccaggctttcacagcgacaccctcagcaaggcccccgggatgaacagcctggagcagggcatggttggcctgaagattggggacgtcagctcctccgccgtcaagacggtgggctctgtcgtcagcagcgtggcactgactggtgtcctttctggcaacggtgggacaaatgtgaacatgccagtttcaaagccgacctcgtgggctgccattgccagcaagcctgcaaaaccacagcctaaaatgaaaacaaagagcgggcctgtcatggggggtgggctgccccctccacccataaagcataacatggacattggcacctgggataacaaggggcctgtgccgaaggccccagtcccccagcaggcaccctctccacaggctgccccacagccccagcaggtggctcagcctctcccagcacagcccccagctttggctcaaccgcagtatcagagccctcagcagccaccccagacccgctgggttgccccacgcaacagaaacgcggcgtttgggcagagcggaggggctggcagcgatagcaactctcctggaaacgtccagcctaattctgcccccagcgtcgaatcccaccccgtccttgaaaaactgaaggctgctcacagctacaacccgaaagagtttgagtggaatctgaaaagcgggcgtgtgttcatcatcaagagctactctgaggacgacatccaccgctccattaagtactccatctggtgtagcacagagcacggcaacaagcgcctggacagcgccttccgctgcatgagcagcaagggcccgtctacctgctcttcagcgtcaatgggagtgggcatttttgtggggtggccgagatgaagtcccccgtgga

SEQ ID NO: 188574 - DNA, 1000 bp, Homo Sapiens
ttggcctagcttttctcttctgtcaaccccacacgcctttggcacaatgaagtgggtaacctttatttcccttctttttctctttagctcggcttattccaggggtgtgtttcgtcgagatgcacacaagagtgaggttgctcatcggtttaaagatttgggagaagaaaatttcaaagccttggtgttgattgcctttgctcagtatcttcagcagtgtccatttgaagatcatgtaaaattagtgaatgaagtaactgaatttgcaaaaacatgtgttgctgatgagtcagctgaaaattgtgacaaatcacttcataccctttttggagacaaattatgcacagttgcaactcttcgtgaaacctatggtgaaatggctgactgctgtgcaaaacaagaacctgagagaaatgaatgcttcttgcaacacaaagatgacaacccaaacctcccccgattggtgagaccagaggttgatgtgatgtgcactgcttttcatgacaatgaagagacatttttgaaaaaatacttatatgaaattgccagaagacatccttacttttatgccccggaactccttttctttgctaaaaggtataaagctgcttttacagaatgttgccaagctgctgataaagctgcctgcctgttgccaaagctcgatgaacttcgggatgaagggaaggcttcgtctgccaaacagagactcaagtgtgccagtctccaaaaatttggagaaagagctttcaaagcatgggcagtagctcgcctgagccagagatttcccaaagctgagtttgcagaagtttccaagttagtgacagatcttaccaaagtccacacggaatgctgccatggagatctgcttgaatgtgctgatgacagggcggaccttgccaagtatatctgtgaaaatcaagattcgatctccagtaaactgaaggaatgctgtgaaaaacctctgttggaaaatccacctgcatggccaagtggaaaa

SEQ ID NO: 188575 - DNA, 1615 bp, Homo Sapiens
tttgtacaaaaaagttggcgaaaagatggcttgtcttggcacctctaattgctctcgtgtattcggtgccgcgactttcacgatggctcgcccaaccttactaccttctgtcggccctgctctctgctgccttcctactcgtgaggaaactgccgccgctctgccacggtctgcccacccaacgcgaagacggtaacccgtgtgactttgactggagagaagtggagatcctgatgtttctcagtgccattgtgatgatgaagaaccgcagatccatcactgtggagcaacatataggcaacattttcatgtttagtaaagtggccaacacaattcttttcttccgcttggatattcgcatgggcctactttacatcacactctgcatagtgttcctgatgacgtgcaaaccccccctatatatgggccctgagtatatcaagtacttcaatgataaaaccattgatgaggaactagaacgggacaagagggtcacttggattgtggagttctttgccaattggtctaatgactgccaatcatttgcccctatctatgctgacctctcccttaaatacaactgtacagggctaaattttgggaaggtggatgttggacgctatactgatgttagtacgcggtacaaagtgagcacatcacccctcaccaagcaactccctaccctgatcctgttccaaggtggcaaggaggcaatgcggcggccacagattgacaagaaaggacgggctgtctcatggaccttctctgaggagaatgtgatccgagaatttaacttaaatgagctataccagcgggccaagaaactatcaaaggctggagacaatatccctgaggagcagcctgtggcttcaacccccaccacagtgtcagatggggaaaacaagaaggataaataagatcctcactttggcagtgcttcctctcctgtcaattccaggctctttccataaccacaagcctgaggctgcagccttttatttatgttttccctttggctgtgactgggtggggcagcatgcagcttctgattttaaagaggcatctagggaattgtcaggcaccctacaggaaggcctgccatgctgtggccaactgtttcactggagcaagaaagagatctcataggacggagggggaaatggtttccctccaagcttgggtcagtgtgttaactgcttatcagctattcagacatctccatggtttctccatgaaactctgtggtttcatcattccttcttagttgacctgcacagcttggttagacctagatttaaccctaaggtaagatgctggggtatagaacgctaagaattttcccccaaggactcttgcttccttaagcccttctggcttcgtttatggtcttcattaaaagtataagcctaactttgtcgctagtcctaaggagaaacctttaaccacaaagtttttatcattgaagacaatattgaacaaccccctattttgtggggattgagaaaggtgaatagaggcttgagactttcctttgtgtgggtagggacttggatgagaaatcccctggactttcactaaccctctgacatactcccccagcccagttgatggcttt

SEQ ID NO: 188576 - DNA, 1566 bp, Homo Sapiens
  misc_feature (1249)..(1257): n is a, c, g, or t
ttggctccttctccacctcctctctccgcaatatcatctgttgtttcctctggtgataatctggaggcttctctccccatgatatctttcaaacaggaggaattagagaatgaaggtctgaaacccagggaagagccccagtctgctgctgaacaggatgttgttgttcaggaaacattcaacaaaaactttgtttgcaacgtctgtgaatcaccttttctttccattaaagatctaaccaaacatttatctattcatgctgaagaatggcccttcaaatgtgaattttgtgtgcagctttttaaggataaaacggacttgtcagaacatcgctttttgcttcatggagttgggaatatctttgtgtgttctgtttgtaaaaaagaatttgcttttttgtgcaatttgcagcagcaccagcgagatctccacccagataaggtgtgcacacatcacgagtttgaaagcgggactctgaggccccagaactttacagatcccagcaaggcccatgtagagcatatgcagagcttgccagaagatcctttagaaacttctaaagaagaagaggagttaaatgattcctctgaagagctttacacgactataaaaataatggcttctggaataaagacaaaagatccagatgttcgattgggcctcaatcagcattacccaagctttaaaccacctccatttcagtaccatcaccgtaaccccatggggattggtgtgacagccacaaatttcactacacacaatattccacagactttcactaccgccattcgctgcacaaagtgtggaaaaggtgtcgacaatatgccggagttgcacaaacatatcctggcttgtgcttctgcaagtgacaagaagaggtacacgcctaagaaaaacccagtaccattaaaacaaactgtgcaacccaaaaatggcgtggtggttttagataactctgggaaaaatgccttccgacgaatgggacagcccaaaaggcttaactttagtgttgagctcagcaaaatgtcgtcgaataagctcaaattaaatgcattgaagaaaaaaaatcagctagtacagaaagcaattcttcagaaaaacaaatctgcaaagcagaaggccgacttgaaaaatgcttgtgagtcatcctctcacatctgcccttactgtaatcgagagttcacttacattggaagcctgaataaacacgccgccttcagctgtcccaaaaaacccctttctcctcccnnnnnnnnngtttctcattcatctaagaaaggtggacactcatcacctgcaagtagtgacaaaaacagtaacagcaaccaccgcagacgggacagcggatgcggagattaaaatgcaaagcatgcagactccgttgggcaagaccagagcccgcagctcaagccccacccaagtcccacttccctcctcatccttcaagtccaagcagaaccgtcaagtttgcagcttcggtgaaattcaaaaaaccaagctcctcctctttaaggaactccagcccgataagaatggccaaataactcatgttgaggggaaaaaacc

SEQ ID NO: 188577 - DNA, 999 bp, Homo Sapiens
ttggctccccaagcctggaaatgaagattcacaacttcttaaaagaacacccttgccgctcccacgggtcacccacccacgtcaggcgtggagaaagtcctggcctccaccatttccaccacgtcgacgattgaatttaagaatatgcttaaaaacgcctcacgtaagccctcagatgataagcattttggccaggctcccagcaagggcactccaagtgatggtgtcagtctctcaaacctcacccaacccagcttgaccgccactgatcagcagcaacaagaagagcactaccgcatagaaacccgcgtctcctcctcctgcttagacttgcctgatagcacagaagaaaagggggcccctatagaaaccttgggttatcacagtgcatccaataggaggatgtcaggggagccgatccagaccgtagagtccatccgagttcctgggaagggaaatagaggacatgggcgtgaggcttcaagggtgggttggtttgatctgagcacatcaggtagctcttttgacaatggcccttcaagtgcctctgagttggcatcccttgggggtgggggcagcggaggcctcactggctttaaaacagcaccatacaaggaacgggcacctcaatttcaggagagtgtcggcagctttcgttccaacagtttcaactcaacatttgagcatcatcttcccccatcccccttggaacatgggacacccttccagagagagccagtggggccatcatctgccccacctgtccctcctaaggatcatggtggtatcttctctcgagatgcacccactcatctaccctctgtggatctttcgaaccccttcacaaaggaggcagccctggcccatgctgccccaccccctcctcctggagagcacagtggaattcctttccctaccccacctcctcctccccctcctggggaacatagcagcagtggtgggagtggtgtccccttttctactccaccccctcctcca

SEQ ID NO: 188578 - DNA, 1165 bp, Homo Sapiens
ttgggggtctgtggctgctgggctggcggggcgcaggccgcgggacccgagcccggggaagcgagagagcggaggcgccgaggatccgattcactccctggggagacctatgggccgaagccgtgtaaatgcgttttaagcagaggcctcggctccgcaactgccactcctcctcggggtgttgcacaagtttcgaggtcaccggcgaccccccctagcagcgcgcctggctctggcccccgcgaaggaggacggagtttggcagagatggagttggtccagcatattggaatccctgccagtaagatcatctgcgccaacccctgtaagcaaattgcacagatcaaatatgctgccaagcatgggatccagctgctgagctttgacaatgagatggagctggcaaaggtggtaaagagccaccccagtgccaagatggttctgtgcattgctaccgatgactcccactccctgagctgcctgagcctaaagtttggagtgtcactgaaatcctgcagacacctgcttgaaaatgcgaagaagcaccatgtggaggtggtgggtgtgagttttcacattggcagtggctgtcctgaccctcaggcctatgctcagtccatcgcagacgcccggctcgtgtttgaaatgggcaccgagctgggtcacaagatgcacgttctggaccttggtggtggcttccctggcacagaaggggccaaagtgagatttgaagagattgcttccgtgatcaactcagccttggacctgtacttcccagagggctgtggcgtggacatctttgctgagctggggcgctactacgtgacctcggccttcactgtggcagtcagcatcattgccaagaaggaggttctgctagaccagcctggcagggaggagaaaatggttccacctccaagaccatcgtgtaccaccttgatgagggcgtgtatgggatcttcaactcagtcctgtttgacaacatctgccctacccccatcctgcagaagaaaccatccacggagcagctcctgtacagcagcagcctgtggggcccggcggttgatggctgtgattgcgtggctgagggcctgtggctgccgcaactacacgtaggagactggctggtctttgaacaacatgggcgcctacactgtgagcatgg

SEQ ID NO: 188579 - DNA, 1305 bp, Homo Sapiens
ttggctgggatttccggcgtgagccgcagtggccggtcagaacctggggcccttttgaactttgattcctcagcaattttgtcagccctggctcgggctgagaagcccctgtgaagccagagagggaaagggacctgtccagggtcacacaggaatcatgcgtcaagcctccccagccacggacttgtctccatccagggcatttcagcccctgcagggcagtggcctgcccctcctccttggagccaggaagggatgcagtgccacagggatctggctctgtcccaggccctgtggggctggcagttgagtaagcagtcaggctgggcgcacccatccctcccccactccccactgcccagcacagtgcattcatgcagctgggccccaccccatctccagaggcaccttccactagcaacagtctccccaggcacaacacagctaacacaaggccccgcaggcaggactctgggacagacgcaggccagctgcccagagcccagaccaagcatggacgccgtggatgccaccatggagaaactccgggcacagtgcctgtcccgcggggcctcgggcatccagggcctggccaggtttttccgccaactagaccgggacgggagcagatccctggacgctgatgagttccggcagggtctggccaaactcgggctggtgctggaccaggcggaggcagagggtgtgtgcaggaagtgggaccgcaatggcagcgggacgctggatctggaggagttccttcgggcgctgcggccccccatgtcccaggcccgggaggctgtcatcgcagctgcatttgccaagctggaccgcagtggggacggcgtcgtgacggtggacgacctccgcggggtgtacagtggccgtgcccaccccaaggtgcgcagtggggagtggaccgaggacgaggtgctgcgccgcttcctggacaacttcgactcctctgagaaggacgggcaggtcacactggcggaattccaggactactacagcggcgtgagtgcctccatgaacacggatgaggagttcgtggccatgatgaccagtgcctggcagctgtgagcagctccggctcagccctgctgccctggcctgtcactccccacccctgccggagacctcccttccctgggccccttctctcctgggcagccacaccacagagcggggaggggcaggtgggggaatggaggctgcaggactggctagaccaggtccctgccggtccaccaggcggagtgggacaaaggtcctaacaggagtcactggctcaggacccaagga

SEQ ID NO: 188580 - DNA, 1295 bp, Homo Sapiens
ttttccattgtatcctctattttccattcaggatagcacaattgtccagtcgctctcttctcttccatactggatatcagttaatttgctcaagatgcggcttgccagcttaggaccattctccatagttggaatgtgtattgtctcgcctttgtacagtatatcagaaactgggcaaacaacacaggctgtaccagagccaaacatctctctcactctgttcccctccagggctgttgtcaagtcatccatggtgaggtatctctctgacaccttaaattcaccccactgatgtgccaggtccagaatgcaccgccttgtcactcctggaagaatgatgccatctagtggaggagttgccagttcttcttctccatcttcatttatccagtaaagaaaaagattcatagttcccacttcagtgatctgatggtcctctccatagagccacaggacctgctgacacccattatctactgcttcacattgggcaaaaagagatgagccgtaattccctcccatcttgcagtccccagttccacctttccaggctcttacatacttgggattggcccacagggacactggattaaaggttccacttgaaaaataaggtcccactgggctcaagagtacaaagagcagggctttggtaggcttcttgactccaagagaaggctcagttccaatgaatgtaggacgaatatacagactagcagatgttgaatatgggacccattcttgatccaatttcacaagctgttgaatacactctaagagctcttctttgtcaaataccggcagagttgccctcacagcagagcgatacattctatccatgttgaggtttggctgaaacagtcgaattttattatctactcctcgaaatgccttcaatccttcaaataattccactgcatagtgcaaagctgatgagccagggtgcaatgacaggttctgaagaggcttgatatgaggtttctcccatccaaactctgaggaccactccaccgtcagcatatgatccgtgaacacagttccaaaaaccagattattggggtctggtttttcctttaaaatggtagctggtgtgactattaggtctttagccttaaaagtccccaccacctcttttgatcctccttctccggtacactctgcggagcatccgttactgcaatccttcattgttccgtcggccacgagggaagctcgagctgagcggagggcagatcccaagggtcgtagcccctggccgtgtggaccgggtctgcggctgcagagcgcggtcccaa

SEQ ID NO: 188581 - DNA, 883 bp, Homo Sapiens
gaagctgaaattcaaacttgagcctcgactgggttttctggcttgaacttcatcccagagaggctctgacatatggagggaacccctaacaggtgtttcagacacatcacggccaagggcttactctgctgggcctcaaacacacggcatcttgtccagggtagactggacaaggccaggccaaggcagagcttgaggggaggggacactgagtgtttctggaagtagctggacgtaatcccgcaggactggcatactggagcgtgccccgagacagccgagcatttctggaggctgccttggcagttccaggtgaggcctgtaccttcctttatcagtgcccacctggggagcggatgacccctctgcccagatccggtgaacacctattcatccatcaaagctccagctcccatatcccttctccaggctgaagccagcaggattggaggcagactctatatatagagcaggcactgcctgggcatggcagctatgatggtgggaagtggccttcagaatccagtccatcgctgggattacattgttttgtgggtgagaggaattgtttacggacactccaggttgtagccgaactgggccggtacaggtgaccaggtgacttcaactccatcccctcaaatgggtaggtgtggggaggggaatgagaccaggtaacacaaaacacttaaaaagtacagaaaaactggaaaacacaaacacagatgacttgtccaaagtgcatccttctcagcccagagggcagggcctgcaaacagagtcccaggtgcctggggcaagacctggcagccgccttcagggggcggctcagtacggctatcgcttataaaaagtaataaattaggctgggcccagtggctca

SEQ ID NO: 188582 - DNA, 1446 bp, Homo Sapiens
ttggctgagagcctgtggaacctgcccgtctcccctcctccatcagacacacctgcctaggaaacaggaaaggacctcggaagtcttctaaggagagtcatggcgtattaccaggagccttcagtggagacctccatcatcaagttcaaagaccaggactttaccaccttgcgggatcactgcctgagcatgggccggacgtttaaggatgagacattccctgcagcagattcttccataggccagaagctgctccaggaaaaacgcctctccaatgtgatatggaagcggccacaggatctaccagggggtcctcctcacttcatcctggatgatataagcagatttgacatccaacaaggaggcgcagctgactgctggttcctggcagcactgggatccttgactcagaacccacagtacaggcagaagatcctgatggtccaaagcttttcacaccagtatgctggcattttccgtttccggttctggcaatgtggccagtgggtggaagtggtgattgatgaccgcctacctgtccagggagataaatgcctctttgtgcgtcctcgccaccaaaaccaagagttctggccctgcctgctggagaaggcctatgccaagctgctcggatcctattccgatctgcactatggcttcctcgaggatgccctggtggacctcacaggaggcgtgatcaccaacatccatctgcactcttcccctgtggacctggtgaaggcagtgaagacagcgaccaaggcaggctccctgataacctgtgccactccaagtgggccaacagatacagcacaggcgatggagaatgggctggtgagtctccatgcctacactgtgactggggctgagcagattcaataccgaaggggctgggaagaaattatctccctgtggaacccctggggctggggcgaggccgaatggagagggcgctggagtgatgggtctcaggagtgggaggaaacctgtgatccgcggaaaagccagctacataagaaacgggaagatggcgagttttggatgtcgtgtcaagatttccaacagaaattcatcgccatgtttatatgtagcgaaattccaattaccctggaccatggaaacacactccacgaaggatggtccaaaataatgtttaggaagcaagtgattctaggaaacactgcaggaggacctcggaatgatgctcaattcaacttctctgtgcaagagccaatggaaggcaccaatgttgtcgtgtgcgtcacagttgctgtcacaccatcaaatttgaaagcagaagatgcaaaatttccactcgatttccaagtgattctggctggctcacagcggttccgggagaaatttccacccgtgtttttttcctcgttcagaaacactgtccaaagctcaaataataaattccgccgcaacttcaccatgacttac

SEQ ID NO: 188583 - DNA, 885 bp, Homo Sapiens
tggtggatggtggctggaagcagcgcacatgctccacagtggaactgtctgtctccacggacttcatgtatttgttcaggatggcaaaaacctcattgtccaagatctgatacttcctgatcccggtcggccatctttttcaggggcacatttttaatgatttcatccttcccgtcctgcctctgcacttttagcaggtggtaacagaagtcgaacaggtcaaagcgacgctgctggcccagcaggacaatgatggagcaaccagcccagttcaagccatcgccgaaacactgctcagctgtgaactcgttggttcccacagggatgcagtacacgaactgcatggcgctccacagccggtggaactccacacactcatcgacgtgcatgacgccattggtgggcggtgggccccgccagatggggtcctgcaggtagctccgaatgcgggtcaggatgacctcgaacatggacaggccacagcacagccgctccttggtcaggaggtcaccctcgcgagcaatggcgatttgctgaggggtccccagccgctcgatcagagggaccaggtggagcggggcatacttggcttccagacgtttcatccggacctccaggcgctccccctctttgatgtagactctaggcaagatgttttggaagggtgcggcatggagcaaatcgcagacctcctcctgagacagagcttgctctatgaggaggcagaagaggatggcattgcccacttccctcaggctctggaacacgtctgttttgagctctgcgtactcaatgatgtccttcagctggtggtggaagaactccaggatccctggggagccatactcatgtcggggcaagcggcatatcttgggcatcacccaa

SEQ ID NO: 188584 - DNA, 1112 bp, Homo Sapiens
gatgttaaaatagggccacaaactcttttctgtttctctcagtaagagatgcattataattctcttcccaaagtgctgggattacaggcatgagccactgtgcccggccaagatctaactcacgcttacttttcattaaaatatttcttgtcgcttttagctattgtcagaatccaataaacagcttacgcattcattttggtaaagcaaatttcacaggaaaatagacaaaattataagagattcctggagacaacacaaggaaaacaatgtttaaaagcaaaatagcctgtgtaatgttaggtaatgtaatgcccaagtgaataaaagatttttcgtcaagcaaactactgtttctactttgggggaaaaaagtcagttttacatttgtaatttaaggaaagaacagaaagcacaaaggtttttcttttctttattaatggcctactagaaatgagcagtgcaagagtctacctgtactattctaatacagtaagatattggacacaaaatggaggtaactttttaaaatagattggcttggaagttgaaatgtagattaatggatataacccaatagaaagggattttcaaataaaaccaaagtctatttttttatttactttctaattttgaacagatgactcagtcctaaatctttgcctttatttcctataaaatgtaggtgatacttgtaactcgacttcctggagttaattcttcagcaagaggtgaccctgggagcgtactttaaaataattgctgtacagccattgagtactaacatgatgataggttttcaaaatatctttgtagtggatgctgcataattacattcacttctcttagactgtaaaagactttcttgacttgttttaacagtagagatagcagtacaatttgaatttatggtttaggctctgcaattagaggaacaattgcagtttcctcctacccttcatatggtctgtgtaaactgatgtttgcttaacttattttaaaagttgattacgttttcagaaaataaagataatcacttttgccatggttataatcaaatctaagctttcagacttgagagccatggtgtaaaactcacgaggtttatttaa

SEQ ID NO: 188585 - DNA, 908 bp, Homo Sapiens
ttggtggaggagtatctgatagggcagtccattggtaagggctgcagtgctgctgtgtatgaagccaccatgcctacattgccccagaacctggaggtgacaaagagcaccgggttgcttccagggagaggcccaggtaccagtgcaccaggagaagggcaggagcgagctccgggggcccctgccttccccttggccatcaagatgatgtggaacatctcggcaggttcctccagcgaagccatcttgaacacaatgagccaggagctggtcccagcgagccgagtggccttggctggggagtatggagcagtcacttacagaaaatccaagagaggtcccaagcaactagcccctcaccccaacatcatccgggttctccgcgccttcacctcttccgtgccgctgctgccaggggccctggtcgactaccctgatgtgctgccctcacgcctccaccctgaaggcctgggccatggccggacgctgttcctcgttatgaagaactatccctgtaccctgcgccagtacctttgtgtgaacacacccagcccccgcctcgccgccatgatgctgctgcagctgctggaaggcgtggaccatctggttcaacagggcatcgcgcacagagacctgaaatccgacaacatccttgtggagctggacccagacggctgcccctggctggtgatcgcagattttggctgctgcctggctgatgagagcatcggcctgcagttgcccttcagcagctggtacgtggatcggggcggaaacggctgtctgatggccccagaggtgtccacggcccgtcctggccccagggcagtgattgactacagcaaggctgatgcctgggcagtgggagccatcgcctatgaaatcttcgggcttgtcaatcccttcta

SEQ ID NO: 188586 - DNA, 1328 bp, Homo Sapiens
  misc_feature (63)..(103): n is a, c, g, or t
ttggcaaagcggtaggttttatccctattttgcagattaggaaatgaggtccagagcagtgannnnnnnnnnnnnnnnnnnnnnnnnnnnnnnnnnnnnnnnnacagaaccagtactaaaacacaggtcttctgacttttgagctttttgctcttcagcttttccttataaataaatgtttggattaatggattgatgtcaaaaataggttccttttagtgtttgctccttccgactccactcagattctttttttaaaatttctttctaaaaaagcataactcaaattcttaatacagattgttccaaagcacattaggatggtggagttattcttaccaacttcagtctgaattacttttaaatttgtccccaaaggtggttttgacattatgggttttactctgatctttattctcgtgtcttctgaagttccgtgtaatagatactctaacccaagaagtgatggctatttagattttcttttgcatacaattctcattcccaaagatgtctccctttggttgtccaaaaagctttctgaggtatagttacttttagaagaggaaataccgttttaattcatttgtgctcttgagattgtgtatgtgtggtaggtgtttttgttgtattattacaggttgatgaaaagcccagaaccttgatgacagattgtctggttataaagcattttttacgtaaaatcatcatggtgcaccctaaggtcagatttcatttcagtgtaaaggtaaatggaatcctctccacagagatctttggggtggagaatgaacccactttgaaccttgggaatggaattgctcttttggtcgactcccagcattatgtgagtagaccaaattttggtacaattgaatcacactgcagcagaattcaccctgtgctaggacatccagtaatgcttttcatccctgaagacgtggctggcatggacttgttgggagaactgatactgactccagcagctgcactgtgccccagcccaaaggtttcttccaaccagcttaacaggatttcttcagtttccatatttctatatggacctttgggtctgcctctgatattgtcaacttgggagcagccgatgactactttcttcaaagatacctcttctttagttgactggaaaaaataccatttgtgtatgatacccaatttggatctcaatttggatagagattttggtgcttccagatgtgagttatcggtggaatccagtgaggaggatcagtctcagactatggatcctcaaggacaaactctgctgccttttctctttgtggattttcacagtgcatttccagtcc

SEQ ID NO: 188587 - DNA, 1093 bp, Homo Sapiens
actttgtacaaaaaagttgggtggaatccagccgaggaaagatcagtctcagactatggatcctcaaggacaaactctgctgctttttctctttgtggatttccacagtgcatttccagtccagcaaatggaaatctggggagtctatactttgctcacaactcatctcaatgccatccttgtggagagccacagtgtagtgcaaggttccatccaattcactgtggacaaggtcttggagcaacatcaccaggctgccaaggctcagcagaaactacaggcctcactctcagtggctgtgaactccatcatgagtattctgactggaagcactaggagcagcttccgaaagatgtgtctccagacccttcaagcagctgacacacaagagttcaggaccaaactgcacaaagtatttcgtgagatcacccaacaccaatttcttcaccactgctcatgtgaggtgaagcagcagctaaccctagaaaaaaaggactcagcccagggcactgaggacgcacctgataacagcagcctggagctcctagcagataccagcgggcaagcagaaaacaagaggctcaagaggggcagcccccgcatagaggagatgcgagctctgcgctctgccagggccccgagcccgtcagaggccgccccgcgccgcccggaagccaccgcggcccccctcactcctagaggaagggagcaccgcgaggctcacggcagggccctggcgccgggcagggcgagcctcggaagccgcctggaggacgtgctgtggctgcaggaggtctccaacctgtcagagtggctgagtcccagccctgggccctgagccgggtccccttccgcaagcgcccaccgatccggaggctgcgggcagccgttatcccgtggtttaataaagctgccgcgcgctcaccaagtcctcttccgcgtctgcttccgcgtcgggcccgggcggggcggggcggggcgtggagccgcgccgcggcctgacgtcacccacacctccctgggactgcgtcactggtgcgcgccgcgggtcagggcgcaatggcggcgctgggcggggatgggctgcgactgc

SEQ ID NO: 188588 - DNA, 1440 bp, Homo Sapiens
  misc_feature (877)..(918): n is a, c, g, or t
gcagccacagcacgtcatccaaggcggcttccgaggctcgccctgcccggcgccagggccctgccgtgagcctcgcggtgctccatcctctaggagtgaggggggccgcggtggcttccgggcggcgcggggcggcctctgacgggctcggggccctggcagagcgcagagctcgcatctcctctatgcgggggctgcccctcttgagcctcttgttttctgcttgcccgctggtatctaggagaaaaacaagcctcttcatcttactttcatggccctgtgctaggagcacccttggccaaggggaagcctgggagaacgggcgccgaggggctcttcccaccgcatccctgtcagcaggtcccatccacaccaaaaccctgcagctgtgggcgcttctggagcagcccgaggctgcagagacgtttcagggtctccctattctctcacccaggcgggagattgtcccgagccctcacttgggggactcaggccgctcagtaactttctgtatagattcttcctggagtctgcactgacaagctcccctccctgccagcctctgtcccccctcacctttctggcctcagttctgtctccctttgttgctcacgttgcattgagcagtgcccataggcagctttcctactcttaactgattcatttgtcaaattaaagcgagtttagatggatagattcttccccagcaggtcttggggatgcagatcaatgagcttttccctgagagaagctcacagatgctaggaggggatgcagacctgtgtacaaagcccagggttagaatagagaaggaagccgaccacctctggatgtgaagaagggtttccatgaggagatacctgagctgaccttttgnnnnnnnnnnnnnnnnnnnnnnnnnnnnnnnnnnnnnnnnnncctttttttctagggttagctgctgcttcacctcacatgagcagtggtgaagaaattggtgttgggtgatctcacgaaatactttgtgcagtttggtcctgaactcttgtgtgtcagctgcttgaagggtctggagacacatctttcggaagctgctcctagtgcttccagtcagaatactcatgatggagttcacagccactgagagtgaggcctgtagtttctgctgagccttggcagcctggtgatgttgctccaagaccttgtccacagtgaattggatggaaccttgcactacactgtggctctccacaaggatggcattgagatgagttgtgagcaaagtatagactccccagatttccatttgctggactggaaatgcactgtggaaatccacaaagagaaaaagcagcagagtttgtccttgaggatccatagtctgagactgatcctcctcactggattccacctgataactcacatctggaagcaccaaatcccaacttttttgtacaaagt

SEQ ID NO: 188589 - DNA, 909 bp, Homo Sapiens
ttggggttggggcttcaggcagcagactgaccatctcccagaccgccagtgactgggggaggacctgctctgccctctccccaccccttccaatgagctccttgtttttgccaaagtttctaggggtgcctctgtgttcatccccttcctgatctaaccggctccctcgccagtcccgggggcctgccctgctcccaccaggagagagggcaaagggatgagcctgggtttggactctaaaatctcagcactgccccatgggtcctagacttcccagggcaagaggaagaccctgccattccacagccccttcctctgccaggtgcttggctctctgagagcaaacaggaacactagagaccaaaaaggggacaaaggagaagggctgagcccaccttcttgctcctacccttggtgcctaatgctgtgtgatgcacctgcagggtgtgtgctagcctctgtgccccgtccttgtgccaggtcaaggtgggggcaggctgggccctgcatttctggggcaggaacagagggtgaaagggacagatagatgcaggtccattctgcacctcttggctcgggtgcagagttcaccctgtgccctccgttataagtccctcccccagccctgtcatgtgccttgggctcctcctgccctccatctcagccattggggcagggaccctcctacactacagatgggccaggggatccctctctccctagtgccttccaccctttactccccagagcagcttggcccagggaaggggggatgctgcttaactgatcccgccctgacccagaggaagcctctatttatttattagcttttgtttacaccgtggaattgaccccttcctccaggggtcttgggtgggggagcccagggcccctgtgacccctcctttc

SEQ ID NO: 188590 - DNA, 2504 bp, Homo Sapiens
ttggcctctcgatgctgccaatgtcaccaacagcaatggggcccaccatcagcctggacctggacgtggatgatgtggagatggagaactatgaggccctcctgaacctggccgagcggctgggagatgccaagccccggggtctcaccaaagcagacatagagcagctcccgtcgtaccgctttaacccggacagccatcagtcggagcagacgctgtgtgtggtctgcttcagtgacttcgaggcgcggcagctgctccgagtcctcccctgcaaccatgagttccacaccaagtgtgttgacaagtggttgaaggccaaccggacgtgtcccatctgccgggccgacgcctccgaggtgcccagggaggctgagtgaggccacgcagccgcctgcccgggagaaccctgcctgaagctctggaaacttgtgggtggggcccagggaggatggggagggagtggcccaggcctgccccttcgctcctgcctgcatttccagagctggtgccagggtcagcccagcgaggagtccctgcaataagcccctgcatttgccaagctccaaagactccctccctagtctgcctgcccgcccgcccgccacggagctgcctgagtgtccctgatcgggtctccctcctgtgcaccctcaggtccctccttttcctgctggcactgagtgccaggggtccgctccctcagtggggccggtggagatccttggccccaggatgggcagacagagcaccatcctgggtcagaaggtctcatgctctgaaatggcgtgccctctgcccaggtggcactgccaggtgcgtagacagacggtgtcacgagccatttcctgagccccagggctgaatcccccctccttgaccccgaacagtgaactcaggcagctggctctgtgttggctgctgtgagggctgagtctggttccctaggggaccctcatcccaggaacaacattccagccccaccctcaggctggagggcgtcccagcctaatcccgagctggggcacacgtatcctgaggggcttgggccatacggggagagggagccctgtgttcccggtggttgtccctcccagggatgcagccagacccgtgcccaatctcctctccctctgttgttttgcatgaacgtgaggagcagcagtttttgttcattcatttggcccaaaatcacgtgtaggatttggggatgtggatatttaagacaatttcttttttcttttggtttaataggggcgggtatagggaccaactgggaccgagtgcccagggggccgagcacggtcatgctggccggcctgcatgcatgcgtgtgccgggctgggctgggcggccggcggtcgtggggcagggttgggggtctgtgctcagctgataactgccatgcactgtactgcacacgtccctagagcctaccgggacccgacgcttttcagggcatttctccctccagccagggcccaactcccacctgcctgggcgaatctcctccaagttctggaggaggccgctgtagggtctggctgagcttcccacccactttccctggtcccaatcctttcttgtcctatacccagctggggttgctgccctgaacgaactgcgtgtggggccggcacatcctagcaggcagcccctggcgcctgctgcctcagggatgctccaaccaccctcgttctcctcgcagtggccctggctcccacctcccgccccagcctgccgtggggcccgtcagcctggtcccacccccatggagaacccaaagtcttactgtatataactccaggtgacgtttctatatttatagcagtgttgaaaacccacgtgttttacacagaaccaccctctccaacccctcccttcccgaccccaacaaaacgttttcaaaccccttacagttcctggggcaggcggaaacaggctcacagattgtgtgtcggctgcagcagtgattccaacaagcagctattgggggggaaacacagcatttaaaaagatcatcattaaaaaacaagatttatacaacaattacttaggatgtttgtgatctgccgaccttgctatagatgccatgttaccaatgatttcctgtggtgggggcttgccattgtttactctcttatttaccaacttctggcctaggcatgacagtgggcaccttcccccagccctggctgggcccagcgcctgtgttctgtgttagaaaggttttatatatatataaaattacatatatatgtagaaatatatgtaattttgggggccctgttccttgcacattttacagttacctcatttttcccatgtatgtatttgagaaaatgctatatatagagaaaaaaatgggttcttaaagcttaaaatgtgtggttttttcattccatgggattccacatttggctggtaccatttaacataactagtatgttgaatataaaaaagtgtatacctgattgaaattttaaacaaattgtacctttttt

SEQ ID NO: 188591 - DNA, 955 bp, Homo Sapiens
  misc_feature (708)..(769): n is a, c, g, or t
ttggcacacgttattcggatcgtccatcctccggtccgcgcaccaggaagctgaagaagaagaagaacgagaaggaggacaagcggccgcggaccgcgttcacggccgagcagctgcagagactcaaggcggagttccaggcaaaccgctacatcacggagcagcggcggcagaccctggcccaggaactcagcctcaacgagtcccagatcaagatctggttccagaacaagcgcgccaagatcaagaaagccacaggcatcaagaacggcctggcgctgcacctcatggcccagggactgtacaaccactccaccaccacggtccaggacaaagacgagagcgagtagccgccacaggccggggccgcgcccgcgccccctcccggcaccgccgccgtcgtctcccggcccctcgctgggggagaaagcatctgctccaaggagggagggagcgcagggaaaagagcgagagagacagaaagagagcctcagaatggacaatgactttgaaacgcagcatttttgaaaagggagaaagactcggacaggtgctatcgaaaaataagatccattctctattcccagtataagggacgaaactgcgaactccttaaagctctatctagccaaaccgcttacgaccttgtatatatttaatttcaggtaaggaaaacacatacgtgtagcgatctctatttgctggacnnnnnnnnnnnnnnnnnnnnnnnnnnnnnnnnnnnnnnnnnnnnnnnnnnnnnnnnnnnnnncccctcccccaccgcctcgctgcccccagcccagtttcgttttcgttgcctttttcatttgaatgtcattgcttctccggtgcctcccgacccgcatcgccggccctggtttctctgggacttttctttgtgtgcgagagtgtgtttcctttcgtgtctgcccacctcttctccccacctcccggg

SEQ ID NO: 188592 - DNA, 432 bp, Homo Sapiens
  misc_feature (267)..(321): n is a, c, g, or t
cctcgctccccaccccactttgccagcggcccgtgggggtgcgcggaggaaggaggcaggcgaagcctcagcgaaggcacggggcgggtgcaggaaaaaagctcaggcgtctggcctggatcgctcgttcttatctagcagatagatctcgctgtctctccctctctaatttgtagacatccagatatggagacacttggctatttcttttttctttctgcaaccagattcaatgatttgatttaaatggggagtaagccacggccnnnnnnnnnnnnnnnnnnnnnnnnnnnnnnnnnnnnnnnnnnnnnnnnnnnnnnnctccaataatttttttcttaaagggaaaaaaatagtatttaaagtctagccatcttcctaggcagtagtgaggggtttgacttccccgagtgtcacgctcagcccaaccaa

SEQ ID NO: 188593 - DNA, 149 bp, Homo Sapiens
ttggccgcaagggcaactgggtggaaagaaagagaacgcgcgggcaaatctgctggtgaccgcctggggtggccccctctcggttctaggctcggcgagggtgaggttctccagccgggctccgcgagccttctttagaaagaagccaa

SEQ ID NO: 188594 - DNA, 1593 bp, Homo Sapiens
  misc_feature (155)..(215): n is a, c, g, or t
tgtacaaaaaagttggataagatcgccgtttgcggtcgctgcccgagaaggaattcggagcagacgcgaggcccggcgctcgcgccgcgcccgggagcccgggagggagaccggcagcggcggcatgaggcaggcgacgcggcgctggtgagcannnnnnnnnnnnnnnnnnnnnnnnnnnnnnnnnnnnnnnnnnnnnnnnnnnnnnnnnnnnnagcgccgaacggccgggggctcccctcccccgctgccgggccgtgatttgccgggcctgctgcgccccccgcccaccccttgcctcagccgccgcctcgccgcttcccctcgtcggagcggccgctcgtccgcccggcttgaggcccgcggggagcgcggcgcaattcgtcggcccgcgggggggcggcctcccggcatcatcgcggcgaccaaggactaccaggaaggggagcggctgggatggcgcgtccgcggccccgcgagtacaaagcgggcgacctggtcttcgccaagatgaagggctacccgcactggccggcccgaattgatgaactcccagagggcgctgtgaagcctccagcaaacaagtatcctatcttcttttttggcacccatgaaactgcatttctaggtcccaaagacctttttccatataaggagtacaaagacaagtttggaaagtcaaacaaacggaaaggatttaacgaaggattgtgggaaatagaaaataacccaggagtaaagtttactggctaccaggcaattcagcaacagagctcttcagaaactgagggagaaggtggaaatactgcagatgcaagcagtgaggaagaaggtgatagagtagaagaagatggaaaaggcaaaagaaagaatgaaaaagcaggctcaaaacggaaaaagtcatatacttcaaagaaatcctctaaacagtcccggaaatctccaggagatgaagatgacaaagactgcaaagaagaggaaaacaaaagcagctctgagggtggagatgcgggcaacgacacaagaaacacaacttcagacttgcagaaaaccagtgaagggacctaactaccataatgaatgctgcatattaagagaaaccacaagaaggttatatgtttggttgtctaatattcttggatttgatatgaaccaacacatagtccttgttgtcattgacagaaccccagtttgtatgtacattattcatattcctctctgttgtgtttcggggggaaaagacattttagccttttttaaaagttactgatttaatttcatgttatttggttgcatgaagttgcccttaaccactaaggattatcaagatttttgcgcagacttatacatgtctaggatccttttatcaaggcagttatgatcatcgttttcctgccttgaccccaccatcatcaaacactcagttaaatataaattaacattttttagatgaccactcaacataatgcttaagaatggaatttcctctctgtgacagaacccaggaattaattcctaaatacataacgttggtatattgaagacgaaattaaaattgtccttcagttttgaggccatgtgtaaagtttaacc

SEQ ID NO: 188595 - DNA, 844 bp, Homo Sapiens
ttggcctccgtgtccttcgtgtctcaggtccttgggaaagcctgtgtccacgggaggcagcaggagatcctgggcgtgctggtaccccggctggcagcgctcacccagggcagctacctgcaccagcgcgtctgctggcgcctggtggagcaagtgccggaccgggccatggaggctgtgctgaccgggctggtggaggccgcactggggcctgaggtcctttcgagactgctggggaacctggtggtgaagaacaagaaggcccagtttgtgatgacccagaagcttctgttcttacagtcccggctcacgacgcccatgctgcagagcctgctgggccatctggccatggacagccagcggcgcccgctcctgctgcaggtgctgaaggagctgttggagacgtggggcagcagcagtgccatccgccacactcccctgccgcagcagcgccacgtcagcaaggctgtcctcatctgcctggcgcaactcggggagccggaactgcgggacagccgggatgaactgctggccagcatgatggcgggcgtgaagtgccgcctggacagtagcctgccccccgtgcgacgcctgggcatgatcgtggcagaggtcgttagtgcccggatccaccccgaggggcctcccctgaaattccagtacgaagaggatgaactgagcctcgagctgctggccttggcctctccccagcctgcgggtgacggcgcctcggaggcgggcacgtccctcgttccagccacggcagagccccctgcagagacccccgcagagatcgtgggatggcggcgtcccccaagcacaagctggccgggctctgactcgg

SEQ ID NO: 188596 - DNA, 1700 bp, Homo Sapiens
tgggtgaagacagatttattcagttgtaccttgttttatgaaaagacaaacctctagatcagaatgccgagatttggttgtgcctggatctaaaccaagtggaaatgattcctgtgaattaagaaatttaaagtctgttcaaaatagtcatttcaaggaacctctggtgtcagatgaaaagagttctgaacttattattactgattcaataaccctgaagaataaaacggaatcaagtcttctagctaaattagaagaaactaaagagtatcaagaaccagaggttccagagagtaaccagaaacagtggcaatctaagagaaagtcagagtgtattaaccagaatcctgctgcatcttcaaatcactggcagattccggagttagcccgaaaagttaatacagagcagaaacataccacttttgagcaacctgtcttttcagtttcaaaacagtcaccaccaatatcaacatctaaatggtttgacccaaaatctatttgtaagacaccaagcagcaataccttggatgattacatgagctgttttagaactccagttgtaaagaatgactttccacctgcttgtcagttgtcaacaccttatggccaacctgcctgtttccagcagcaacagcatcaaatacttgccactccacttcaaaatttacaggttttagcatcttcttcagcaaatgaatgcatttcggttaaaggaagaatttattccatattaaagcagataggaagtggaggttcaagcaaggtatttcaggtgttaaatgaaaagaaacagatatatgctataaaatatgtgaacttagaagaagcagataaccaaactcttgatagttaccggaacgaaatagcttatttgaataaactacaacaacacagtgataagatcatccgactttatgattatgaaatcacggaccagtacatctacatggtaatggagtgtggaaatattgatcttaatagttggcttaaaaagaaaaaatccattgatccatgggaacgcaagagttactggaaaaatatgttagaggcagttcacacaatccatcaacatggcattgttcacagtgatcttaaaccagctaactttctgatagttgatggaatgctaaagctaattgattttgggattgcaaaccaaatgcaaccagatacaacaagtgttgttaaagattctcaggttggcacagttaattatatgccaccagaagcaatcaaagatatgtcttcctccagagagaatgggaaatctaagtcaaagataagccccaaaagtgatgtttggtccttaggatgtattttgtactatatgacttacgggaaaacaccatttcagcagataattaatcagatttctaaattacatgccataattgatcctaatcatgaaattgaatttcccgatattccagagaaagatcttcaagatgtgttaaagtgttgtttaaaaagggacccaaaacagaggatatccattcctgagctcctggctcatccatatgttcaaattcaaactcatccagttaaccaaatggccaagggaaccactgaagaaatgaaatatgttctgggccaacttgttggtctgaattctcctaactccattttgaaagctgctaaaactttatatgaacactatagtggtggtgaaagtcataattcttcatcctccaagacttttg

SEQ ID NO: 188597 - DNA, 833 bp, Homo Sapiens
  misc_feature (220)..(264): n is a, c, g, or t
ttggcatatagataaatattatcaccaactaccatagctaatattcctttcctttctgcaggtcaatttttctgtggaaataaatattgtgataaaaaagaaggcttaaagagttgggaagttaattttggttatattgagcatggtgagaagagaaatgcacttgttaaattaaggttatgccaagaatgttccattaaattaaatttccatcacaggnnnnnnnnnnnnnnnnnnnnnnnnnnnnnnnnnnnnnnnnnnnnngactgtgaagagtcatcacataaaaaatccagattatcttctgcagaagaggcctccaagaaaaaagataaaggacattcatcttcaaagaaatctgaagattctctacttagaaactctgatgaggaagaaagtgcttcagaatctgaactttggaagggtccactaccagagacagatgaaaaatcacaggaagaagaatttgatgagtattttcaggatttgtttctatgagacgagagagagaagcctccgctccttaatgtgaaacttcatgaagttttaaacttcatgcaatttgaaattccatataagtttttatctgcaagttacagcttgtgtggtttgtctttggaaataaaaatccaggttctctcagaatgtcagaggctttggaagttcattagttcaattaaagactttcctgtcctttaaatatcttttcaattgcttatctacaattctgttttatttgtagctcctaaaggatagagctggacagattccattgttcctacattttgtaggttttttttcactgccttcattatgtatcttctcttgccgtc

SEQ ID NO: 188598 - DNA, 1383 bp, Homo Sapiens
gaaaaggagtggcactgcctcatcctccaaatccatcctcttcaagctactgagtggtccagctgttgggtgaggaggttgatgtggctggatggagaatactgtctcgctgcctgcttctcagctagccgctgaagttcagctgtaaccatactttggttgtaccgtttgctatataaagaagcatcttctccctctttttgtgttttggctattcctgaatgatgcttgtttagatagcacgatcctgcctttgctgaagagggacgagacagtttctggctatagatgtgtgcagcactttggaaggaagaaaagggaccaatggtgtgacttcctgatcgacagcgtggcaggccagtagggcttgggatgttctgtgccccgggatgtaggcagggagaagcactggcagagactgtgttcagtaaaattgttggctggtgaggcatgctggggatagctgaaggaatttgagataaagaagaatggtggcaaggccctggagagaggtcagaggttgtaacagatgacaaatgggtgttgggaattttctgcagagtagcagtaggaccagaggaggaattgctataaactaattttgcctctttttctgctgaagtggtaaatcgagataatttatcagaatgaatttctgtcgtctgttgctgtttaggtggctttattttcacttcttccattatagtctcagggtgatcaccttttgccccactatcagaataattgttgttgttcttagaaattttagagtgagtccccaggaagacactagcagacttgttcttttgggtataaaaagtcaacacctcctccagttcagcctcacttgcttgtctgatgaactcctgaaagttttccatattcaccccatcttcctcttcttcctcaactttcttctttgatttcttttcagccatttgttctgtttccttgttgtatacaatgataaagtcacccagctggtgggccaggattcttctgcgttccagaagtgccaatcgtcgactgggtaataccatcctcagtgaatgctggaggttatttgatgctcgcttgaggaaacgaacaaccagctccatctgttcatcctctttggcagcccaactggcactgaacgtctgaccgccactgtctttcatcaggcgaatttgaacatgctggagataggcagagaatgctattcgggcctgcattttgctaagattgccattatcttgaagaatctgcatcaggttaaatttaggctctagctcctgagtctcaagtttgcagcagtgtccacctttattattccattcacgaactttcatggaattttctttgggtgtattttctaccaaagccaacttttttgtacaaagt

SEQ ID NO: 188599 - DNA, 552 bp, Homo Sapiens
  misc_feature (320)..(338): n is a, c, g, or t
ttggcaaagatgggccacattggcgctgtcattttggtactgagcagagcgacgggcttaattcgacccaatccaggccagagtctttctctcaggggcttcctcgtgctcagctaatcctccgatcaatccttgggaatccctgggacctcttcggtatccctactctcagccagggatcatgtcttgggccgctcgcccgcccttcctccctcagcggcatgccgcagggcagtgtgggccggtgggggtgcgaaaagaaatgcattgtggggtcgcgtcccggtggcggcggcgacggccctggctggatcccgcannnnnnnnnnnnnnnnnnntggcaggcggagaacaacaaaccccggagccggagccaggggaggctggacgggacgggatgggcgacagcgggcgggactcccgaagcccagacagctcctccccaaatccccttccccagggagtccctcccccttctcctcctgggccacccctacccccttcaacagctccatcccttggaggctctggggccccacacccacccccgat

SEQ ID NO: 188600 - DNA, 1289 bp, Homo Sapiens
  misc_feature (304)..(336): n is a, c, g, or t
  misc_feature (532)..(550): n is a, c, g, or t
gaagaagcccttgcaaccctcacagctgtaaaccccgtagtgtttgcctgagcttctgtccccgcagattgcacatagccgtttgccagccccagagccacctggaagaggtggacagtgcaggccccggacccctaagactggtagcttcacatcttcagaggaggccagacccacccccagagagtgacactgttgagttaatctgggggctgctgacaggcccggagaatcctgggggagctggagggggcagaccaggggaccccatggaagaactgatgactggaaagggagagcccannnnnnnnnnnnnnnnnnnnnnnnnnnnnnnnnccccagagcctccaagggatggagctgttgaagggggtaggggtggcccaggaggagaagggggagggactccctggggaaggggatttggggaggagctgtctgggcttcgggagtcccgcccgctgtcgcccatcccgtcccgtccagcctcccctggctccggctccggggtttgttgttctccgcctgccannnnnnnnnnnnnnnnnnntgcgggatccagccagggccgtcgccgccgccaccgggacgcgaccccacaatgcatttcttttcgcacccccaccggcccacactgccctgcggcatgccgctgagggaggaagggcgggcgagcggcccaagacatgatccctggctgagagtagggataccgaagaggtcccagggattcccaaggattgatcggaggattagctgagcacgaggaagcccctgagagaaagactctggcctggattgggtcgaattaagcccgtcgctctgctcagtaccaaaatgacagcgccaatgtggcagccatctttgtacagacgggaagtctcggcgcgagttcccgccccctcgtctagttggaaaccgaggaggcggtctcctccggcctgttagcccgcctcgcccaccctcccctcaaatcacctccacactcgcgcatgcgtgtcagtgcaggatggattcgtcgctaccggagtgccgccatattggtaaaggcattagggcgaaggtggaacggaacttcctgttctcgcgggatctaaaggcgggactgccacgtccaagcaaaccgggaaaggagaggatcccggagccggtgagaattctctgatttttctctaccatcctttccaggccttttcctcacctaatgagtcgtagagacgagggcccagagagtctgtaaagtggctggtgaaagattagtgtcccagggccctacatccgggaggtgg

SEQ ID NO: 188601 - DNA, 1131 bp, Homo Sapiens
  misc_feature (461)..(470): n is a, c, g, or t
  misc_feature (798)..(816): n is a, c, g, or t
ttggcccattaatgggaatacaagaggcagctggcataaaacatttctttcactttcctttcccactcagattgcttcaagagaccaacagaacacagggatcaaaaacaaggaaaatttagcaacttcattaccttctaataagtaattcctgttagccactgcatcccaccaaaactagtttatttttcccctcaaattcatgatttttacgtctgttacaaagggaattttgctgatagctctttgggtcccactgttccattttatgctaatagattccattctagggcccagccgtctcttgactgatggtgttccctttaacccttggcatgtataatagaattttggtgaatgaaagaacccaaataggccagatagtccccccaggccctgatatccataaaaggcttgggaatgcattatgtaattgtccttagtctttttgttgttttagnnnnnnnnnncaagatgggctcagatggatgcctacgtaaaaatggttcctagctgtgtactcataacttttctttgaattgagtagtgaaaggaaggaggaggaaaggaaattaaatgtccttctagtattctctggactcaagtctgacatatgagataataacctatattgaaatgccaagaattgtatctgaaacaagagaacagtttgacacatttatcatgccttcatattacatattaactgaaaccaattaataaacatatgaaatatccattgcacaaggcaaaggcacctaaaccttttgtttctttttctacatagcacaaattgannnnnnnnnnnnnnnnnnnaggggaacctatataattatgacccagtgatgtcttttggtgacttaagcttatgaattcaggttacaattgagttgattctacatggttactaccttgaaaaggatgttggtgccttatgtgacacgagccaaagcctgctgggaataaacaaagcacattcatgccaacaccaactcgtagctttattggcagatgtttattttgtcacagactccctaaatgtggggctttggatttccaccccttcccacgtgtgtgtcatcttcctctttcacactcttgatgataattttaaaatggtgaaatcacctc

SEQ ID NO: 188602 - DNA, 932 bp, Homo Sapiens
  misc_feature (245)..(254): n is a, c, g, or t
attggtttcagttaatatgtatatgaaggcatgataaatgtgtcaaactgttctctgtttcagatacaattcttggcatttcaatataggttattatctcatatgtcagacttgagtccagagaatactagaaggacatttaatttcctttcctctccttcctttcactactcaattcaaagaaaagttatgagtacacagctaggaaccatttttacgtaggcatccatctgagcccatcttgnnnnnnnnnnctaaaacaacaaaaagactaaggacaattacataatgcattcccaagccttttatggatatcagggcctggggggactatctggcctatttgggttctttcattcaccaaaattctattatacatgccaagggttaaagggaacaccatcagtcaagagacggctgggccctagaatggaatctattagcataaaatggaacagtgggacccaaagagctatcagcaaaattccctttgtaacagacgtaaaaatcatgaatttgaggggaaaaataaactagttttggtgggatgcagtggctaacaggaattacttattagaaggtaatgaagttgctaaattttccttgtttttgatccctgtgttctgttggtctcttgaagcaatctgagtgggaaaggaaagtgaaagaaatgttttatgccagctgcctcttgtattcccattaatgggagtctctacattaatgctctacataatttggtcagactgatgagaggcaatagatttccaatgctgatgagatccagagccctggagcccatttatggcttgacattcacccagcaagacgctgacgtggcagcaaacacggctccaatgtccagcttacctcatagttatcccttcaatccttcttgatgagattggtctgagagatgagactgtacccaa

SEQ ID NO: 188603 - DNA, 1921 bp, Homo Sapiens
  misc_feature (77)..(103): n is a, c, g, or t
  misc_feature (499)..(534): n is a, c, g, or t
  misc_feature (682)..(698): n is a, c, g, or t
  misc_feature (1409)..(1434): n is a, c, g, or t
  misc_feature (1444)..(1503): n is a, c, g, or t
ttggaaccttttatactgacaaaccagagaaaaatggacctttttccagttaaaatattgctgtagatttagaggannnnnnnnnnnnnnnnnnnnnnnnnnnagaaaacctgatcttctctttttttgggttcattttgttctgggttttggttttcttcacaatcttgaacattttacagtagaactcatctaaaaatggatttggggatggggaaacatgcacaaaatcttttcataattaaaaagagccttactttctttacataccacatggacagaatttgtgtaaaagtgaattatctttattttaaaatgtatgtttcccctcactgtttgcagctcccaatgttgtcatttttaaatgttatatacatctcaagggttaaccagaccctttcctccaaacccaacctttcatttcctacttcattccagcaggaggcacttaggggagactcggatggggacatggagaacaacccaagctccttaaacnnnnnnnnnnnnnnnnnnnnnnnnnnnnnnnnnnnnataaagtgaggcaggaaaatgcttctccttttaaaatcccctccactcctcacacacacacacctcttgaaacccttccccaagaatgtttctttatagacggacttcattgaaatctttgttgttcttgaatcaagtgtaatataannnnnnnnnnnnnnnnnaaaatattcccactcagcactcagagaccccaaaatactgtaagtctcaattaacagcagaatctcagagaaaagctgtttgcaatccaaatccagcctttggaggaatagagatggtcaattaacaatcaaaaagaggagattaacctcttgtttttttaccacctggtgaatcagccataacgcacacacacgccacccagcctcttgtttctagtatgtactttgaaatgctaactgagggtcttgatgcttgagcctttgactgataaaactcaaatagcagtccccagtgatttgcctcttaggttctttcttaaattgttggtggatgactgtacattttagtgatttgaaaaataactgacaaaccattgaaacagtttattttatgttggaagagatggcgcagatgtgtgtcagaagggagatcacggtgtgagtttcgtagctatttaagtgatacatacctctagtttttgtatgtcttttgagatcctgagttcatcccctgtgaatcagagtgcacaagcacctctcctgtgagtggctaatgagaagagggacagaccgaccaccagcacagtagggcagatctggacagcagaatgttataacgcaagttcatgtgttgctcccaactccattctcttttctctcgtgcaaccagtttgcccattctcttcctattacttgctccagggataggtnnnnnnnnnnnnnnnnnnnnnnnnnntatatatatnnnnnnnnnnnnnnnnnnnnnnnnnnnnnnnnnnnnnnnnnnnnnnnnnnnnnnnnnnnntccatcattaaaaaatggaaactattataccacttggtatgtgcagtcaaatatccaaaagggggaagtactgcttaaagaaatatctgtaagcattaaattctctcctttatttgtacattttatatagataaatttttaaagtactaattaggcattaacttttttcaaatgcacaggtttgttggtttttttaatacactttaattgactttctcaagcgtgctaggtagaaacgcagaattccacatcttcccgctctcagctctgagcatgtgcaaggctgtgtaggacccagtttctctgtatatactattccagttcccagtcatctatgtagaaagtgcactgtgctgccatcgccctacatcttcagctgtgtcattgcttcctggttggggtggggacggggtgggtc

SEQ ID NO: 188604 - DNA, 1539 bp, Homo Sapiens
  misc_feature (733)..(866): n is a, c, g, or t
ttggcacagctatccagtaaggctatcatgatgtgtgctaaaattttatttacttgaattttgaaaactgagctgtgttagggattaaactataattctgttcttaaaagaaaatttatctgcaaatgtgcaagttctgagatattagctaatgaattagttgtttggggttacttctttgtttctaagtataagaatgtgaagaatatttgaaaactcaatgaaataattctcagctgccaaatgttgcactcttttatatattctttttccacttttgatctatttatatatatgtatgtgtttttaaaatatgtgtatattttatcagatttggttttgccttaaatattatccccaattgcttcagtcattcatttgttcagtatatatattttgaattctagttttcataatctattagaagatggggatataaaagaagtataaggcaatcatatattcattcaaaagatatttatttagcaactgctatgtgcctttcgttgttccagatatgcagagacaatgataaataaaacatataatctcttccataaggtatttattttttaatcaagggagatacacctatcagatgtttaaaataacaacactacccactgaaatcagggcatatagaatcattcagctaaagagtgacttctatgatgatggaacaggtctctaagctagtggttttcaaactggtacacattagactcacccgagnnnnnnnnnnnnnnnnnnnnnnnnnnnnnnnnnnnnnnnnnnnnnnnnnnnnnnnnnnnnnnnnnnnnnnnnnnnnnnnnnnnnnnnnnnnnnnnnnnnnnnnnnnnnnnnnnnnnnnnnnnnnnnnnnnnnnngcctaaatgctttttataaacatttttataagtgtcaagataatggcacattgactttattttttcattggaagaaaatgcctgccaagtataaatgactctcatcttaaaacaaggttcttcaggtttctgcttgattgacttggtacaaacttgaagcaagttgccttctaatttttactccaagattgtttcatatctattccttaagtgtaaagaaatatataatgcatggtttgtaataaaatcttaatgtttaatgactgttctcatttctcaatgtaatttcatactgtttctctataaaatgatagtattccatttaacattactgatttttattaaaaacctggacagaaaattataaattataaatatgactttatcctggctataaaattattgaaccaaaatgaattctttctaaggcatttgaatactaaaacgtttattgtttatagatatgtaaaatgtggattatgttgcaaattgagattaaaattatttggggttttgtaacaatataattttgcttttgtattatagacaaatatataaataataaaggcaggcaactttcatttgcactaatgtacatgcaattgagattacaaaatacatggtacaatgctttaataacataaactctgccagtcaggtttgaatcctactg

SEQ ID NO: 188605 - DNA, 796 bp, Homo Sapiens
tccatttggagcagagcttctctggcagcccccaggtctcccggaatcttcctcggtgtcctgcggagggctctggctccagcgtgggctccagcgcaggctgggcttccggctgggcttctgcgctccggccaggcccaaggcgaggcggcttgaccggggtgggcggtggcgctgcagggcctttccggcccgaaagggcccttcggaggctctgtaccttctgcaatccggtgcgccgcagccgctgggccctggactccaccggctcctcgtccgagctctctccaacttcggcctccggctgctctgggcccagctcggactggtccgccgggcccaagggctctggtgccttctggaaagcgctggctgggacttcaccctcctccttgaagagcagaacgtggagcttcccgcgcgccaccagcagcccgtggttggcctccagccgctgcacctgggctgcgcggcgcaccgcgcgctcttgggcggcgttggcgtgcgagctcacgcgctccgccttggccagcagctgcgccaaggtgttgctggtggtgtcgtggctgcgactcagagcgcccaggccgctctggatgcggcgcacggaccctgccaggcctccctgccttcgagccaggcctccctgccgctcccgcagagtctccagcatggaggccagcttctccagcagggtcaccaccgtcacggcgtgcacgggaccccccgccggcgcctcgggcacaggccccggctccaacgcactctccctcatgatccaacttttttgtacaaa

SEQ ID NO: 188606 - DNA, 2354 bp, Homo Sapiens
  misc_feature (338)..(347): n is a, c, g, or t
  misc_feature (861)..(871): n is a, c, g, or t
actttgtacaaaaaagttggtgttaatttacgtctaaactttcaccaatatcttacacttatataacaggctttatataagggcctcagcagcgtaatttcacctgaggcagagaattatcctaattttgcaggtgagagctgtggctcacggggccagagccatgaagacggtgcaggggagctgggagagctggcctcggtctccagttctctgcacatgtcccacctctcaatcttgttgcttcagtcaaagaaagtgtcaatctttcccatgttaggacctacttaattggtaattaaaatatttatacatttagtgctaattttctctttccnnnnnnnnnncctttctacacatagggtgttcctgaaaagccccatagtgattgagtcttcaaaaccaccgattctgagagcaaggaagattttggaagaaaatctgactgtggattatgacaaagattatcttttttcttaagtaatctatttagatcgggctgactgtacaaatgactcctggaaaaaactcttcacctagtctagaatagggaggtggagaatgatgacttaccctgaagtcttcccttgactgcccgcactggcgcctgtctgtgccctggagcattctgcccaggctacgtgggttcaggcaggtggcagcttcccaagtattcgatttcattcatgtgattaaaacaagttgccatatttcaaagccttgaactaagactcaattaccaacccgcagttttgtgtcagtgcccaaaggaggtaggttgatggtgcttaacaaacatgaagtatggtgtaataggaataatatttatccaaaagatttttaaaaatagggctgtgtttnnnnnnnnnnncaaaacaagaaaagcagcagtgattatagagaggtcacactctaagtggggtcgcggcgtggccacgcttcacggtcacgctcgtccgtcctgcagtggcgtgtttacatggtcacacgtgtgtgtatcaccagtgggtcaactgcttgtcattcctcccgtggcagtttgtgtagacaatcttactgagcaaaaggcaatgaaaagtcttggttcccacactgcgatatattggaattttcacctcagtttatgaagtttatttcgaaatccatagtcatctaagaatgaatacctgtctgccatgtatttcaatcttagtgagccaaaattgtttgtttgttactacagaatagagatgactgttttttgccacagccctatggaatttgcaatctgtgattgccttgtaaaaaggagagtgcatatggcactgcattaaacgtgtggtgtttctagtcaatgatattggtgagcacaatgtattcatttaatggcatagaccataccagacctaatttgcaagtattgggtcttaaacttcaagtgcaatgtatatgaaaaccaatctgagccttgtatctcttaaatatttattttttttaacgtgtgagatgttcgagagaaggttctccattcatttcagtgctgcctggaggaaactcggcaatgatttctttcagttgtgaagttcctttcgtgttacaccctccactgaaccctcaaccttcgaaatactccagttttgtgggtttggtcatttttacttataaatttacctttttgtattttgcaatttacatgtgtttggtttgttttaaattctgtgaaagtggcttgattaaaagactccttttaaatggaagccaccagtcagcagaatggaagcttagaggaacttgcctgtgagcgctggtctttgtgtttggttttgtgatgtaacgatctttgctggggttttttgctttgttttgagggaaatgtcttggagtaaattttaagttcctggagttaatttgttttacaggaattttgttttttaaaaaaataggatcattctgaactttggaatgacccccttatatattttctgaaaatgaaaacagttacatgaaaaaaatttccaatgaagatgtcagcattttatgaaaaaccagaagttattagatgaaagcagcgagtgaatctttaaaacagacttgatcacgcacacacaataagtctttctctccgaaaccggaagtaaatctatatctgttagaaataatgtagccaaaagaatgtaaatttgaggatttttttgccaatagtttatagaaaatatatgaaccaaagtgatttgagtttgtaaaaatgtaaaatagtatgaacaaaatttgcactctaccagatttgaacatctagtgaggttcacattcatactaagttttcaacattgtgttctttttgcattcattttttacttttattaaaggttcaaaac

SEQ ID NO: 188607 - DNA, 908 bp, Homo Sapiens
ttgggactcggccggtagtggagatgtccggccggtctaagcgggagtctcgcggttccactcgcgggaagcgagagtctgagtcgcggggcagctccggtcgcgtcaagcgggagcgagatcgggagcgggagcctgaggcggcgagctcccggggcagccctgtgcgcgtgaagcgggagttcgagccggcgagcgcgcgcgaggccccggcttctgttgtcccgtttgtgcgggtgaagcgggagcgcgaggtcgatgaggactcggagcctgagcgggaggtgcgagcaaagaatggccgagtggattctgaggaccggaggagccgccactgcccgtacctggacaccattaacaggagtgtgctggactttgactttgagaaactgtgttctatctccctctcacacatcaatgcttatgcctgtctggtgtgtggcaagtactttcaaggccggggtttgaagtctcacgcctacattcacagtgtccagtttagccaccatgttttcctcaacctccacaccctcaagttttactgccttccagacaactatgagatcatcgattcctcattggaggatatcacgtatgtgttgaagcccactttcacaaagcagcaaattgcaaacttggacaagcaagccaaattgtcccgggcatatgatggtaccacttacctgccgggtattgtgggactgaataacataaaggccaatgattatgccaacgctgtccttcaactctatctaatgttcctcctctccggaactactttctggaagaagacaattataagaacatcaaacgtcctccaggggatatcatgttcttgttggtccagcgttttggagagctgatgagaaagctctggaaccctcgaaatttcaaggcacatgtgtctc

SEQ ID NO: 188608 - DNA, 1345 bp, Homo Sapiens
  misc_feature (240)..(283): n is a, c, g, or t
ttggcttgaagctccacttccaaccataaagcaagaagaggatgatcatgatgtagtctcctatgaaatcaaagacatgtgcataaaatgtttccatttttcaagtgtcaaatctaagattctgagattaatagaaattgaaaagagggagagacaaagggagttgaaggagaaaataagggaagaaaggaggaacaagctagcagcagagatgggagaagatggagaaaaagaatttcnnnnnnnnnnnnnnnnnnnnnnnnnnnnnnnnnnnnnnnnnnnnccattacctgaaatatttattccgtcaaccccctctcccatcctctgtggattttactcagagccagggaagttctgggtttctttgcattaacaaagttatgatgttttgtggaatgaaaaatggagcaattcgagtctatgtcctaaatcaaaatgatccttcattgaccagtttggtggactactggcacttcaatatgcatgacaataattatggatgtattaaaagtattgctaatagctttgatgatcgtttcttggtgactgctggagcagatggcaatatctttgttttcaacattttttctgaatttatgctaaggaaagacatgaaggccaaagttccatctcccaggtttggaattgaaacagagccaattccagaagacattgaagatcccaaagcctacagtatcgagaatgctaggagaaaaagagaacatgacaagttaatgaaagaagtgggagaaataaaggcacggaagagagagcaaatcaaagctttgaggagtgaattttgtaatctattagaaatgaatgaaaaattaccaaagcatatgcagtttaaacgaacagattttgatgtagattcccaaatccgtgctgagatgcacagaaaaacagctttcaaaattcaacaagtggaaaaggaattagcttgggaaaaagagaaacatgaactcggcctaatgaagctaaagaatcgatttcgagatccactggaaagtgatactattgtggttcatgccatactgagtgaccacaagatatcctcttacaggctggtgcagccctctaagtactccaaattcaaacgagctagtcaatcagagagaaaaccaagcaaattggacaggtttgaaaaagagggacctggaagaaaggacagccagagagatgcacgtgggagtgttaccatacaagaagaatcaataatagaaaaagggaagaaatttcggcctaaaaccctaagtgaaatcatcgtggaaaatcaaattgagaaacgagaaacttatattaaaagctgaaaggcacaactaaagattcacagcgaaaaaaa

SEQ ID NO: 188609 - DNA, 888 bp, Homo Sapiens
ttgggaggaatccgccgtgcaaatctgtccgcccccttggccactgatcccccgaagagcttctgtcgccgctctaggaatacagacattgaagtttgggacaagatatttatctaacttctgtgtcaaaattagcgacctgctatggcaatgaagaaagaaactgaatttgtcattttcacctgaagaaaaatgatagacaaaaatcaaacctgtggtgtaggacaggattctgtgccctatatgatttgtctgattcacatactcgaagaatggtttggtgtggagcagttggaggactatttgaattttgcaaactatctcttgtgggtttttacaccactaatacttttaatacttccttactttactatctttcttctctaccttactattattttcttacacatttataagagaaagaatgtattgaaagaagcctactctcataatttatgggatggtgcaaggaaaacagtggcaactctgtgggatggacatgcagccgtttggcatggttatgaagttcatggaatggaaaaaataccagaagatggaccagcacttataattttttatcatggagctattcctatagatttttactatttcatggctaaaatatttatacacaaaggcagaacttgccgagtagtagctgatcactttgtctttaaaattccagggtttagtttattactggatgtgttttgtgctctacatggaccaagagaaaaatgtgttgaaattctgaggagtggccacttgttagctatctcaccaggtggagttcgagaagccctaattagtgatgaaacttataacatcgtatggggtcatcgcagaggctttgctcagttgcaattgatgcaaaagtgcccattattc

SEQ ID NO: 188610 - DNA, 993 bp, Homo Sapiens
gccaactttagtacaaaaaagttggccacctccggcttttgggggatcactgtcctctctcggcagcagaatgagccggcaggtggtccgctccagcaagttccgccacgtgtttggacagccggccaaggccgaccagtgctatgaagatgtgcgcgtctcacagaccacctgggacagtggcttctgtgctgtcaaccctaagtttgtggccctgatctgtgaggccagcgggggaggggccttcctggtgctgcccctgggcaagactggacgtgtggacaagaatgcgcccacggtctgtggccacacagcccctgtgctagacatcgcctggtgcccgcacaatgacaacgtcattgccagtggctccgaggactgcacagtcatggtgtgggagatcccagatgggggcctgatgctgcccctgcgggagcccgtcgtcaccctggagggccacaccaagcgtgtgggcattgtggcctggcacaccacagcccagaacgtgctgctcagtgcaggttgtgacaacgtgatcatggtgtgggacgtgggcactggggcggccatgctgacactgggcccagaggtgcacccagacacgatctacagtgtggactggagccgagatggaggcctcatttgtacctcctgccgtgacaagcgcgtgcgcatcatcgagccccgcaaaggcactgtcgtagctgagaaggaccgtccccacgaggggacccggcccgtgcgtgcagtgttcgtgtcggaggggaagatcctgaccacgggcttcagccgcatgagtgagcggcaggtggcgctgtgggacacaaagcacctggaggagccgctgtccctgcagagctggacaccagcagcggtgtcctgctgcccttctttgaccctgacaccacatcgtctacctctgtggcaagggtgacagctcaatccggtactttgagatcactttccgaggcccctttcctgcactatctctcc

SEQ ID NO: 188611 - DNA, 409 bp, Homo Sapiens
tgaaccaccctgcccagccagaaactagattttctttatgcctccaccccttcttattcatttactttacaataccaaaataacaaattgcataggagtgtgggatgtggtttctgccttctagagagagatcaaaattaaactagtactatgaaatgtccttttgaatgttaggtcaagaaatccatgtacagagtcgtgcacttcattggctgtaactgtcaaacttgccttgtattaaaagttaaatcccatcgtaaaatacatcacgaggccagctgtgtgatttctgagacctagatgagagtccatttacttcagccctttgattcagtaaatgttaagcagcaaagactttccaatggtgaaatttcattgttacaggatttaactcataaaccatgagaga

SEQ ID NO: 188612 - DNA, 1364 bp, Homo Sapiens
  misc_feature (525)..(533): n is a, c, g, or t
ttggctttgtcagtcttcgcatccaagatttcttccctccctcttgtgggccagcctgtcctgttccagagctagcctgttcctgggtagccttccttagcctccattcagcctcaggtcttttgccttcttccgtgtttatttagagagcagaatctaataacgggttccactgtagccactatccatggacttctgggtcctcttcaggtttgagtgcttgaaaatgttcattctctgggcttgtggcctgtctcctccactctcctcctcaccctctcgctccttcctgtgtgagggccgctctgcagtaatgttctcaggcaagccttcctaggcacctcagaaactactttgccagagccagtaagaatatataatattggagcagttgccaggatagaaattaaatatagattccagtttaggatagagtttttaccgagagctctttagacagtatacctgtgtcttctctggcaattgctttcattttagtcctatataaaagctttccttttctgnnnnnnnnnaaaactatgcttttgcttgcctaaatcttttgatcttatatttctctcatctcagagcctgtcctgagttgtaaggtatttcatactgccttacttaaaagttttttaaactactagagtcatttgatacacacagaagttacctaataatccaaagatgtccatcaagggaggaagggtgggtcatcagactttgcctttgatgttgtagactaggctcctgagttaagctgcagagggacagcagtgccatgtgccttcactgtgtcccaggaaatctgggttggttccagtgggaaataccagtatttcttggttctggaaagtagcaaaagagtaggagatggggaaatagggatggggagagcaagccccgcatgtccatggcgagtcaggtggggagcacgggtggaagggccggctgttgacagacagactaagctgtgtggtgctcttgccgccccttcctgggtacagagcttgagaaaaatgcagccgaccactccctgtgtttgtacagagcaaagcccaaaagccaacctcagatctcctgatttggcagctgaagaaatcagcagagtcctgattgcctgattcagtcccaaaaatgaatgtcaggccccgccccctccccaccaacattgcctctcctacattctccttctgcccctaaatcagacaggaggccagagaggagtattgctcaatgcgtgctatgtgcaactccctcaagccttgtgccacctccatgctgagccctgaaagcaaggtgtcctgggtgcctgtgtgtcaacttccttctctctacctacctctgaccttcttgtgggt

SEQ ID NO: 188613 - DNA, 940 bp, Homo Sapiens
cttttttataatagccaactttgtacaaaaaagttggtccatcctacgtcgagctctgactcccgtgctgtcgagagggagtccccggggacacctcggcacgcagcggagatgcctctttttgccaccaatcccttcgatcaggatgttgagaaagcaaccagcgagatgaatactgctgaggactggggcctcattttggatatctgtgataaagttggtcagtctcgcactggacctaaggattgtcttcggtctattatgagaagagtgaaccacaaagatcctcacgttgctatgcaggctttgactcttctaggagcatgtgtatcaaactgtggcaaaatttttcatttagaagtatgttcaagagattttgctagtgaagtaagcaacgtattaaataagggtcatcctaaagtatgtgaaaaattaaaggctcttatggttgaatggacagatgaatttaagaatgatccacagcttagtctaatatcagcaatgattaagaaccttaaggaacaaggagttacgttcccagctattggctctcaggctgcagaacaagcaaaagcaagcccagctcttgtagccaaggatcctggtactgtggctaacaaaaaagaagaagaagatttagcaaaagccattgagttgtctctcaaggaacaaaggcagcagtcaaccaccctttccactttgtatccaagcacatccagtctcttaactaaccaccaacatgaaggccgaaaagttcgtgctatatatgactttgaagctgctgaagacaatgaacttacttttaaagctggagaaattattacagttcttgatgacagtgatcctaactggtggaaaggtgaaacccatcaaggcatagggttatttccttctaattttgtgactgcagatctcactgctgaaccagaaatgattaaaa

SEQ ID NO: 188614 - DNA, 2447 bp, Homo Sapiens
ttgtacaaaaaagttggcagaagactccctcaaacaggataaacattgctgtatgttacagtaaagctatctggagagaacacataaatgattttggcatactattaaagaaaccatttgtaaaactcaaatgaccacataaagcttatcaaggagtctagattggttttgttttataccatatgggatgaagaaaatagaaatgtcagtagaactcattgagggtgctcttgccaactgctgaaaatagaagttggctactctcagaatttggtttaaagctggacagatttgctttgttatagggtaaagctttgtctaaagtcctcattttcttttaaaattgaataaaatttctgtatacagattcattgtatgtacctttattgcttcttaagggtccttgctgtatagacagtcctgcttcagaagttgctgctttgtttgtctaattgactcatttgtaaatgagcagaactgttttgttggtttttttccctaaatataaaagtccacacttcgtttgtgctataacctcaaactttgatttctaatgtcacacttaaaactgtgtggaataagacttttgccataaaaataaactatggagtcctttatctaccagagcctttttggtttgaccgccacaatttatgttagtcagtttaaaaatagttcatgttgtttggatggtatcgaaaaccagaaaccacttttaataatgtgtttaagatacttgatttgaagtccttttcatatggactaattgtagtatcaatttcctcctgtcccgattatgtgaaattttggcctttaaacaaagaggggcccattcataagaaagtgttatatctaggtttttaaaactgaagttgaaattatctttgttagcagtagtagtatagaataaaagatccgtatgctggttcgtagattgatacgtgctagtcctgttatttggaggctttttggcatagttgttcgatcaggagcctgtttactaaaagtcttcatacagagtacaagtgcagccgccagaggagaaaattgagattcttgaccctttcatactcttttctttggtattcaggacactaaggcaggaggaccacatgagttctggttggtaagtgtccttgtcatgaaaacacttgccttacaaggctctaattatgatttccctagtcagtgctctgaagatgtgtcacattatattataaacaatacggaaggggagataggtgagatgatatgaaaaacaaattttctcactgtcataaaaggctctaattatggttactttccttgtgatgaaaaacttggccttacagggctctagttatggttactttccctagtcaatgctctgaaaatgtgtcacattataaacaatacagaaggagagatagatgagagatcatgaaaacccaattttatcttttacatggcccctttgtcttcgtttgaaacatccccaacatttcctacaaatcagcgtagttacaaaggggtcagtcttttaaaataagtatttcctattaaactatatatatatacagtgcctttttggtgttgtgagtcagtggaacactgaaatacagcggttgtgtaatttaagagtggcaacagtttcatttgataagatttgaaaaggctttttatcactacaatcttagaggattgacagtacaggatttttgtttaagagaaggattgtttagactcaagaggtgactatgttgtgggtcttttgataattcatgaatacagatttgctttgaccgatcactagatactgcctcctcaatttcaaaagcaatataacgtttgtatatgctgtttaatttaagttaatgttaagtaatcatttctcattccaaagacaatgcaaaaaacttcagcactgcttgagagttgtatttcagccacagatattttctccattggaaagctattttcattttagaaaaatgggttgtttgaagatgaaagtcttttatcttttttcacaatttattttggttatatgttcgtacattcttattaaatatttcatacactttattgcaactactttgttatttctacatcttagataaatgctgaaaaggaaaacgatttcattgttcatctaattaaataaattaaaagagcggtttgtgtagaaattggagagaactatgttttatatgaatcacaacagtgctcgttgtggactgtaattaaatgctttgccctctggaacttgatttttgtgtatctgagatttattaacagtgctaactgctaagatactgtttatcttgttctgggcattggagtttcagtttttaaaaaattcttgaaaatgtattctgtgaaactactcatacctctcttcctgcgaattttctcctaagaactaggtttggggtagaatgattgacattatttttctcatttgcttt

SEQ ID NO: 188615 - DNA, 1011 bp, Homo Sapiens
  misc_feature (57)..(80): n is a, c, g, or t
ttggcactatcatgccaagttggtgaatataagaaaagagatgctgatgcttcatgnnnnnnnnnnnnnnnnnnnnnnnngagcacttaaactgcagcagaagaggcaaaaagaagagttggaaagggagcagcaacgagagaaggagtttgaaagagaaaagcagttaactgccagaccagccaaaaggatgtgaaaagttgtgtttgtgtgttttcttctcctgtcccatatttgggttatgatgactcaagtgtagactgaagttgaggtagtgccttatgccattatgtcatatgttgaaatccttattccggtattactgtgtctccatgccttttttccaagtagcagacgtcatgttgcatggtttttgatatttatatgtaagtttttcaaattttgcttaattttaaaatttattattttgatcttgaattatttataaactggaaagtggtttgattattgtgagtcaaaactctaagtggttaaaaattagtatgaattttttagcttcttaatgaatatggatttaaaactctccagttcttattttatgaaatgacttgcctttctggtaatacaatgctgattttttagtaattgccttttcattactttgttaagaagaaatgccagctgtttaatcacacctacccctggaaaagaggtaaaccttttgaacagttgaatttcatcagaagctctatagctttttggtgagaggaagtgatactctttattacaagaaacaaggaattaacaaaaataaggaacttgttgctacctttcttttctgttgaacattaaaaataatttggtttgtggactgggcatggtggcttatggaaaagaggtgagcctttgtgaagaacataatggaaaagtgcatgtacgggaaataacagcactttaatgtagttcacgtgagcaagatgccagatagtttctactaaccatatactctttctgcttcttagcgtcgttgtcactgcttctgtggctttt

SEQ ID NO: 188616 - DNA, 1340 bp, Homo Sapiens
  misc_feature (430)..(446): n is a, c, g, or t
  misc_feature (643)..(756): n is a, c, g, or t
  misc_feature (759)..(802): n is a, c, g, or t
  misc_feature (898)..(925): n is a, c, g, or t
  misc_feature (1011)..(1020): n is a, c, g, or t
ttggccatgtagtcattccttccgagttccctggttttaatccaaaagactctgtttaacagcaatgtcttggcagaccaggtgccgcttccgtgccatttgagggctctgagtctttgcttcgtcttaggaagataaagataatttggcagaaagtcagagatggaaatagcagtttgggatgataaaagatgggtcctgttttgctgacattcttttactttggttcttggtgcgtgtcctttgggattcatttcttgctagcatgaataggacatgcttttcgttaggtgcttttcttttttggagaacatgaagtgtttctaacaaaactgaatgagctagaaagaattctattttgagacatctgtagttgatgcaaagtatttctgtaatcctcaatgacagtacttacatatttgcatagaannnnnnnnnnnnnnnnngaggaaacctctctggagtctgtatttataggagcatcctgaaagtccctattatgtagctggtgggagcgagagagggacagccacactcgtgctgtgagcagagcacaacttcaggcagagtgaatgccttctgagttctcattggaagctttctgttgctcagcctctggcagatttcagaaccttctacttannnnnnnnnnnnnnnnnnnnnnnnnnnnnnnnnnnnnnnnnnnnnnnnnnnnnnnnnnnnnnnnnnnnnnnnnnnnnnnnnnnnnnnnnnnnnnnnnnnnnnnnnnnnnnnnnnctnnnnnnnnnnnnnnnnnnnnnnnnnnnnnnnnnnnnnnnnnnnnccttgtccttgactattgtgctgtctgctgcccctttgtagggatggggttggggtcagaatagcatgtgcatgaatggcggaaagctttggtggnnnnnnnnnnnnnnnnnnnnnnnnnnnngagaggtgggggagtcagcagtgaacctttctggttaaagaacaacgtacataatttctattatgagatttagaaggttaaatacnnnnnnnnnncaggcctaccaagttgatagaccaaaagtatatagtagaacagcacagtagaaaaaatttaaaagtgaatttcttatggtccaaaaggatggatagtcacagtccataacctttcataatatatgctggaattggaatctcttgtcatcttgctttgctctgaattttagaactagaagtgtgcatgtatgtcaaaaagattatgcaaagctattttctttgctaaacaatgtaaacatttgccccccatgaaatgggactttataatctggaagtgagcccaaggtagcgtatactgaattcacgtttataaaagttaa

SEQ ID NO: 188617 - DNA, 1067 bp, Homo Sapiens
ttgggtaggttcccagccccttcccagtggcagcttgtgtgtccaggagataggacatcatttaacgcatcagcaaagtagcagcagatgccacatacagagtagagcgaaggcatttggtggatcggtcactagagatctatcttgcagaaagtatgtttttcctcataaaagtgcctcttaattggccattgtaccagccacttgtcctagccaaatgtccaaaacacgcccttgggccccgccacgttacaatccacagattgtctgtctgagtcgtttaaggcatttcctggtgcttgtgttccatgaataaaaggacaaagtcagaagatcactgatgtcttactgtcaacagagatattttaaaagagagaagcaggaaaagatcttccttttttgatctacaacttatatagttttctgattatgcacataatagatatgccttccagatgcataaggcaaacatctggaaagaaatatacccaaatcttagcaggggttatctttgggagtggagtacatgggattttgctttcttcatttttataattttatattactgtcttggaagatgtgtttatgtgtgtgtgttacttttacaatcaggaaaacatatttaataacatatagtcaagaaaacagacttaaaaataaatactatgtgtccattgagaaaattcacaatataaacagaaatacaaataaatacatacacaattttaaagtcacctgtagccctacccttagaggtacccagggttaacattttggtggtattgtcttatcaatttttccgttgatacattcagcaaatttggagcacattgaccatggagttttgtgtccaaatccaatctgaatttacctggaagaggccttgacacctgcatggaaatgagctaagaaaaccactggagccttgggagctctttggcctcctggctggcccagtaatatctgagctcctttggttaatttataactgatataaaactacatcttctttataatataaattgtacctgtgagtctagaagctttaaatgtgtttaaattaaaat

SEQ ID NO: 188618 - DNA, 511 bp, Homo Sapiens
ttgggcaaataacaaaaacttggatggtgtaaagtaacagatgtttactcttttccagtattggagaccaggaatctgagatcaaggtgtgggcaggggtgcgctccccctggaggttctaggagaggatccttcctgcctcttccagctcctggtggctccaggtgtccctgggcttgtggccacatcactacattctctgcctccatctccacgtgaccttttcctctgtgtctgtgtctcctcttctgtctcttagaaggacactggtcattggatttaaaggccacctgggtaatttatagtgatctaatctcaagaatctttccttaattacatgcaaatactctttatccaaattagtttgcattcacaaattctggagcttagtacttggacatatattttggggggttgatggttggaggggcttttattcaactcagtacatcttaataaggaattaatgccccccaacttgccttacaagtcatatattaaaaacaatgtt

SEQ ID NO: 188619 - DNA, 1323 bp, Homo Sapiens
ttggatttctagtgccaaaatggaaatatagtgataaaggaaaggaagaaatgcaatttgctgttggctggagtggttccttaaatgtcgaagaaggggaatgtgtaaccagtgctctatgtatcccactagcaagccaaaagaggagttccactgggcgtcctgactggacctgcattgtggtgggttttacttcaggttatgtacgcttctacactgagaatggtgtgctcttgcttgcacagcttttgaatgaggacccagtacttcaacttaaatgcagaacctatgaaataccacgacatcccggcgtgactgagcagaatgaagagttgagtatcttatatccagctgccattgtgactattgatggatttagcctttttcaatctcttcgtgcttgtcgaaatcaggtagcaaaagctgcagcatcaggcaatgagaacatacaaccaccaccattagcttataagaaatggggtctacaagatattgacactattattgatcatgctagtgttggtattatgactctgtccccctttgatcaaatgaagactgcctccaatataggtggatttaatgcagcaattaaaaatagtccacctgccatgtctcagtatatcactgtagggtccaatccatttactggcttcttctatgctttagagggaagcacacaaccattattatcccatgttgcactagcagttgcaagtaaactcacttctgctttatttaatgctgccagtggttggcttggttggaaaagtaagcacgaagaagaagctgtccaaaagcaaaagccgaaggttgagccagctaccccattagctgtaagatttggacttccagattctagacgccatggtgaaagcatatgtctgtctccatgtaacacactggcagcagtaacagatgatttcggcagagttattttattggatgtagctagaggaattgcaatacgcatgtggaaagggtaccgcgacgcacaaattggatggattcaaactgtagaggacctccatgaaagagtgccagaaaaggcagatttttccccctttggaaattctcagggtccaagtcgagtagctcaattccttgtgatctatgcgccaagaagggaattttagaagtgtggagcacacagcagggacctagagtaggagctttcaatgtggggaagcactgcaagctgctgtatcctggctataaaataatgggtttaaataatgttaccagtcagagttggcagccacagacttatcagatctgtctggttgatccagtgtctggaagtgtgaaaacagtgaacgttcc

SEQ ID NO: 188620 - DNA, 1402 bp, Homo Sapiens
  misc_feature (122)..(141): n is a, c, g, or t
ttggatataacttccctggcaaggaaggtggttgaagaatgtaaactcattcatccttcaaaactaaatgaggtagaacagctgttgtactatctacagaaccgccgtgattcattgtcagnnnnnnnnnnnnnnnnnnnntcaagcaagcctaaagatccacctccttttgaaggaatggagattgatgaagttgctaacattaatgacatggatgaatatattgagttattatatgaagatattcctgacaaagttcggggttctgctttgatcctgcagcttgctcgaaatcctgataacttggaagaactactattgaatgaaactgcccttggtgcattagcaagggtcctgagagaagactggaagcaaagtgtcgagttagctacaaacataatttacatctttttttgtttctccagcttttctcaatttcatggacttattactcactataaaattggagctctgtgtatgaatattattgatcatgagttaaaaagacatgagctttggcaagaagaactctcaaagaagaagaaagctgttgatgaagaccctgaaaaccaaaccttgagaaaggattatgaaaaaacctttaaaaagtaccaggggcttgtggtaaaacaggaacagctattacgagttgctctttatttgcttctgaatcttgctgaggatactcgtaccgaactgaaaatgaggaacaagaacatagttcacatgttggtgaaagcccttgatcgggacaattttgagctgctaattttagttgtgtcattcttgaagaaactcagcatttttatggagaataaaaatgatatggtggaaatggatattgttgaaaaactggtgaaaatgataccttgtgagcatgaagacctgctgaatatcaccctccgacttttactaaacctatcctttgacacaggactgaggaataagatggtacaagttggactgcttcccaagctcactgcactcctaggcaatgacaactacaaacaaatagcaatgtgtgttctttaccacataagcatggatgaccgctttaaatcaatgtttgcatacactgactgtataccacagttaatgaagatgctgtttgaatgttcagatgaacgaattgacttggaactcatttctttctgcattaatcttgctgctaacaaaagaaatgtacagcttatctgtgaaggaaatgggctgaagatgctcatgaagagggctctgaagtttaaggatccattgctgatgaaaatgattagaaacatttctcagcatgatggaccaactaaaaatctgtttattgattatgttggggaccttgcagcccagatctctaatgatgaagaagaggagtttgtgattgaatgtttgggaactcttgcaaacttga

SEQ ID NO: 188621 - DNA, 2096 bp, Homo Sapiens
ggtcatccctaataaagtgtctgctaattcaaggcttatacattatatttatagaatataaatttgtcagtggaataaaatttcccctttttttcataaaaatctggtcagggtcatttatatattagaacagttagacacattggtgtctcttttttcctttcctttcgacattggagaattggagtgcagtcataatcttacaagatgttcatttgaatttctcacatttatggtccataaaaacttcaaggcgtatccatacttttgatgtttcaatatgcattgaactggatgttatttctgccatatttcaaaatggtagaataaattacagaatttattactactcatttcagtgtttagtacagaaattgccttaaaaattgctattaattgaaatatcatttagttcacattccttaagttgaatcggtagtttcatttcaactgataatagtaaagctatttcagtttagtaaaaattttcttttttccacaagaggaaatgtaaaacagttaagacttgaaattgaaaattcttttaatatttaaaataacttgtttattcaatgtctaaacacatgtcagttttccactggatttttattttcacaggtaaatacactagagtgctagatgcctttttcccctgtcagtttgactttcatttaaatccttcattctgatatcattactgttaggtgaggtggataactataatgagaatctcttattcttcctattcctttgatgaccaaagagataaagtgaagtcatccttattattaaaatgcagcctccaaacaaatttctcaagattccttttccttccttctatccattttctgcccataatttccaagaaaaggtgggtatggaaacacatgagagaatgtgatagtgaagtcatatttacaaaactgagaacatgtccaaaatggattcttgtctcctcttcagaattagccatttaaaatattttctgtgacttcaaattgtaattcttatttgcagttttaccagtcttcatgtacagtgacgaaactgtgtagaaactaaatcatcgctttagtaagaaaggataaaaaggtgtggaaatgaatataaaatgcatctaaacatgacatttaatttgtttataaaaataagacttactaaatatagagtaattcattttgaataggaggctattgtttttatattgtgtaataactcacgtactctgaagagagcttggtcaaacaataaaatacattgttactaacttggtttcttttctgtgtactttgcaaaaattctatttttaattttgttcatatgttgaatgtgcccctaattggcatcttaaagagaatagtaagcatctattaaccaaaaaagaactctaatagtaaaggaaagggaaatattggtggtatgtacccacaaaacccccaagtgccaagttaatggaatctctgctttccctttcagatgctagaaagccactgtaatgagttcttgcagtttagcatccagtctaagctactgcattgtttaaagagcagcatcaaggacactttctccaaactggaactctcttctttgtcaaatcttgtactttaaaattctacaattctgttacattgttgtttaaatcacagactgctcagatccattttactgcagtagtttccaagtgtgtaacttggctttagtatttatcagttgccagaaagaaacaggttgtcatttggaagtttttgtggttattttttcccatttttattcttcagataaaagcagtaccccaaaatagaaaatgaaaattttcatgaaacaaagagaactcccttgttaaaaccagcttattaactctgtattctgtcaaatgcatttttttctaacaactgaccatggatgttgtgaaggtgcattttaatttaaacatggaaaagatttttttcataattacatactagaatgtaaaattataattttgccatgacttaaagagcacagttgatatcccaaaggttttgatgctaagaagctacagttattctaaatgcactaaaatgtttgaggcaaatctaccttagaggcttttttgg

SEQ ID NO: 188622 - DNA, 2044 bp, Homo Sapiens
  misc_feature (1816)..(1824): n is a, c, g, or t
ttggccgtcttccggaaagtctggattcccggacgagccgagttgcgctcaccgaactcccgttcgagagatgatcgaagaaagtcggctaccatttgtacccatcaaagatctccagatggaagccagcgctgaatttgggctgagattaggacttgcaggaggccggtccagaagacggcggaaggaatcttggcgggcgcacgcatgcgtgatagaccctccacacgtgtggccgggccgcggcctccccgtgctcggaggtcccgcccccggccgtagcatctttccggacgtggggagccggttgtaaagaagaaagttctaccctttctgtcaaaatgaagtgtgattttaattgtaaccatgttcattccggacttaaactggtaaaacctgatgacattggaagactagtttcctacacccctgcatatttggaaggttcctgtaaagactgcattaaagactatgaaaggctgtcatgtattgggtcaccgattgtgagccctaggattgtacaacttgaaactgaaagcaagcgcttgcataacaaggaaaatcaacatgtgcaacagacacttaatagtacaaatgaaatagaagcactagagaccagtagactttatgaagacagtggctattcctcattttctctacaaagtggcctcagtgaacatgaagaaggtagcctcctggaggagaatttcggtgacagtctacaatcctgcctgctacaaatacaaagcccagaccaatatcccaacaaaaacttgctgccagttcttcattttgaaaaagtggtttgttcaacattaaaaaagaatgcaaaacgaaatcctaaagtagatcgggagatgctgaaggaaattatagccagaggaaattttagactgcagaatataattggcagaaaaatgggcctagaatgtgtagatattctcagcgaactctttcgaaggggactcagacatgtcttagcaactattttagcacaactcagtgacatggacttaatcaatgtgtctaaagtgagcacaacttggaagaagatcctagaagatgataagggggcattccagttgtacagtaaagcaatacaaagagttaccgaaaacaacaataaattttcacctcatgcttcaaccagagaatatgttatgttcagaaccccactggcttctgttcagaaatcagcagcccagacttctctcaaaaaagatgctcaaaccaagttatccaatcaaggtgatcagaaaggttctacttatagtcgacacaatgaattctctgaggttgccaagacattgaaaaagaacgaaagcctcaaagcctgtattcgctgtaattcacctgcaaaatatgattgctatttacaacgggcaacctgcaaacgagaaggctgtggatttgattattgtacgaagtgtctctgtaattatcatactactaaagactgttcagatggcaagctcctcaaagccagttgtaaaataggtcccctgcctggtacaaagaaaagcaaaaagaatttacgaagattgtgatctcttattaaatcaattgttactgatcatgaatgttagttagaaaatgttaggttttaacttaaaaaaaattgtattgtgattttcaattttatgttgaaatcggtgtagtatcctgaggtttttttccccccagaagataaagaggatagacaacctcttaaaatatttttacaatttaatgagaaaaagtttaaaattctcaatacaaatcaaacaatttaaatattttaagaaaaaaggaaaagtagatagtgatactgagggtnnnnnnnnnttgattcaattttatggtaaaggaaacccatgcaattttacctagacagtcttaaatatgtctggttttccatctgttagcatttcagacattttatgttcctcttactcaattgataccaacagaaatatcaacttctggagtctattaaatgtgttgtcaccttttctaaagctttttttcattgtgtgtatttcccagaaagtatccttttgtaaaa

SEQ ID NO: 188623 - DNA, 1994 bp, Homo Sapiens
ttgggacagtccggcgtccgggaacgctcaggagccggaggagccggaaagcgccgggacccctcgcggggcctctgagcggcgcgggcggacccgagcccccagcccgctggcgccgctgcccgccaggccccgggggcggcggccaagatgtccgtgcctaacgtgctggccaaagcgctctatgacaatgtggccgagtccccggatgagctctccttccgcaagggtgacatcatgacggtgctggagcaggacacgcagggcctggacggctggtggctctgctcgctgcatgggcgccagggcatcgtgcctgggaaccgcctcaagatcttggtgggcatgtatgataagaagccagcagggcctggctccggccctcccgccaccccggcccagcctcagcctggcctccatgccccagcgcctccggcctcccagtacacgcccatgctccccaacacctaccagccccagccagacagcgtctacctggtgcccactcccagcaaggctcagcaaggcctctaccaagtcccgggtcccagccctcagttccagtctcccccagccaagcagacatccaccttctcgaagcagacaccccatcacccgtttcccagcccggccacagacctgtaccaggtgcccccagggcctggaggccctgcccaggatatttaccaggtgccaccttctgccgggatggggcatgacatctaccaggtccccccgtccatggacacacgcagctgggagggcacgaagcccccggcaaaggtggtggtgcccacccgcgtggggcagggctatgtatacgaggccgcccagccggagcaggacgagtacgacatcccgcgacacctgctggccccggggccacaggacatctatgatgtgcccccggttcgggggctgcttcccagccagtatggccaggaggtgtatgacacaccccccatggctgtcaagggtcccaatggccgagacccgttgctggaggtgtatgacgtgccccccagtgtggagaagggcctgccaccgtccaaccaccacgcagtctacgacgttcctccatcggtgagcaaggatgtgcccgatggcccactgctgcgtgaggagacctacgatgtgccccccgccttcgccaaggccaagccctttgacccggcccgcaccccactggtactggctgcgccccctccagactccccgccggccgaggacgtgtatgacgtgccgcccccggctcctgacctctacgacgtgccccctggcttgcggcggcctggcccgggcaccctgtacgatgtgccccgtgaacgggtgcttcctcctgaggtggctgatggtggcgtggtcgacagtggtgtgtatgcggtgcctcccccagctgaacgtgaagccccggcagagggcaagcgcctgtcggcctccagcaccggcagcacacgcagcagccagtctgcgtcctccttggaggtggcagggccgggccgggaacccctggagctggaagttgctgtggaggccctggcacggctgcagcagggtgtgagcgccaccgttgcccaccttctggacctggcaggcagcgccggtgcgactgggagctggcgtagcccctctgagccacaggagccgctggtgcaggacctgcaggctgctgtggccgccgtccagagtgccgtccacgagctgttggagtttgcccgcagcgcggtgggcaatgctgcccacacatctgaccgtgccctgcatgccaagcttagccggcagctgcagaagatggaggacgtgcaccagacgctggtggcacatggtcaggccctcgacgctggccggggaggctctggagccacccttgaggacctggaccggctggtggcctgctcgcgggctgtgcccgaggacgccaagcagctggcctccttcctgcacggcaatgcctcactgctcttcagacggaccaaggccactgccccggggcc

SEQ ID NO: 188624 - DNA, 1227 bp, Homo Sapiens
actttgtacaaaaaagttggctctgaaggggctcgaggacactcttatcgcgcccctcatggccaagcctcggctgctagttctctgcttcgctctgattgtggttccggcctgggtgtccagcattgtcctcacagggacaagcgagcccccagatgcgcagacagtggcgcctgcggaggacgagactctgcaaaacgaggcggacaaccaggagaacgttttatctcagttgctgggggactatgacaaggtcaaggctatgtctgagggctcggactgtcagtgcaagtgtgtggtgagacccctgggccgggatgcctgccagaggatcaatgcgggggcctccaggaaggaagacttctataccgtggaaaccatcacctcaggctcgtcgtgcaagtgtgcctgtgtagcacccccatcggccctcaatccctgcgagggagacttcaggctccagaagctgcgggaggcagacagccaggacttgaagctctccacaatcatagacatgttggaaggagcgttctatggcctggatctcctgaagctacattcagtcaccaccaaactggtggggcgagtggataaactggaggaggaagtgtctaaaaacctcaccaaggaaaacgaacaaatcaaagaggacatggaagaaattcgaaccgagatgaataagcgaggcaaagaaaattgctctgaaaacatcctagatagcatgccagacatccgctcagccctgcagagggatgcagcagcagcctacgcccacccagagtatgaagagcggtttctgcaggaagaaaccgtgtcccagcagatcaactccatcgaacttctgcagacgcgacccctggctctgcctgaggtggtgaagtcacagcggcccctgcagaggcaggtccacctgagaggccggccggcctcccagcccactgtcatccggggcatcacctactataaagccaaggtctctgaagaagagaatgacattgaagagcagcaagatgagtttttcagcggtgacaatggagtggatttgctgattgaagatcagctcctgagacacaacggcctgatgaccagtgtcacccggaggcctgcagccacccgtcagggacacagcactgctgtgacaagcgacctgaacgctcggaccgcaccctggtcctcagcactgccacagccctcgacctcagatcccagcatcgccaaccatgcctc

SEQ ID NO: 188625 - DNA, 1590 bp, Homo Sapiens
  misc_feature (510)..(555): n is a, c, g, or t
  misc_feature (1182)..(1251): n is a, c, g, or t
ttgggatctgctgaggaagcggcatcagtgttggccacttcaattagtccagagcagtgcatcaaagtgctttgtcctatcattcaaactgcagactacccaattaatctggctgcaatcaaaatgcaaacaaaagtgatagagagagtgtccaaggaaaccctaaacctgcttttgccagagattatgccaggtctaatacagggttatgataattcagagagcagtgttcggaaagcttgtgtcttctgcctggtggctgttcatgcggtaattggtgatgaactaaaaccacatctcagtcaacttactggcagtaaaatgaagctactgaatctttacatcaaacgtgcacaaacaggttctggaggagctgatcccactactgatgtttctggacaaagttagtgaagctcatcacagcgaaccaggtctctcaaaagaaaggacagatagaccaccctcatcaatgaaaggaagttctcaaacacatcctttggaacttactannnnnnnnnnnnnnnnnnnnnnnnnnnnnnnnnnnnnnnnnnnnnntgtaacagaggactatcctcagtctgcatgtaacttttatgatagttattccaaattcaagaagaagcagtattaacatcaattgatcgacacaaagtaatttttaatttaattcatcatttcacatgtttgtactttgtcttcccattaacctttgccagtgttatgattgtataaattttttttaaatgctggttaaacaggaatgcttaaagctttaaaagtttaacagtctaaaacatttttgcttttattcaactgcagaataatatttttattgctactttgagttttgtttcgtatcatgtcctatgctagaaatatttaaatgatgtgaaacaaagcaggactaatttgaactacagctggactccgtttgtgtgatggtgatacatgtcattagttgcaacttctttggggtgatctatagtttgaaaactaaaacctcaaagacagatgttacagaatcagccagttctgtaaaactgatattgtctattggttattgatcttgccatctttatttaaaaccatgtcccttctatgatcccttaagaaagctgcaccaaatcatctgcctgttttttcttgatacttactgaaatagaaggttttattgcagggttnnnnnnnnnnnnnnnnnnnnnnnnnnnnnnnnnnnnnnnnnnnnnnnnnnnnnnnnnnnnnnnnnnnnnngaataaacttgataatggaaacggacaaaaaaaatcaagtgcgtgtgtgtccttgaccgtcttctgtttctcacgtaataaacaaattatcgagacatgggagtgaccagcaccttttctttaaatggtggaacctggtttccttttaccatgaaattgtcttacttgaaaatattgatcctgatgagagagaagatggtgccaacgctgtctttgtataatgggctcaaattctctacctcttcacggctaatacttttaactgagctgctgcctatagtgtcttttggaaaactacttaaagggtgattttctgttactttttagcaatttttttaa

SEQ ID NO: 188626 - DNA, 1859 bp, Homo Sapiens
  misc_feature (1591)..(1636): n is a, c, g, or t
ttgggaaactctggccaaacagatggatccaggagattttataaattccagtgaaactcgcctagcagtgtctcgggtcatcacttggacaacagaacccaaaagttctgatgttcggaaggcagcacagtcagtgctgatttcattatttgaactcaataccccagagtttacaatgttattaggagctttaccaaaaacttttcaggatggtgctaccaagcttcttcataatcaccttcgaaacactggcaatggaacccagagttccatggggagtcctttgacaagaccaacaccacgatcaccagctaactggtccagtcctcttacttctcctaccaatacatcacagaatactttatctccaagtgcatttgattatgacacagaaaatatgaactctgaagatatttatagctctcttagaggtgtcactgaagcaatccagaatttcagcttccgtagccaagaagatatgaatgagccattgaaaagggattctaaaaaagatgatggcgattcaatgtgtggtggtcctgggatgtctgacccaagagcaggaggtgatgctactgactcaagtcaaacagctcttgataataaagcttcattgctccattcaatgcctactcactcctctccacgctctcgagactataatccatataactattcagatagcatcagtcccttcaacaagtctgccctcaaggaagccatgtttgatgatgatgctgaccagtttcctgacgatctttccctagatcattctgacctagttgcagagttgttgaaggagctgtctaaccataatgagcgtgtagaagaaagaaaaattgccctctatgaacttatgaaactgacacaggaagaatcttttagtgtttgggatgaacacttcaaaacaatattgcttttattgcttgaaacgcttggagataaagagcctacaatcagggctttggcattaaaggttttaagagaaatcctaaggcatcaaccagcaagatttaaaaactatgcagaattgactgtcatgaaaacattggaagcacataaagatcctcataaggaggtggtgagatctgctgaggaagcggcatcagtgttggccacttcaattagtccagagcagtgcatcaaagtgctttgtcctatcattcaaactgcagactacccaattaatctggctgcaatcaaaatgcaaacaaaagtgatagagagagtgtccaaggaaaccctaaacctgcttttgccagagattatgccaggtctaatacagggttatgataattcagagagcagtgttcggaaagcttgtgtcttctgcctggtggctgttcatgcggtaattggtgatgaactaaaaccacatctcagtcaacttactggcagtaaaatgaagctactgaatctttacatcaaacgtgcacaaacaggttctggaggagctgatcccactactgatgtttctggacaaagttagtgaagctcatcacagcgaaccaggtctctcaaaagaaaggacagatagaccaccctcatcaatgaaaggaagttctcaaacacatcctttggaacttactannnnnnnnnnnnnnnnnnnnnnnnnnnnnnnnnnnnnnnnnnnnnntgtaacagaggactatcctcagtctgcatgtaacttttatgatagttattccaaattcaagaagaagcagtattaacatcaattgatcgacacaaagtaatttttaatttaattcatcatttcacatgtttgtactttgtcttcccattaacctttgccagtgttatgattgtattaatttttttaaatgctggttaaacaggaatgcttaaagcctttaaaa

SEQ ID NO: 188627 - DNA, 1261 bp, Homo Sapiens
tggctgcccacagccctagcaaccactcggtacggcgctaacgccgcgaggtagctcggttcgtctcgcagtaccagtgcgaacctttgggctctccaggtccgagatcctagtctcctgtcggctctgaggaggatggatccttctgcggatacatgggacctctcctcacctttaatatcattatggataaacaggttttacatttatctgggctttgctgttagcattagcctttggatttgtgtccagattgtcatcgagatgcagggatttgcaacagttcttgctgaagcagttacgtccctggttttgcctgtggccattattaatctaaaagaatatgatccagatgatcatctgatagaagaggtgactagtaaaaatgtctgtgtcttcctggttgcgacatacactgacggcctaccaactgaaagtgcagagtggttctgcaaatggttagaggaagcatccattgattttcgatttggcaaaacttacctgaagggtatgagatatgcggtatttggcctgggaaattctgcctatgctagccacttcaacaaggttggcaaaaatgttgacaagtggctctggatgcttggcgcgcatcgtgtgatgagtcgaggggagggcgactgcgacgtggttaaaagcaagcacggcagcattgaggccgacttcagagcatggaagaccaagttcatctcccagctgcaggcacttcagaaaggggagagaaagaagtcctgtggcggccactgcaagaaaggcaaatgtgaatctcaccaacatggctcagaggagagggaggaaggatctcatgagcaggatgaattgcatcatagagacaccgaggaggaagaaccctttgagagctccagtgaagaagagtttggtggtgaggaccatcagagcctaaattccattgttgatgttgaagatttgggcaaaattatggatcatgtgaagaaagaaaagagagaaaaggaacagcaggaagagaagtctggtttgttcaggaacatggggaggaatgaagatggtgaaagaagagctatgataactctctgctctccgagaagctcttactaaacaaggttatcagttgattgggagccactcgggggtgaagctttgcaggtggacaaagtccatgctccgagggagaggaggttgttacaaacacacattctatggaattgagagccatcgctgcatggaaaccaccccgagcttggcgtgtgctaataaatgtgtc

SEQ ID NO: 188628 - DNA, 1294 bp, Homo Sapiens
ttggcccgcctctaccgccgcgggagctgcatcgtccactccggtcggcggtggaaccgccagtccggggtcacagagtttgagaagcgacgcgctgagccccccatcacctccagcccgggcgacccctcccgggtccgccctcgccctgcgcagccgcccgagcccccagccccgggcggccccgctccagcatcccagctcctgcactctcgcagccgccgccgccccccgcccggaacatggactctgactcttgcgccgccgccttccacccggaggaatactcccccagttgcaagaggcgcaggaccgtggaagacttcaacaaattctgcacctttgtcttggcctatgctggctacatcccttatccgaaggaggaactccctttaaggagcagccccagccctgctaacagcactgctggtaccattgacagcgacggctgggacgcgggtttctcagacatcgcgtcctcagtgcccttgccagtctctgaccgctgctttagccacctgcagcctactctcttgcagcgagccaagcccagtaacttcctgctggacagaaagaaaacggacaagctgaagaagaagaagaagaggaagcgcagggacagtgatgcgcctgggaaagaggggtacagggggggcttgctgaagctggaagccgctgacccctacgtggagacccccacgagtcccaccttgcaggatatcccccaggctcccagcgacccctgctcgggctgggactccgatactccctcgagtggatcttgtgccactgtgtcacctgatcaggtcaaagaaataaaaactgaaggcaaacggactatcgtccggcagggaaagcaggtggtgttccgagatgaggacagcactggcaatgatgaggacatcatggtggactcagatgacgattcctgggacctcgtgacctgcttctgcatgaagccatttgccggccgccccatgatcgagtgtaatgagtgccacacctggattcacctgtcctgtgcgaaaatccggaaatccaatgttccagaagtgtttgtctgccaaaagtgccgggactccaagtttgacatccgccgttccaaccgctcgcggacggggctcccggaagctgttcctggactgactgctggctggcgaggaggctgcgagcgtggaatcggaagcgaccgcgggtttttttgcccttctcttagttgagcacagaaccctcagctctggtgcgggcagatccctgccatttaggtgcctaagcaaaaggacaggctgtccca

SEQ ID NO: 188629 - DNA, 932 bp, Homo Sapiens
ttggcaccttccccgtctgctccttgcctttcacgatttttgcatatatgaatgaaacctcttcccgaaaggaaaaatgggacctccaagctcttaggtttttatcaattaattcaataattgacccttgggtctttgccatccttaggcctcctgttctgagactaatgcgttcagtcctctgttgtcggatttcattaagaacacaagatgcaacacaaacttcctgttctacacagtcagatgccagtaaacaggctgacctttgaggtcagtagtttaaaagttcttagttatatagcatctggaagatcattttgaaattgttccctggagaaatgaaaacagtgtgtaaacaaaatgaagctgccctaataaaaaggagtatacaaacatttaagctgtggtcaaggctacagatgtgctgacaaggcacttcatgtaaagtgtcagaaggagctacaaaacctaccctcaatgagcatggtacttggcctttggaggaacaatcggctgcattgaagatccagctgcctattgatttaagctttcctgttgaatgacaaagtatgtggttttgtaatttgtttgaaaccccaaacagtgactgtactttctattttaatcttgctactaccgttatacacatatagtgtacagccagaccagattaaacttcatatgtaatctctaggaagtcaatatgtggaagcaaccaagcctgctgtcttgtgatcacttagcgaaccctttatttgaacaatgaagttgaaaatcataggcaccttttactgtgatgtttgtgtatgtgggagtactctcatcactacagtattactcttacaagagtggactcagtgggttaacatcagttttgtttactcatcctccaggaactgcagtcaagttgtcaaggttatttatttataatg

SEQ ID NO: 188630 - DNA, 1332 bp, Homo Sapiens
ctttgtacaaaaaagttggattgtctcttccccaacactaaccccactcccatgaagaattgcctggaaagatgttttcaaggaatttgaaccataaaacactatctgatgcacagaacacctctactttgagactcacctctcataaagcttctttttcacattactgttaaagaccagacgttctagaaaagacccctcctctcatgagctcccccatccctgctacagaacacagcacccatggcgcctgcagtggactggccccttaattcccacaggcccccccagcaaggccaaagggaggcccctgggtattgtcctcctacaaggaagatcctctttgttcaaaggaccagttttcctaggccaaagaagtctcttccccatgttagtcctatgccttgaaatatcatgcaccatgacccacagccatctggttatgtcttatttttttcctaaaagataatgtttatttttaaaaaggaaggaagaagcaagtgaagtttcattctgctccagcggtggggaagccgctgaatccacctgcttctcctttgcaaccgacagcaaacagctttctccggcctcagggcagaaaaagggaatggcagggagtaagaggcgctgggctcggagcctgtttccaagaaggaattggttgtcatctggcagtgttgcgcgtcacaagagagcctgtatataaattaaaatagtcaagacaacactgaccttgcacttgtacataactatacagtagtgtccagaatgttcagacattcggagtgtacataaaacagaaaaaatcttcatgtatttttattaaatataacaatgtctgagtttcacctaagatgtttttgtgccatatgctggatatccaggttctcgccaggccccgatacatgaataacaaacccaagaaacgcatccccattgtgtgatgtgttcagatgcatctggcaccaattaggtatttcttaaaacaggactcatctgtcagagtgcacatgaaaaatcaggcagggaatcgaaacgacagcgctggaggagactcaggaagcagaggcgtccctgccgctgcccttggccctgcaagcacatcatgaccctttctggcagcctcttggtgctctgggtagtgagggatgaccagtcttgtcctgagaaatgtttctcttagtctttaagttcaaagactaacctgtagcaatcagactttccaaaagggggttctccattttttgtagttttgtctaaatttttaatgaccatttcctgcaatcagtttattatactgaaaactgggggtgggagtagggagctagtttg

SEQ ID NO: 188631 - DNA, 1660 bp, Homo Sapiens
  misc_feature (497)..(535): n is a, c, g, or t
  misc_feature (540)..(810): n is a, c, g, or t
  misc_feature (1303)..(1323): n is a, c, g, or t
ttggagcattttgtaagtcatgctcttcagagagactactcaggtgaagaattagaaggaaaataaggacactagtatttttaaagagtaaagatattttcttttaaatatctttggtaattgaaacatagaggttaagatgtttctaggtagaatgttttcatacaatttcacctccatgtctttatgtttttctgaaaagcaaatgagtatccagacatgactcccacagttctctttgagaagcctgagagggaactctgtcttacctagtgagggggatggaaaagaagtgatggctctgtggaccagagaacgggtgctaattatgacttcacactcggcaagttcaggctgatctgttatttctcagttacagttagcaaactttaaaaacttaacactcaagttggctttgattaaaaggtaaagatgtgttttaagtggataaggaaagtctgaggccttatttggaacatcactaagtcttccacagnnnnnnnnnnnnnnnnnnnnnnnnnnnnnnnnnnnnnnncttannnnnnnnnnnnnnnnnnnnnnnnnnnnnnnnnnnnnnnnnnnnnnnnnnnnnnnnnnnnnnnnnnnnnnnnnnnnnnnnnnnnnnnnnnnnnnnnnnnnnnnnnnnnnnnnnnnnnnnnnnnnnnnnnnnnnnnnnnnnnnnnnnnnnnnnnnnnnnnnnnnnnnnnnnnnnnnnnnnnnnnnnnnnnnnnnnnnnnnnnnnnnnnnnnnnnnnnnnnnnnnnnnnnnnnnnnnnnnnnnnnnnnnnnnnnnnnnnnnnnnnnnnnnnnntgagccaccgtgcccagacaccacataggtctgaatcagtgtcatacattcataaaacaaactcggttaattagaacttggttatgttaagacgaatctgggagaacagaaaacagtttttggggtcccttcagttggctattggtccgtatgcatctagcacattgtaggagatttagaaattgtcttcccacccgatagctgccttgtcacctcattatggtgctccatcccctgtgtgcttaggtttttacctttcatctttctctttgccattgatgtttgtattcaagagttatatttttagggttagaaatcaaaatatttggtgtttagcaaacctctgaagtgctagactgatttagtctagttttaaaccaagtgctttaggcaggtgtgaactccagcccaaatgccagtcaaagtcaaggcatgggttttcctagcctatcttataggaaattcctgtaccttcttggcccccataatgtgnnnnnnnnnnnnnnnnnnnnnaaaactaacttacaattttgtgatccgtgattcattgccctgcgattcttgaaagctctgtctgtttttttgtgagaacctttaaaatctcccttaatttttattttcccagaaataatgtaaaaacacttaaatgaaagtggaaatgtattaattttaaatcctataaaattaatacagaaaatataaatgattgggtcatttaactatatttttttaaataaactggaaagataaagaacacaacacttcacacatttttatatttcctcttatagtactccgggaatcataccacagttcttttttaaaagcacaacaattaaaaacctttaaa

SEQ ID NO: 188632 - DNA, 2291 bp, Homo Sapiens
acaaaaaagttggcgcaagggctccagacagcagccgccgtcggccgagcgcccggctagaagcgacaccagacggagcctccggagttcctccgcccccacctcgccgggtcctggagccgcagtcctcccagctgccctcctcgtggccatggagtgtccacacctgagctccagcgtctgcattgctccggactcagccaagttccccaacggctccccgtcgtcctggtgctgcagcgtgtgccggtccaacaaaagcccttgggtctgtttgacttgttcaagtgtccactgtggaaggtatgtgaatggccatgcaaaaaaacattatgaagatgcacaagtacctttaaccaaccataagaaatcagaaaagcaagataaagttcagcacacagtatgtatggattgcagtagctacagtacatactgttatcgctgtgatgattttgtggttaatgacaccaagctgggactggtacagaaagtcagagaacacttacagaacttggaaaactcagctttcacagctgacaggcataagaaaagaaaacttttggaaaactcaacactaaacagcaagttattaaaagtaaatggaagcaccactgccatttgtgccacaggccttcggaatttggggaacacatgtttcatgaatgccatccttcagtcactcagtaacattgagcagttttgctgttatttcaaagaactgcccgccgtggagttaaggaatgggaaaacagcaggaaggcggacataccacaccaggagccaaggggataacaatgtgtctttggtagaagagtttagaaagacactctgtgctttatggcaaggcagccagactgcatttagcccagagtccttattttatgttgtttggaagattatgccaaactttaggggctatcaacagcaggacgcccatgaattcatgcgctaccttttggaccacctacacttggaacttcagggcggtttcaacggtgtttcccgctcagcaattctgcaggagaattctactctgtctgcaagtaacaagtgttgcataaatggagcatctactgttgtcacggctatattcggaggcattctccaaaatgaggttaactgcctcatatgtgggacagaatctagaaagtttgatccattcctagacctttcattagatattccaagtcagttcagaagtaagcgctctaagaatcaagaaaatggaccagtttgttcgttacgagattgtcttcgcagttttaccgacttagaagaacttgatgagacagagttatatatgtgccataaatgcaaaaagaaacaaaagtccacaaaaaagttttggattcaaaaactacccaaggtgctatgcttacatttgaaaagatttcattggacagcatatttaagaaataaagttgatacatacgtagaatttccactgagaggcctagacatgaaatgctacttactagagcctgagaacagtggcccggagagctgcctgtatgacctcgccgctgtggtggtgcaccatggttccggggttggttctggacattacacagcatacgcaactcacgaaggccgctggttccacttcaatgacagtactgtaacactgactgacgaggagactgtggtgaaggcgaaggcctacatccttttctacgtggaacaccaggccaaagctggatcggataaactttaatacctcctccaaatcatcattcaccaaccataccagagaaacatttccagttttccacaaatacttgatacaagatttaatttcattatgcacttttcaatttcctattttggatttagttttgtcaatggtagtgacttactgaacatgggcaccaactaattttgttgttgttctaccagaaaacctcagcagatgttttgatttgctgctttagttgtaataattcaatttttataggtagttgtaagaacttagtcttatttgacttttttattttatgttaatgttttcagttctcactttgaggcacatttacatcaatgcttttgttcctctcacatgctgaaagcaagatgtgttccttattgtgaagagcgacacaactgcctgctgcctttccacagctataatggacatcaggttgactctaaatcaaggatcatgtgtgcacaatacttgtggcccacaaaatttcacaatgactgctgaggaatcattctttttgcatgtaaaatataacaaagggcatcattaagtagaccaggtaattactgcttgtctctcaaggctgctg

SEQ ID NO: 188633 - DNA, 2467 bp, Homo Sapiens
ttggctggaggaagaattcacgttgtcttcggtagtcctgagcgccgggcctgaaggactcctaggcgtggagcagagcgacaaaacagaccagtttctagtgacagacagcggcaggacagtcatcctctataaggtttctgatcagaaacccttggggagctggtcagtgaaacaaggtcaaattataacatgtccagctgtgtgcaactttcaaactggagagtatgttgttgtacacgataataaggttttaagaatatggaataatgaagatgtaaacctggataaagtatttaaagctacattgtcagcagaagtatataggatactttcagtgcaagggacagaacccttggtgctcttcaaggaaggtgctgttcgtggtttagaggccttgcttgcagacccccagcagaaaattgaaactgttatctctgatgaagaagtgattaaatggacaaagtttttcgtagtattcagacatcctgttttaatttttattactgaaaaacatggaaattactttgcttacgtgcaaatgtttaactcacgtatcttaaccaaatatacactcttacttggacaagacgaaaactctgttataaagagttttactgcatctgtagatcggaaattcatctctttgatgtcattaagctctgatggttgtatatatgaaaccttgataccaatacgtccagctgacccagaaaaaaatcagagcttagttaaatcactgctgctcaaggctgttgtatctggtaacgctcgaaatggagttgcactcactgccctggatcaggatcacgtcgcagtcctaggaagtccactagcagcttctaaggaatgcctctctgtatggaacataaaatttcaaacactacagacttcaaaagagttaccacaagggaccagtggtcaactctggtattatggagaacatttgtttatgctacatggaaaatctctaactgtgattccatacaagtgtgaagtgtcatcattagcaggtgctcttggaaaactcaagcatagtcaagatccaggaactcatgtcgtgtcccattttgtaaactgggagacacctcaaggatgtggacttgggttccagaactcagagcagtcaagaagaattttaaggagacgaaaaattgaagtgagtttacagccagaggttccaccatccaaacaacttttgtcaaccataatgaaagattcagaaaaacacattgaagtagaagtacggaaatttttggctctgaagcagacacctgactttcatactgtcattggggacacagtaacaggacttctggaaaggtgtaaagcagaaccatcattttatccccggaactgtctgatgcagcttatccaaacgcatgtgctttcttacagtttgtgccccgacttaatggagattgccttaaaaaagaaagatgtacagttgttacaactctgtctacagcagttccctgacattcctgaatcagtcacctgtgcttgcttaaaaattttcttgagcattggtgatgacagtcttcaagaaacagatgttaatatggagtcagtttttgactatagtataaattctgtacatgatgagaaaatggaagagcaaactgaaattcttcaaaatggcttcaatcctgaagaagataaatgcaataactgtgatcaagagttaaataaaaagccccaggacgaaacaaaggagagcacttcatgccctgtggtacaaaaaagagcagctctacttaatgcaattcttcattcagcatatagcgagacatttcttctgcctcatttgaaagacatcccagcacagcatatcacgctgtttcttaagtatttgtatttcctgtacctgaagtgtagcgaaaatgctactatgactcttcctggaatacacccacctaccttgaaccagattatggattggatatgtctacttctggatgcgaattttactgttgttgtaatgatgccagaagcaaagaggctactgataaatctttacaagcttgtaaaatctcagatatctgtttattctgagctcaacaagattgaagtaagttttcgggagctacagaaattaaatcaagaaaagaataatagaggattatattcaattgaagtgctggagctcttctgatattatcaattctccttcatagacattttataaagctcttttatgtgaactcttgcttcatccaggcaagaacggtgttttgtttgcgaccatctcagtgtcaagagaaacgtgtcagtgagtacctggaccatcacttaactgatgctccggggtaggactgcaggtttcacatgaacctgtttctaggctgtggacattggtgtggaaaggttctgcaattttttaaaaatatgtaactggggttgatttaaagtaaattatttgtgtattgataaagtctaatttcttatcatgtggttttggaatttt

SEQ ID NO: 188634 - DNA, 973 bp, Homo Sapiens
ctcattgagatagctacagttctataggttaatttaaagcctcctttttctactcatttttgaaagcaaaattacattttactattttacataaccagtgaaaagacgttgaaagcctacagctcactgtttttggtgctctggaaatgttgagggtgggtttttaaccagtgatttttaacgtgcagtgaatttgttagacttttaaacaccagctaaggtagtcaaacttgatccccattaaaaatcaaggaattaggggtcgggggagggtttaggagtgatccagaatgacctcccagaattactgtgcgtacaactttatttttcagagttttcattggaatggtaagagttttatgaaagacagttttaaaacttattctgagttaaatattaatactttaaaaaattattgtactagacttatcgcagccttttgaaagtagcagagtttcatcataccacatatataacagagcataaattttctataatcaggcaccttttgctgcttttgagtaagactgttttcctgtttaagtgttaagcatcgccagacataaaaatctattctctcctctcgattgtagcatagcctgacagctctagatacagcatttctatgatgaaaaatgagtatccatcaggaaatctagaagactagccgtgttttctcagactccacctttgtttgcactctgttgcctgtgaggagctttctggcatgtgattatttacttcaaactagagttccaagcacctacattaattattttatattgtgtgcagaatagtatatcttttaatgtcagatatgatacactgcacatattgcttttgcactcttaaaatttttgtactaaataatagaaaatatttatattcttttgagtgtgagctttgaatagatggcattatcactttattgttttttaacaaaaactttttctcattaattctattgcaatgt

SEQ ID NO: 188635 - DNA, 946 bp, Homo Sapiens
ttgggagatgatttaaaaaacaaattgaaagcggaagaagagaaaggaaatgatctcctgtcaagagttaatatgttgaaaaataggcttcaatcattggaagcaattgagaaagatttcctaaaaaacaaattaaatcaagactctgggaaatccacaacagcattacaccaagaaaacaataagattaaggagctctctcaagaagtggaaagactgaaactgaagctaaaggacatgaaagccattgaggatgacctcatgaaaacagaagatgaatatgagactctagaacgaaggtatgctaatgaacgagacaaagctcaatttttatctaaagagctagaacatgttaaaatggaacttgctaagtacaagttagcagaaaagacagagaccagccatgaacaatggcttttcaaaaggcttcaagaagaagaagctaagtcagggcacctctcaagagaagtggatgcattaaaagagaaaattcatgaatacatggcaactgaagacctaatatgtcacctccagggagatcactcagtcctgcaaaaaaaactaaatcaacaagaaaacaggaacagagatttaggaagagagattgaaaacctcactaaggagttagagaggtaccggcatttcagtaagagcctcaggcctagtctcaatggaagaagaatttccgatcctcaagtattttctaaagaagttcagacagaagcagtagacaatgaaccacctgattacaagagcctcattcctctggaacgtgcagtcatcaatggtcagttatatgaggagagtgagaatcaagacgaggaccctaatgatgagggatctgtgctgtccttcaaatgcagccagtctactccatgtcctgttaacagaaagctatggatttccttggatgaatccaaggagggccatcttcagaatggaaaaa

SEQ ID NO: 188636 - DNA, 1941 bp, Homo Sapiens
ttggggatttacaagatgaactagcaggcaatagtgaacaaaggaaacgtttattaaaagagaggcagaagctgcttgaaaaaatagaagaaaagcagaaagaactggcagaaacagaacccaaattcaacagtgtgaaagagaaagaagaacgaggaattgctagattggctcaagctacccaggaaagaacggatctttatgcaaagcagggtcgaggaagccagtttacatcaaaagaagaaagggataagtggattaaaaaggaactcaagtctttagatcaggctattaatgacaagaaaagacagattgctgctatacataaggatttggaagacactgaagcaaataaagagaaaaatctggagcagtataataaactggaccaggatcttaatgaagtcaaagctcgagtagaagaactggacagaaaatattacgaagtaaaaaataagaaagatgaactacaaagtgaaagaaactacttgtggagagaagagaatgcagaacagcaagcacttgctgctaaaagagaagatcttgaaaagaagcaacaacttcttagagcagcaacaggaaaggccattttaaatggaatagacagcataaacaaagtgctagaccacttccgtcgaaaaggaataaaccagcatgttcaaaatggctatcatggtattgtaatgaataactttgaatgtgaaccagctttctacacatgcgtggaagtcactgctggaaacaggttattttatcacattgttgattcagatgaagtcagcacgaagattttaatggagtttaataaaatgaatcttcctggagaggttacttttctgcctcttaacaagttagatgtcagggatacagcctatcctgaaaccaatgatgctattcctatgatcagcaaactgaggtacaatcccagatttgacaaagctttcaaacatgtgtttggaaagactcttatttgtcgtagcatggaagtttcaacccagctggcccgtgctttcactatggactgtattactttggaaggtgaccaagtcagccatcggggtgctctaactgggggttattatgacacaaggaagtctcgacttgaattgcaaaaagatgttagaaaagcagaagaagaactaggtgaacttgaagcaaagctcaatgaaaacctgcgcagaaatattgaaaggattaataatgaaattgatcagttgatgaaccaaatgcaacagatcgagacccagcaaaggaaatttaaagcatctagagatagcatattatcagaaatgaagatgctaaaagagaagaggcagcagtcagagaaaaccttcatgcctaagcaacgtagcttacagagtttggaggcaagcttgcatgctatggagtctaccagagagtcattgaaagcagaactgggaactgatttgctttctcaactgagtttggaagatcagaagagagtagatgcactgaatgatgagattcgtcaacttcagcaggaaaacagacagttgctaaatgaaagaattaaattagaaggtattattactcgagtagagacttatctcaatgagaatctgagaaaacgcttggaccaagtagaacaggaacttaatgagctgagagagacagaagggggtactgttctcacagccacaacatcagaacttgaagccatcaataaaagagtaaaagacactatggcacgatcagaagatttggacaattccattgataaaacagaagctggaattaaggagcttcagaagagtatggagcgctggaaaaatatggaaaaagaacatatggatgctataaatcatgatactaaagaactggaaaagatgacaaatcggcaaggcatgctattgaagaagaaagagagtgtatgaagaaaattcgagaacttggatcacttccccaggaagcatttgaaaa

SEQ ID NO: 188637 - DNA, 2278 bp, Homo Sapiens
ttggctaaatgttcttccattagcattgcagatcactaacatcgctgggaacattatgtccaggacgctgatgggtggacgatccgagcgtaacgagttcttgttgcttcatgcattttacgaaaacaactatattgtgcctgacaagcagattttcagaaagcctcagcaaaaactgggagatgaagatgaagaaattgatggagataccaataaatacaagaaaggacgtaagaaagcagcttatgctggaggcttggttttggaccccaaagttggtttttatgataagttcattttgcttctggacttcaacagtctatatccttccatcattcaggaatttaacatttgttttacaacagtacaaagagttgcttcagaggcacagaaagttacagaggatggagaacaagaacagatccctgagttgccagatccaagcttagaaatgggcattttgcccagagagatccggaaactggtagaacggagaaaacaagtcaaacagctaatgaaacagcaagacttaaatccagaccttattcttcagtatgacattcgacagaaggctttgaagctcacagcgaacagtatgtatggttgcctgggattttcctatagcagattttacgccaaaccactggctgccttggtgacatacaaaggaagggagattttgatgcatacgaaagagatggtacaaaagatgaatcttgaagttatttatggagatacagattcaattatgataaacaccaatagcaccaatctggaagaagtatttaagttgggaaacaaggtaaaaagtgaagtgaataagttgtacaaactgcttgaaatagacattgatggggttttcaagtctctgctactgctgaaaaaaaagaagtacgctgctctggttgttgagccaacgtcggatgggaattatgtcaccaaacaggagctcaaaggattagatatagttagaagagattggtgtgatcttgctaaagacactggaaactttgtgattggccagattctttctgatcaaagccgggacactatagtggaaaacattcagaagaggctgatagaaattggagaaaatgtgctaaatggcagtgtcccagtgagccagtttgaaattaacaaggcattgacaaaggatccccaggattaccctgataaaaaaagcctacctcatgtacatgttgccctctggataaattctcaaggaggcagaaaggtgaaagctggagatactgtgtcatatgtcatctgtcaggatggatcaaacctcactgcaagtcagagggcctatgcgcctgagcagctgcagaaacaggataatctaaccattgacacccagtactacctggcccagcagatccacccagtcgtggctcggatctgtgaaccaatagacggaattgatgctgtactcattgcaacgtggttgggacttgaccccacccaatttagagttcatcattatcataaagatgaagagaatgatgctctacttggtggcccagcacagctcactgatgaagagaaatacagggactgtgaaagattcaaatgtccatgccctacatgtggaactgagaatatttatgataatgtctttgatggttcgggaacagatatggagcccagcttgtatcgttgcagtaacatcgattgtaaggcttcacctctgacctttacagtacaactgagcaacaaattgatcatggacattagacgtttcattaaaaagtactatgatggctggttgatatgtgaagagccaacctgtcgcaatcgaactcgtcaccttccccttcaattctcccgaactgggcctctttgcccagcctgcatgaaagctacacttcaaccagagtattctgacaagtccctgtacacccagctgtgcttttaccggtacatttttgatgcggagtgtgcactggagaaacttactaccgatcatgagaaagataaattgaagaagcaattttttacccccaaagttctgcaggactacagaaaactcaagaacacagcagagcaattcttgtcccgaagtggctactccgaagtgaatctgagcaaactcttcgctggttgtgccgtgaaatcctaaggggaatcccaggagtaaccaaggagggggtagtttgaaaaatcccagcttcctctgttgcctctactctggccctaaatgctcctccagcatctgtttctcccttgggactgtgtctcatgtttgtgtgaatgtagaccaggaaaggggggctgcaaa

SEQ ID NO: 188638 - DNA, 1043 bp, Homo Sapiens
  misc_feature (793)..(843): n is a, c, g, or t
ttggcaaatagatgatggtatgattctattatatattttatataaaatccatccaaattaagttttgggtaagtgtgttgtttaatctgaactatagtaacttaatactctaaacaatagttcactccatttggtcctttctccacagatgtaattatgttttcaactcaggaactatggcaaggaactttccccagatcaaattctattaacgctgagatacaagtcatccatgcacagccactatcataccctttattctcactgaaaggcagaactcagaacctgttattttatgtctgtaatcatgtactttggcatcttttggaggaaaggggcaggataactcactggaatgtacagtattttgctagtgcatttcaaggaatggaatcttctccagtatgaaattaccagatataaaataatgtaatgatgctgaggatataagcttttagaaggtaatttgatggtatttctttctcgaatgaaaagctgctggtttaccctcaaccctattcattagcattaccatgagtgaatttatatctaattatttccacttgccctgttctcttcacaccaaggaagctccagatccagtatcttgtttggcctcaaaacagaagcagcttcttttgtctcccagcagtagtgagccactcagtctcttccacaggaagtttggagcctacattccttgagtcaggagcttattacagaaaaaccccgtttccctgaacttttggctaacagaaattaatttaactgacatgcatattgattctgaaannnnnnnnnnnnnnnnnnnnnnnnnnnnnnnnnnnnnnnnnnnnnnnnnnnagatgaccaaaacttgcagggcaggggatgcctagaagagtggtgagatagtaaaacacttattctctcatcctttcagttttcaggttgcccatttatattcatttacatgtcatttgactgtctcactttttacccagaacagtaacaacccacaccgtcttccttcaggatttccaactggcactctgtgggtgcta

SEQ ID NO: 188639 - DNA, 1467 bp, Homo Sapiens
  misc_feature (584)..(634): n is a, c, g, or t
ttggctgagatacaacctcatccatgcacagccactatcataccctttattctcactgaaaggcagaactcagaacctgttattttatgtctgtaatcatgtactttggcatcttttggaggaaaggggcaggataactcactggaatgtacagtattttgctagtgcatttcaaggaatggaatcttctccagtatgaaattaccagatataaaataatgtaatgatgctgaggatataagcttttagaaggtaatttgatggtatttctttctcgaatgaaaagctgctggtttaccctcaaccctattcattagcattaccatgagtgaatttatatctaattatttccacttgccctgttctcttcacaccaaggaagctccagatccagtatcttgtttggcctcaaaacagaagcagcttcttttgtctcccagcagtagtgagccactcagtctcttccacaggaagtttggagcctacattccttgagtcaggagcttattacagaaaaaccccgtttccctgaacttttggctaacagaaattaatttaactgacatgcatattgattctgaaannnnnnnnnnnnnnnnnnnnnnnnnnnnnnnnnnnnnnnnnnnnnnnnnnnagatgaccaaaacttgcagggcaggggatgcccagaagagtggtgagatagtaaaacacttattccctcatcctttcaggttttcaggttgcccatttatattcatttacatgtcatttgactgtctcactttttacccagaacagtaacaacccacaccgtcttccttcagggatttccaactggcactctgtgggtgctacacagaatgcaatttaatggatatttctcagcctggttcagaataaattgatcctttgatcccagaaagtatatactgaagtgtgggataaagattatgattaggggagggttggagacaaaagctgtaaattactatggctgatttatttctactatatacatatatattttttgcttttgtatatcctatataggaaactaagcattgtattttttttaacaaatctaaaaaagcactatgaactacaggtgtttgactttcaaaatatattttgtattgttaatatcttcacattgtgtgaatactggaagctgcagatctttgctaggacgcaataaatttatatactttttgaggggttcttctggggtgctaatcaggcccctgttatgcttagggggagccctggtgctacttgcttgaagttttcagtgtaagtaccctgatgccttttggaccttgggatcagatcaagagttttggagatcaggtacccaggaaataatgacagtctagctgcctcaagtgaggggcccttttgcatagctctccttccccctcactgaagctgggtagcctattggggttggagagggaaaatgtgaaatctcagactttatctccctta

SEQ ID NO: 188640 - DNA, 2402 bp, Homo Sapiens
ttggctgtctaccagtgggaaccgacccccagcaaatgcagaaacatttagttgtaataaaataaaagataatgacaaagaagatggctgcttctatttcagggataaagtaattcctaataaagtggggacatattgtatccagtttggttttatgatggataaaacaaatattctcaacagtgaacaggttatagttgaagtcctgcctaatcaacctgtgaagttagtacctaaaattaaaccacctacaccagctgtttcaaatgttcgctcagttgccagtaggaccttggtcagagatctacatcttagtatcacggatgactacgacaaccatactggaattgatttggttggcactataatagccaccattaaaggctctaatgaggaagatactgataccccactttttattgggaaagttagaacacttgaattccccttcgtgaatggttcggctgaaatcatgagtctggtgctggcagaaagtagtcctggaagggatagtactgaatattttattgtatttgagccccggctaccacttttatcaagaaccttagaaccatatatcctaccgttcatgttttacaatgatgttaagaagcagcaacaaatggcagcacttacaaaagaaaaggaccaattatctcagtctattgttatgtataaaagtttatttgaagccagccaacagcttcttaatgaaatgaaatgtcaagttgaagaagcaagattaaaagaggcccaattgcgaaatgaactaaaaatacataatattgacattcctacaacacaacaggtgccacacattgaagcacttctgaaaagaaagctatcagaacaagaagaactgaagaaaaaacctagaagatcgtgtactcttccaaactatactaaaggcagtggagatgttttgggaaagattgcacatctagcacaaattgaagatgatagagctgcgatggttatttcttggcatctggcaagtgacatggactgtgtagtcaccctaaccactgacgctgcacgtcgtatctatgatgaaacccaaggtcgtcagcaggtgttgccccttgattctatttacaagaagactcttccagattggaaaagatctctacctcatttccgaaatggaaaattgtattttaaacccattggagatccagtctttgctcgagacttgttaacatttccagataatgtagaacattgtgaaacagtatttggtatgctgttaggagacaccattattttggataatctggatgcggccaatcattatagaaaagaggttgttaaaattacacactgtcctacactgctgaccagagatggagatcgaattcgaagtaatggaaagtttgggggccttcagaataaagctcctccaatggataaacttcggggaatggtatttggagctccagttccaaaacagtgtctgatcttaggggaacaaatagatcttcttcagcagtatcgttctgctgtgtgcaaactagacagtgtgaataaggatcttaacagtcaattagagtaccttcgcactccggatatgaggaagaaaaagcaagaacttgatgaacatgagaaaaatctcaaactaatagaggaaaaactaggtatgactcccatacgtaagtgtaatgactcattgcgtcattcaccaaaggttgagacgacagattgtccagttcctcctaaaagaatgagacgagaagctacaagacaaaataggattataaccaaaacagatgtatgagaggtgacagagagaagaggccattggtctcagtaagaatgccctgctttctgcatctctgtttcagaagaccaagagggtgacttaccagactgagtatttctggggacaatacaagtacctgggcatgaatttccatttcgattcagatgggactggaaacaaccattcaattttatgaatcttactggacattatggatttactggaattattccagacattatgccctttggttgtcactaccttgcaaatgtgtaagaggaaaatgtgctaatgtggcagtgactgtaaaactggcacatggcatttattaatcctgaagaaaagtacatgtactatttttcagtataaatataatgaacatgtcagaactatttcttgaaaacctttttattacttttgcgtgaatttatttaacaaagatgttttgtcttttgtgtaagggaggttctagaggctagatgtttaattgtaaatatgtgaggaaactcaatgcagaattcaggataaaaattttaaaagcacaggtatttgggaattgaaatgttaagatacccagaacaacattaaatcaatgagtgaacttgtgacagtggtagcatttcaaatttcaaaagacttatcc

SEQ ID NO: 188641 - DNA, 1727 bp, Homo Sapiens
ttggcaacctgatgcaccctgatttgtcaaaggtggtaccaggtgggtgtcagtgtcacatacaagagtaaaactgttcctagagcaaatggcgatgagagagctgaacgcggattcatgctcaagcccccagatgggggctatgtgggagactagtgggtctgtgaaagagaactccagtcagagtaagaaatacagcacaaaaatagagaatcttggtcctgagagcgcttgcaggcacttctggagcttccgttatcatgaagcaaccggaccgcttgagactatcagccaacttcagaaattgtgccatcagtggctgaggccagagatccactcaaaagagcagatcttggaaatgctggtgttagagcagttcctgagcattctgcccaaggagacccagaactgggtgcagaagcatcatccacagaatgtcaaacaggctctggtcctggtggaattcttgcagagggagcctgatggaacaaagaatgaggtcacagcccatgagctgggaaaggaggcagtgctcttgggaggaacagcagtggccccaggcttcaagtggaagccagcagagccccaaccaatgggtgtgttccagaaagaatattggaatacataccgggtactacaagaacagctgggctggaacactcacaaagaaacccagcctgtatatgaaagagctgtgcatgatcaacagatgttagctcctttctgagcagaaaagaatcaaacactggaagatggcatctaaactcatcctgcctgagtctctgagtttgttgacatttgaagatgtggctgtgtatttttctgaggaagagtggcaattattgaatcctcttgagaagactctctacaatgatgtaatgcaggatatctatgagactgtcatctctctagggttaaagctaaaaaatgacactggaaatgatcatcctatatctgtttctacatcagaaatacaaacatcaggatgcgaagtatcaaaaaagaccagaatgaaaattgcccagaaaacaatgggcagggaaaatcctggtgatacacacagtgtacagaaatggcatcgagcttttccaaggaagaaaagaaagaaacctgcaacttgtaaacaagagcttccaaaacttatggatcttcatgggaaaggccccacaggggagaaaccttttaagtgtcaggaatgtgggaaaagcttcagagttagctctgatcttattaaacaccacagaattcacactggagagaaaccctataaatgtcaacaatgtgacaggaggtttagatggagttcagatcttaataagcacttcatgacccatcaaggaataaaaccatatagatgctcatggtgtgggaaaagctttagtcataacacaaatctacacacacaccaaagaattcacacaggagagaagccctttaaatgtgatgaatgtggaaaaagattcattcagaactcccaccttattaaacaccagagaactcacacaggtgagcagccttatacgtgtagcttatgcaagagaaactttagtaggcgatcgagccttcttagacaccagaaactccacagaaagaagggaagcatgtctagtgtctccaaactgaagaaagttaccatgtagagcttgactttagaagtggtgaaagaatacaaaaatatgaggcaccccaatgatagggatctgtgattattaaacatttggggaggg

SEQ ID NO: 188642 - DNA, 1596 bp, Homo Sapiens
ttggcgccggaaccgccgcccgcagcgaggaagcgcccgcgcgggcgcaggcggccgggatggcggggcccggctggggtcccccgcgcctggacggcttcatcctcaccgagcgcctgggcagcggcacgtacgccacggtgtacaaggcctacgccaagaaggacactcgtgaagtggtagccataaagtgtgtagccaagaaaagtctgaacaaggcatcggtggagaacctcctcacggagattgagatcctcaagggcattcgacatccccacattgtgcagctgaaagactttcagtgggacagtgacaatatctacctcatcatggagttttgcgcagggggcgacctgtctcgcttcatccatacccgcaggattctgcctgagaaggtggcgcgtgtcttcatgcagcaattagctagcgccctgcaattcctgcatgaacggaatatctctcacctggatctgaagccacagaacattctactgagctccttggagaagccccacctaaaactggcagactttggtttcgcacaacacatgtccccgtgggatgagaagcacgtgctccgtggctcccccctctacatggcccccgagatggtgtgccagcggcagtatgacgcccgcgtggacctctggtccatggggggtcatcctgtatggtgagacctcttttccctgcttctcaccctgaggcctacagtttcctcaggcaaggcctctctgggccacttctgaagggttctgatgaaaactgactgctggcccagggcccctgctgaggggcgtcaggccaggcttgacccattccctcccagcctccgctctgcctcccttccacagaagccctcttcgggcagcccccctttgcctccaggtcgttctcggagctggaagagaagatccgtagcaaccgggtcatcgagctccccttgcggcccctgctctcccgagactgccgggacctactgcagcggctcctggagcgggaccccagccgtcgcatctccttccaggacttctttgcgcacccctgggtggacctggagcacatgcccagtggggagagtctggggcgagcaaccgccctggtggtgcaggctgtgaagaaagaccaggagggggattcagcagccgccttatcactctactgcaaggctctggacttctttgtacctgccctgcactatgaagtggatgcccagcggaaggaggcaattaaggcaaaggtggggcagtacgtgtcccgggctgaggagctcaaggccatcgtctcctcttccaatcaggccctgctgaggcaggggacctctgcccgagacctgctcagagagatggcccgggacaagccacgcctcctagctgccctggaagtggcttcagctgccatggccaaggaggaggccgccggcggggagcacgatgccctggacctgtaccagcacagcctgggggagctactgctgttgctggcagcggagcccccgggccggaggcgggagctgcttcacactgaggttcagaacctcatggcccgagctgaatacttgaaggagcagatgagggaatctcgctgggaagctga

SEQ ID NO: 188643 - DNA, 1073 bp, Homo Sapiens
  misc_feature (175)..(191): n is a, c, g, or t
ttggctttcttacttatgactagagttcctcctcttcatttatattcttttcttggtgaacatcagtgtctaccaatttctaaatgcaaaggagaaagatacaattttaagcgaaatggtggtgatatgcacaacttgcagaaggttacataaaacttgggttttcagagatgannnnnnnnnnnnnnnnnaggatatgttcaaggaatgagtgatttactttcccctcttttatatgtgatggaaaatgaagtggatgccttttggtgctttgcctcttacatggaccaaatgcatcagaattttgaagaacaaatgcaaggcatgaagacccagctaattcagctgagtaccttacttcgattgttagacagtggattttgcagttacttagaatctcaggactctggatacctttatttttgcttcaggtggcttttaatcagattcaaaagggaatttagttttctagatattcttcgattatgggaggtaatgtggaccgaactaccatgtacaaatttccatcttcttctctgttgtgctattctggaatcagaaaagcagcaaataatggaaaagcattatggcttcaatgaaatacttaagcatatcaatgaattgtccatgaaaattgatgtggaagatatactctgcaaggcagaagcaatttctctacagatggtaaaatgcaaggaattgccacaagcagtctgtgagatccttgggcttcaaggcagtgaagttacaacaccagattcagacgttggtgaagacgaaaatgttgtcatgactccttgtcctacatctgcatttcaaagtaatgccttgcctacactctctgccagtggagccagaaatgacagcccaacacagataccagtgtcctcagatgtctgcagattaacacctgcatgatcactgttcttgcttttttgggaagagacactttgttgcaaccctttttcaagtacttgaaagttgaaaatttgaaatcttggtattgatcatgctttaaggtttatgtaaagaaagtgtactgatgttcttacattaaagctttacaaagattt

SEQ ID NO: 188644 - DNA, 1201 bp, Homo Sapiens
cccccaaacccccacagtggcaggggggctgcatattaaaacagagacataatccccacccttttacattatgaagacagggaggtgtgaaaaaaattgccccctaatgtagtgatggtgttttttaaaaagcaccatttgggaagtaaagttagggcctcttttgatgcctgtcttaggatggacactgggggtgggaggattacatcaacagagtgagaaggggaggggaagggagggggctgcttgtgaatgagattcaaggcactaaaggagtggatggatgcgtgggcctcgggcaaagtcgccctaaagtggggaccccagaggagagaagggagggtggctggggaggtgacctggccctccaatcctaaacaagccccaatgtgaccacaatctccagggctagagctgcccgcttccctctggccagagggcccaaggcagccccctgggttctccaaccactgcaagcaaggtctggggacaaccttgacaacccccagccttcttgctgggctggcgctgctgccactcaaataggacataggacaagcttgtctgacatcagctactggagttaaattatggctttataggactcaaacctgttgtttttcccaactctgttctctccctccaatccaacccctgccacagtgcatgggcaggctagccttgaatggactggacagacaccaacagctgcatcccttggcatggggctccatgtcaaatatgccaaaccccaggggagatggagggggctggagacccggggcctcctcatagagataactctgcactgggttcaaatggccctgagtgcagccgcaagtagatgctcataaatgcgcacatgcgctcactcacacagacaccggcgagaggtgctggactccagcctggctagcaccgctgcagccaggcactgaaaggaggggcttccaggaggacctctggccagaaggccagcaagtgccatgaccagtcacaccgcccagtgccttgtccctccaaggcctctgggtgccgacgcaagtccacagggagcaccaacgccacttccagttgaccctcgaatctcggcgatggctgggccaaaggttgagcgtgggtgggactagggaggggccgagggccaggagtgtgtctaatacccaggccaggcaggccccggcggtggtgggaacccata

SEQ ID NO: 188645 - DNA, 1159 bp, Homo Sapiens
ttggccaacagttaatgataaactaatgagattttttgatcactgtgagaagtttttaactgaagtagaaaaaaatgctacagctctttatcacgtggaagccttcaaaactggaccagaaatgcagaacattttaaaaaaagttgcagctactttgcaagtgccagtaaatgatttaaatgcagatttaattcaagtagcctttttcacctgttcatttgacctggcaattaaaggtgttaaatctccttggtgtgatgtttttgacatagatgatgcaaaggtattagaatatttaaatgatctgaaacaatattggaaaagaggatatgggtatactattaacagtcgatccagctgcaccttgtttcaggatatctttcagcacttggacaaagcagttgaacagaaacaaaggtctcagccaatttcttctccagtcatcctccagtttggtcatgcagagactcttcttccactgctttctctcatgggctacttcaaagacaaggaacccctaacagcgtacaattacaaaaaacaaatgcatcggaagttccgaagtggtctcattgtaccttatgcctcgaacctgatatttgtgctttaccactgtgaaaatgctaagactcctaaagaacaattccgagtgcagatgttattaaatgaaaaggtgttacctttggcttactcacaagaaactgtttcattttatgaagatctgaagaaccactacaaggacatccttcagagttgtcaaaccagtgaagaatgtgaattagcaagggctaacagtacatctgatgaactatgagtaactgaagaacatttttaattctttaggaatctgcaatgagtgattacatgcttgtaataggtaggcaattccttgattacaggaagcttttatattacttgagtatttctgtcttttcacagaaaaacattgggtttctctctgggtttggacatgaaatgtaagaaaagatttttcactggagcagctctcttaaagagaaacaaatctatttagagaaacagctggccctgcaaatgtttacagaaatgaaattcttcctacttatataagaatctcacactgagatagaattgtgatttcataataacacttgaaagtgctggagtaacaaaatatctc

SEQ ID NO: 188646 - DNA, 1152 bp, Homo Sapiens
  misc_feature (307)..(317): n is a, c, g, or t
  misc_feature (857)..(878): n is a, c, g, or t
ttggcttaaattttgtaggatttttttcctccccaccttcaatgacttctaatttatattatccataggtttctctccctccttctccttctcacacacaactgtccatactaacaagtttggtgcatgtctgttcttctgtagggagaagctttagcttcattttactaaaaagattcctcgttattgttgttgccaaagagaaacaaaaatgattttgctttccaagcttggtttgtggcgtctccctcgcagagcccttctcgtttcttttttaaactaatcaccatattgtaaatttcagggnnnnnnnnnnngtttaagctgactctttgctctaattttggaaaaaaagaaatgtgaagggtcaactccaacgtatgtggttatctgtgaaagttgcacagcgtggcttttcctaaactggtgtttttcccccgcatttggtggattttttattattattcaaaaacataactgagttttttaaaagaggagaaaatttatatctgggttaagtgtttatcatatatatgggtactttgtaatatctaaaaacttagaaacggaaatggaatcctgctcacaaaatcactttaagatcttttcgaagctgttaatttttcttagtgttgtggacactgcagacttgtccagtgctcccacggcctgtacggacactgtggaaggcctccctctgtcggctttttgccatctgtgatatgccataggtgtgacaatccgagcagtggagtcattcagcgggagcactgcgcgctatcccctcacattctctatgtactatgtatgtatgtattattattattgctgccaagagggtctgatggcacgttgtnnnnnnnnnnnnnnnnnnnnnnaagtgctctaacttttcttaaggttttgttgctagcccttcaagtgcactgagctatgtgactcggatggtctttcacacggcacatttggacatttccagaactaccatgagatggtttagacgggaattcatgcaaatgaggggtcaaaaatggtatagtgaccccgtccacgtcctccaagctcacgaccttgggagccccgtggagctggactgaggaggaggctgcacagcgggagagcagctggtccagaccagccctgcagccccca

SEQ ID NO: 188647 - DNA, 1550 bp, Homo Sapiens
  misc_feature (469)..(479): n is a, c, g, or t
  misc_feature (1019)..(1040): n is a, c, g, or t
ttggctgtttttgcaactaggtatttctaacgccagcacactatttacaagatggacttacctggcagacttgcccaggtcaccaagcagtggcctttttctgagatgctcactttattatccctatttttaaagtacacaattgttttacctgttctgaaatgttcttaaattttgtaggatttttttcctccccaccttcaatgacttctaatttatattatccataggtttctctccctccttctccttctcacacacaactgtccatactaacaagtttggtgcatgtctgttcttctgtagggagaagctttagcttcattttactaaaaagattcctcgttattgttgttgccaaagagaaacaaaaatgattttgctttccaagcttggtttgtggcgtctccctcgcagagcccttctcgtttcttttttaaactaatcaccatattgtaaatttcagggnnnnnnnnnnngtttaagctgactctttgctctaattttggaaaaaaagaaatgtgaagggtcaactccaacgtatgtggttatctgtgaaagttgcacagcgtggcttttcctaaactggtgtttttcccccgcatttggtggattttttattattattcaaaaacataactgagttttttaaaagaggagaaaatttatatctgggttaagtgtttatcatatatatgggtactttgtaatatctaaaaacttagaaacggaaatggaatcctgctcacaaaatcactttaagatcttttcgaagctgttaatttttcttagtgttgtggacactgcagacttgtccagtgctcccacggcctgtacggacactgtggaaggcctccctctgtcggctttttgccatctgtgatatgccataggtgtgacaatccgagcagtggagtcattcagcgggagcactgcgcgctatcccctcacattctctatgtactatgtatgtatgtattattattattgctgccaagagggtctgatggcacgttgtnnnnnnnnnnnnnnnnnnnnnnaagtgctctaacttttcttaaggttttgttgctagcccttcaagtgcactgagctatgtgactcggatggtctttcacacggcacatttggacatttccagaactaccatgagatggtttagacgggaattcatgcaaatgaggggtcaaaaatggtatagtgaccccgtccacgtcctccaagctcacgaccttggagccccgtggagctggactgaggaggaggctgcacagcgggagagcagctggtccagaccagccctgcagcccccactcagccggcagccagatggccccgcaaggcctccagggatggcccctagccacaggccctggctgacgtctctgggtcggtcagtgacatgtaagtagaagcactgaaatagtgttcccagagcactttgcaactccctgggtaagagggacgacacctctggtttttcaataccaattacatggaacttttctgtaatgggtacatgaagaagtttctaaaaacacacacaaagc

SEQ ID NO: 188648 - DNA, 1865 bp, Homo Sapiens
  misc_feature (1765)..(1773): n is a, c, g, or t
ttggcagagacccaagcagctggaggctctgtgtgtgggtcgctgatttcttggagcctgaaaagaagcaggagcagcgactggacccagagccatgtggctgtgccctctggccctcaacctcatcttgatggcagcctctggtgctgcgtgcgaagtgaaggacgtttgtgttggaagccctggtatccccggcactcctggatcccacggcctgccaggcagggacgggagagatggtgtcaaaggagaccctggccctccaggccccatgggtccgcctggagaaacaccatgtcctcctgggaataatgggctgcctggagcccctggtgtccctggagagcgtggagagaagggggaggctggcgagagaggccctccagggcttccagctcatctagatgaggagctccaagccacactccacgacttcagacatcaaatcctgcagacaaggggagccctcagtctgcagggctccataatgacagtaggagagaaggtcttctccagcaatgggcagtccatcacttttgatgccattcaggaggcatgtgccagagcaggcggccgcattgctgtcccaaggaatccagaggaaaatgaggccattgcaagcttcgtgaagaagtacaacacatatgcctatgtaggcctgactgagggtcccagccctggagacttccgctactcagatgggacccctgtaaactacaccaactggtaccgaggggagcctgcaggtcggggaaaagagcagtgtgtggagatgtacacagatgggcagtggaatgacaggaactgcctgtactcccgactgaccatctgtgagttctgagaggcatttaggccatgggacagggaggacgctgtctggccttcagcctccatcctgaggctccacttggtctgtgagatgctagaactccctttcaacagaattcacttgtggctattgggactggaggcacccttagccacttcattcctctgatgggccctgactcttccccataatcactgaccagccttgacactccccttgcaaactctcccagcactgcaccccaggcagccactcttagccttggccttcgacatgagatggagccctccttattccccatctggtccagttccttcacttacagatggcagcagtgaggtcttggggtagaaggaccctccaaagtcacacaaagtgcctgcctcctggtcccctcagctctgcctctgcagcccactgcctgcccagtgccatcaggatgagcagtcccggccaagcataatgacagagagaggcagacttcggggaagccctgactgtgcagagctaaggacacagtggagattctctggcactctgaggtctctgtggcaggcctggtcaggctctccatgaggttagaaggccaggtagtgttccagcagggtggtggccaagccaaccccatgattgatgtgtacgattcactcctttgagtctttgaatggcaactcagccccctgacctgaagacagccagcctaggcctctagggtgacctagagccgccttcagatgtgacccgaataactttcaactgatgaacaaatctgcaccctacttcagatttcagtgggcattcacaccaccccccacaccactggctctgctttctcctttcattaatccattcacccagatatttcattaaaattatcacgtgccaggtcttagatatgtcgtggggtgggcaaggtaatcagtgacagttgaagannnnnnnnncccagagcttatgtcttcatctgtgaaatgggaataagatacttgttgctgtcacaggttattaccatctccccagctaccaaaattactac

SEQ ID NO: 188649 - DNA, 1094 bp, Homo Sapiens
  misc_feature (1000)..(1026): n is a, c, g, or t
ttggatattggtaaaatgtagcagaggcaggagtttggatgtttggatgggattcccttaggattctacagccaataaagatcctatttcctatgcatgtcccaggaatcagtaatcctcttttactctgttgggatgagtctttttttgtttctgttcagagtggttactaacttcaccttctttcctcttgctgtcatctgcattcgtgcttcccacctgttgttggcatgtcctttaccttctctttccctgccacatcaacctacacactgactcatcattgacgtggaagatgtggaagatgtcaagtttgtgatcaactatgactatccaaacagctcagaggattatgtgcaccgtattggccgaacagcccgtagcaccaacaagggtaccgcctataccttcttcaccccagggaacctaaaacaggccagagagcttatcaaagtgctggaagaggccaatcaggctatcaatccaaaactgatgcagcttgtggaccacagaggaggcggcggaggcgggggtggtcgttctcgttaccggaccacttcttcagccaacaatcccaatctgatgtatcaggatgagtgtgaccgaaggcttcgaggagtcaaggatggtggccggagagactctgcaagctatcgggatcgtagtgaaaccgatagagctggttatgctaatggcagtggctatggaagtccaaattctgcctttggagcacaagcaggccaatacacctatggtcaaggcacctatggggcagctgcttatggcaccagtagctatacagctcaagaatatggtgctggcacttatggagctagtagcaccacctcaactgggagaagttcacagagctctagccagcagtttagtgggataggccggtctgggcagcagccacagccactgatgtcacaacagtttgcacagcctccgggagctaccaatatgataggttacatggggcagactgcctaccaatacnnnnnnnnnnnnnnnnnnnnnnnnnnntcacgtaaatgaaaccactcaagtggtagtgactccagcagacttaattacattttaaggaacactgt

SEQ ID NO: 188650 - DNA, 1337 bp, Homo Sapiens
ttcttatgaaagtagattttgtacacatggtaggcttaaaaatttaaaactgcttttccacaaaactgataaattactagattcttggttctttcatgatatcataacattaaatcattaaaaatataaggcaatttaatgtaaactactagcatttacaaaacagtaaagttataaaaaactgtattacaagcaaatgcaccaaataccagtgaacatgaaacaggagtgaagtttgctggagaacattaaaaatcacttttcagtgggttcacttcacattcatgctgcactgggcctgacacgttcagcaccatgaagcagacacttcggcaactagaaatgttacttctgtttgactttttttctaaaatgaaaaagcagtctgtgaaatgcgtgttaagaacgatctatctagagtcgcacagggtccagggccgctgcagttgactcagttgttcccatcctcgttttatttgacaaagtacttcatttggccactctggaagaatttattttcttgatatcaactgggctcagaatcagtgttccatttttgaattttccaacctgtccaatccgtccatttgacaaaatactgggagcggacttctttttggatttcctgtcctcctgtcctttcctcttctttttcttgaaaatatctgtttcttgggccagtctcttttcttcttcctttgctgcctttttttctttaatttgctcctgtaaaaccttgtaattcacataactctttttaggaggcttagcgcccagcataatggcacgttcctgttccaggattctctcctttccttttccataacccgtgataccaaaccggtgcacttctaaacgagctttttctaggttaaattcttgtgtatccacatctctctccaaaacactaggattagcctgctttgtgttcttgttatgatctggcgtcaattttctttttttattgctgtgaaattctaccacttctacttgttccctattgttctttagggaagagggaggaactgcagcagcaaggatctctggtcctgtgggggtcccagaaggagcacaatgccgctcttctctaagttccttgaagaagctcgaagcgctcttcctctggcctcttatgagagaaccaggtaggggagatggctctgctgccaaggccgctgaagccatcacatctctcttcttgttttcccttttctttatgatcttcttctgttctgtttcaccttctgtacctccaaagtcgtaaaggttctggagcagagcgtcaagaagtgtcggagaactgggaggcgtggaggaccccggcccttgctccccaa

SEQ ID NO: 188651 - DNA, 1668 bp, Homo Sapiens
ttttcccctgcacatgttcactaggacttaagctgtgacttgctgtggaaggattttccacttcactgaatccccccgtttctcctttgagtgtattctcttatgtttaacaaggcaagacatatagaagtaagctttctcacactcatcacagccatagggtctctctcccgtgtgagttctgtgatgtacaatgagcattgtctttgtaaggaaggctttcccacagtcactgcatttatagggtttctctcctgagtgaattttctgatgtctaatgagtcctgacttctgtgaacagggttgcccacattcaggacatacaaagggagtctttcctgtatgatatctctgatgtgctacaaggcaagacttctggctgaaggccttgccacagtcaatgcatccataaggtttctctccagtgtgagttcgttgatgtatgttgagattgcccttctgaatgaagccttttccacattcactgcatgtatgaggcttctctcctgtatgagttcgctgatgtacaacgagtagtgattttctggagaaagctctcccacattcgctgcattgatggggcttaattcccgtgtgaatcctttgatgttcagtaagctcagatttcctggggaaggctttcccacattcactgcacccgtatggtttctctcctttgtgagctctctcgtgttcagtgagcctgtacctcttgtagaaggctttcccacacaagctacacccgtggggtttctctcctctgtgagctctctcgtgttcagtgagcctgtacttcttgtagaaggctttcccacacaagctacacacgtggggtttctttcctgtatgaattctcttatgctcagtgagctgagacttcttgaggaaagctttcccacagtcagtgcattcatgggctttctctatgttgtgtgtttgctgatgtttaaggaattgtgacttggtgctgatgggttttctactttcagggaattcaatttccgtaggcatttgttcatgattatcatggagaaaagctccatctccattaaactcagcaggctcctttctgttgtatcttctgctctggttggttaaacctaaatatgatttcaaagttcttccgtgttcatagcgttgtcccgtcctcttcagtattttttggttttgcaagggctgctgcagatgatcatcagctttctcaatttctgggtgggctggactgtggatttcatcttctagtgtccatagtggttctccttgttccaacttggtgagggcatcaggtttgccggcttgataccccactgacacaaggttgctgtagttctccaacatcacatcccggtacaggtccttctgagcagggctcaggaactgccactcctcccaggtgaagtccacagccacatcctccagggtcagtgattcctgggcctttgtcattttcttctgtttcaggaaatacccaagaactgggatgcttcgtctttggtttcttctggatcctccctaaattttggctaagaaatctgagtctccatttaagagtgttcccagaaatgatgacatccacatccaggaacctcctccttccttcatttgaactctcttgcttctggggagccaggacctgattttcttctggctacacctaaattcccccaa

SEQ ID NO: 188652 - DNA, 924 bp, Homo Sapiens
ttggggcccttcttgtgtatctggagaaaatagaggttctgactcctcaggagcaaaaaacataacctgaagagggaggaagtggatttggggttcaccatttcttggggcacacttgattgaaaactgagacttctgaagagaaggccagaagatacaaagacagaccatcccagttgaatgctgtcttccaagaacagaagaaaatgatccaggcccaggaatccataacactggaggatgtggctgtggacttcacttgggaggagtggcaactcctgggcgctgctcagaaggacctgtaccgggatgtgatgttggagaactacagcaacctggtggcagtggggtatcaagccagcaaaccggatgcactcttcaagttggaacaaggagaacaactgtggacaattgaagatggaatccacagtggagcctgttcagacatatggaaagttgatcatgtgctggagcgcttgcagagtgaaagcctggtgaacagaaggaaaccatgtcatgaacatgatgcatttgaaaatattgttcattgcagcaaaagtcagtttctgttagggcaaaatcatgatatatttgacttacgtggaaaaagtttgaaatccaatttaactttagttaaccagagcaaaggctatgaaataaagaactctgttgagtttactggaaatggggactcctttcttcatgctaaccatgaacgacttcatactgcaattaaattccctgcaagtcaaaaactcatcagcactaagtcccaattcatcagtcccaagcatcagaaaacacgaaaattagagaagcatcatgtgtgcagtgaatgtgggaaagccttcatcaagaagtcttggctaactgatcaccaggtaatgcatacaggagagaaacccacagatgtagtctatgtga

SEQ ID NO: 188653 - DNA, 1617 bp, Homo Sapiens
  misc_feature (1195)..(1203): n is a, c, g, or t
ttggggaagagaagacctaggagcagaccaaggaagtggtgggtgctccccctccctaagctccagggtccctgaatcttctgaaatctcaaatgagtggaggcctcctggggtggcctgtcctgcaggggccctggaatgggggcaagcagctgggtgggcagaatgcagagtagactcgggggaggatcctttcactttccgcttccccttctgatgcatggaggatggtgtgagcttttcagcaggcccggaaaggtacgcaggtgacgccttagcagccccgcagctggtgctctgccccgcggtactggcgccatcagggcctcccttgcccgcctgagagcagcagcagtctctgtcatcccgtcgccccttaccccccaccccaggccactgggcccctcccacaccacctggggagctgagaagaggaggctggagtaagggaggacttgatcatccaagaaatactttttattgctgggagtcttctgaacctcaccaaactgaggccagagctgagctcctgggggagttaattcagaggggagaggccagcacctccctcctccatcgctcgctgtgtgccttaaactccatctcatgtccctccccatcccctggctttccctccctccttgccccatcctgggccagccagcagggctcctcctctggctcttcagacctttcagccagtgctgtcagtgcccctgggagggaagggcatccctgaggcacccgaatggtccctcagggtgcagggaggcagaagcctggccacagaggagcctcctaaggcagcagctgcagcaagcgcaccctctccccactctccccacgccagagcggcttccagagcagatgctgtttccatcctcctcgtcaaaaccattctcgctgctgagcttgacaatctgggcaaggcttgtggggcgcttgacaaacagaatctgccctgtgccgcctggttccgtggcctccagcatgagcctgcaggcagggcgctgcgggaacccagttgtgctgccccagcccatgcctccgggtctgctgtgcatgaatgagtgctcacttgtcccgggtttaggacgtggtcaagtgaacagcagggtctaactgtgcttacttagcccagttcaaacagaacaaaggaaaaatatagaaagcaacatctgttgatcatttaggnnnnnnnnnaaaccaccatgtcactttgagtccttcatgggtttttgaacagcatttatcaagaagaaaatgtgggctttttcccctctcccgtgttttgtttgtcctgtagatagagggaggaaagccgtgcagtggcaggcgggaccccctctggtggcgggaccccctcttgcggtggtcttgcggggccagccgggacctgtcactttattatttaaggagtgtgtgtgtagagtcgctggcttattaacagtattgtgtgtgggttgggtttttagtttgttccttctttttgaagtcccttcatttcaatccttgactctctctccccttcccttgcccagctctgttgatgctgctgtgcgcgtgtgagggccgcctctgcacacagggcccttggggttgtgtgaactgaaaatt

SEQ ID NO: 188654 - DNA, 1094 bp, Homo Sapiens
  misc_feature (813)..(821): n is a, c, g, or t
ggccaggcttagggggcacagggggctgcctcccatcaataagttagacatacatcgcaccttgccgtcctcacgcagagagcccctgggcactgctcatgtgctgcctgggccctgctgctcagaacaccaagggctcccaatgagggcctggggaattgcctgggcacactggggccaggcacagggtctgttctgaattcagggaaggtgaagagaccccacctctatccagctcaagcccaagaacaaggcagacagagctgtggacagcacccgaccacagacacggttctgcctgctgctggagtgagaggcctggtttctgaggctgcagcatggcactggcattgcctgtgctacagatggggactcctgcgagtctcacaaatacagggagaatttcagttcacacaacccaagggccctgtgtgcagagcggccctcacacgcgcacagcagcattcaacagagctgggcaagggaaggggagagagagtcaaggattgaaatgaagggacttcaaaaagaaggaacaaactaaaaacccaacccacacacaatactgttaataagccagcgactctacacacacactccttaaataataaagtgacaggtcccggctggccccgcaagaccaccgcaagagggggtcccgccaccagagggggtcccgcctgccactgcacggctttcctccctctatctacaggacaaacaaaacacgggagaggggaaaaagcccacattttcttcttgataaatgctgttcaaaaacccatgaaggactcaaagtgacatggtggtttnnnnnnnnncctaaatgatcaacagatgttgctttctatatttttcctttgttctgtttgaactgggctaagtaagcacagttagaccctgctgttcacttgaccacgtcctaaacccgggacaagtgagcactcattcatgcacagcagacccggaggcatgggctggggcagcacaactgggttcccgcagcgccctgcctgcaggctcatgctggaggccacggaaccaggcggcacagggcagattctgtttgtcaagcgccccacaagccttgccaa

SEQ ID NO: 188655 - DNA, 1456 bp, Homo Sapiens
ttggctcaaagtccgctttaagaaggtccctcacaacatcaacttccgtgagaagaagccaaagccatccaagaagaaagcagaaggtggcggcgcagaggagggggctggggcccggggccgcgtggcgcgtttccgctacttcgaggatatttatggctactcaggggtcttcatctgcggcccctcccctcactggctcttggtgaccggccgaggggctctgcggctacaccccatggccatcgacggcccggtcgactctttcgctccattccacaatgtcaactgtccccgcggcttcctgtacttcaacagacagggcgagctgaggatcagtgtcctgcctgcctacctgtcctatgatgccccatggcctgtcaggaagatcccgctgcgctgcacggcccactatgtggcttaccacgtggagtctaaggtgtatgctgtggccaccagcaccaacacgccgtgtgcccgcatcccacgcatgactggcgaggagaaggagtttgagaccatcgagagagatgagcggtacatccacccccagcaggaggccttctccatccagctcatctccccggtcagctgggaggctattcccaatgccaggatcgagctgcaggagtgggagcatgtgacctgcatgaagacagtgtctctgcgcagtgaggagaccgtgtcgggcctcaaaggctacgtggccgccgggacctgcctcatgcagggggaggaggtcacgtgccgagggcggatcttgatcatggatgtgattgaggtggtgcccgagcctggccagcccttgaccaagaacaagttcaaagtcctttacgagaaggagcagaaggggcccgtgaccgccctgtgccactgcaatggccacctggtgtcggccatcggccagaagattttcctgtggagcctgcgggccagcgagctgacgggcatggccttcatcgacacgcagctctacatacaccagatgatcagcgtcaagaacttcatcctggcagccgacgtcatgaagagcatttcgctgctgcgctaccaggaggaaagcaagacgctgagcctggtgtcgcgggatgccaagcccctggaggtgtacagcgtggacttcatggtggacaatgcccagctgggttttctggtgtctgaccgcgaccgcaacctcatggtgtacatgtacctgcccgaagccaaggagagtttcgggggcatgcgcctgctgcgtcgggcagacttccacgtgggtgcccacgtgaacacgttctggaggaccccgtgccggggggccactgaagggctcagcaaaaagtcggtcgtgtgggagaataagcacatcacgtggtttgccaccctggacggcggcatcgggctgctgctgcccatgcaggagaaagacctaccggcggctgctgatgctgcaaaacgcgctgaccaacatgctgcc

SEQ ID NO: 188656 - DNA, 853 bp, Homo Sapiens
gaaatgctcttcatgacgtcgggctgccaggatgaagttcttgacgctgatcatctggtgtatgtagagctgcgtgtcgatgaaggccatgcccgtcagctcgctggcccgcaggctccacaggaaaatcttctggccgatggccgacaccaggtggccattgcagtggcacagggcggtcacgggccccttctgctccttctcgtaaaggactttgaacttgttcttggtcaagggctggccaggctcgggcaccacctcaatcacatccatgatcaagatccgccctcggcacgtgacctcctccccctgcatgaggcaggtcccggcggccacgtagcctttgaggcccgacacggtctcctcactgcgcagagacactgtcttcatgcaggtcacatgctcccactcctgcagctcgatcctggcattgggaatagcctcccagctgaccggggagatgagctggatggagaaggcctcctgctgggggtggatgtaccgctcatctctctcgatggtctcaaactccttctcctcgccagtcatgcgtgggatgcgggcacacggcgtgttggtgctggtggccacagcatacaccttagactccacgtggtaagccacatagtgggccgtgcagcgcagcgggatcttcctgacaggccatggggcatcataggacaggtaggcaggcaggacactgatcctcagctcgccctggggtgggggcacaggggtcaggggatccagggctagccaagggcaggggcaggcaggcccaggccgccaagagccctgggatgttgccctcagctctgtgggagcaggggtgggtgaggggcagctgtgccaa

SEQ ID NO: 188657 - DNA, 1955 bp, Homo Sapiens
aaaggactttggaacttgttctggtcaggggctggccaggctcgggcaccacctcaatcacatccatgatcaagatccgccctcggcacgtgacctcctccccctgcatgaggcaggtcccggcggccacgtagcctttgaggccccgacacggtctcctcactgcgcagagacactgtcttcatgcaggtcacatgctcccactcctgcagctcgatcctggcattgggaatagcctcccagctgaccggggagatgagctggatggagaaggcctcctgctgggggtggatgtaccgctcatctgtggggaccaagggtgacagtcagagtagggcttccccaagatgcggctgaggatgggagtatggtgtgggcgtcaccacctctctcgatggtctcaaactccttctcctcgccagtcatgcgtgggatgcgggcacacggcgtgttggtgctggtggccacagcatacaccttagactccacgtggtaagccacatagtgggccgtgcagcgcagcgggatcttcctgacaggccatggggcatcataggacaggtaggcaggcaggacactgatcctcagctcgccctggggtgggggcacaggggtcaggggatccagggctagccaagggcaggggcaggcaggcccaggccgccaagagccctgggatgttgccctcagctctgtgggagcaggggtgggtgaggggcagctgtgtcctggcgaggtcctggaaggggctgccactcagcctctggggctcctcctgtccattttcccacgctcagctggggctaggggtgctggccacaggggatgggaaagctaggccaggagggcactggaggctgcaaagggcagcccacagactgccatgctggggactgaaaaccaggcagagggagccagggctgccctctttcatggacagtcctgagtcctcaggcacccaggaagcactcacctcatcccaggcagggtctcaagtgacctggtggtgtggtggcttaaatagggaaccagcatgagaaagcctgtgtcccctcccaaagtcacagagcagccaaggggcagagctagcactcacgtcagctctcctgagaagtgtggaggccaggccctgcgagggcttgcccggcgagccggcagagcagtggtggggaccccaggggctgcagccccagctcccaaccacccctttccagacctttggagcaaccaagtcacaggttccacctcctcgacctcaaccccatcgccctctggacactccttcctggtcctcagggtggagccaatggtcccttctcctgtcccctccccctcagcccccagctggggcagcatcagccagtgctgctgggaaccggccggaccccacctgtctgttgaagtacaggaagccgcggggacagttgacattgtggaatggagcgaaagagtcgaccgggccgtccatggccatggggtgtagccgcagagcccctcggccggtcaccaagagccagtgaggggaggggccgcagatgaagacccctgagtagccataaatatcctcgaagtagcggaaacgcgccacgcggccccgggccccagccccctcctctgcgccgccaccttctgctttcttcttggatggctttggcttcttctcacggaagttgatgttgtgagggaccttcttaaagcggactttgagattgccctggccgagctgagagtcgtgggggaaggcctcgtagataagcagctcttggtccacatgcaccagcaggtagggcctgctctggcggctgcccagcgccaccagcagcacctccttgacgaggggcagctccccctggcgcgtggcctcctccctgcgggcctcgccctgtgtagtgggctgtccaaaggagctgtccacaaggacccgctgccccacagggaagttcttcaccagccaa

SEQ ID NO: 188658 - DNA, 1010 bp, Homo Sapiens
  misc_feature (296)..(309): n is a, c, g, or t
  misc_feature (917)..(948): n is a, c, g, or t
tacaaaaaagttggtggagtttatatcactccaacattatggctttatacaagtgcatagttgcaactgcagcaagtaatgatatctgattaatgtgtataaagccataatgttggagtttatatcactcattcctgtgtacctgatggaagttgcatgttcatgtttaagcagttactgtaacaagaagtttaaagttaattatatcagtttcctaatgcttcatgataggcaactttacccattttgaatgccttaatttaatttttttcaaagtctcatccctgtctgtattnnnnnnnnnnnnnngcgtttaccagctcttaggatgtaaactagctttgtggaagataaatcgtgcactatttttacacataaatagttatatcaatgtcagcctattttgattaacaaatgtttttaaagtattattggttatagaaacaataatggatggtgttggaactaatatatccttgatgtctgtctattattcattcaactctttttacagacctcagtattagtctgtgactacaaaatattttatttgctttaaatttgctggctaccctagatgtgtttttattcctggtaaagacatttgtgattacattttcacacttaagattcaaaatttttcccaaatataaagaaaactaagacagactgtagatgcattttaaatatttaaatatgatcctcagacatgcagctgtgtgtggcagtattttagtaccgggttaagaaaactggcaactgggaagaagtggcctcaaaggcacttaatttgatttttattttttaaatgctgtcaaagttacagtttacgcaggacattcttgccgtattctcatgatcccagataagtgtgtgttttatactgcaacaatatgcagcaatggtaagcgtaaagnnnnnnnnnnnnnnnnnnnnnnnnnnnnnnnnatattatgaagtcttttaacagtctctctttatataaatacacagagtttggtatgatattt

SEQ ID NO: 188659 - DNA, 931 bp, Homo Sapiens
actttgtacaaaaaagttgggagtggatatccccccggagcatttggataatgtgacagttggaatgcagtgatgtcgactctttgcccaccgccatctccagctgttgccaagacagagattgctttaagtggcaaatcacctttattagcagctacttttgcttactgggacaatattcttggtcctagagtaaggcacatttgggctccaaagacagaacaggtacttctcagtgatggagaaataacttttcttgccaaccacactctaaatggagaaatccttcgaaatgcagagagtggtgctatagatgtaaagttttttgtcttgtctgaaaagggagtgattattgtttcattaatctttgatggaaactggaatggggatcgcagcacatatggactatcaattatacttccacagacagaacttagtttctacctcccacttcatagagtgtgtgttgatagattaacacatataatccggaaaggaagaatatggatgcataaggaaagacaagaaaatgtccagaagattatcttagaaggcacagagagaatggaagatcagggtcagagtattattccaatgcttactggagaagtgattcctgtaatggaactgctttcatctatgaaatcacacagtgttcctgaagaaatagatatagctgatacagtactcaatgatgatgatattggtgacagctgtcatgaaactttcttctcaatgccatcagctcacacttgcaaacctgtggctgttccgttgtagtagtagcagtgcagagaaagtaaataagatagtcagaacattatgcctttttctgactccagcagagagaaaatgctccaggttatgtgaagcaaatcatcatttaaatatgagtcaggctctttgtacaaggcctgctaaaggattcaac

SEQ ID NO: 188660 - DNA, 1031 bp, Homo Sapiens
  misc_feature (216)..(239): n is a, c, g, or t
acctgggcccttaaaaaataaccttcgccttatgatacagtaccttctaagtggctttgaattggaactctacagtatgcacccacctaatattacatatattggatctctctgaattcctttacgcatggttgatgtcaacattgagtcgtgccgatggctctcaaatggcagaggaaaggataatggaagagcagcagaaaggccgtagtagtnnnnnnnnnnnnnnnnnnnnnnnngttcgcccattgagccgagagatcacaatgagccaagcatatcagaacatgtgtgctggaatgtttaaaaccatggtagcatttgacatggacggcaaagtacgtaaaccgaagtttgagcttgatagtgaacaagttcggtatgaacacaggtttgctccattcaacagtgtgatgaccccgccgccagtgcactacttacagttcaaggaaatgtctgacctcaataaatatagccctcctcctcagtctcctgaactgtatgtggcagctagtaagcactttcaacaggcaaaaatgatattggaaaatattcctaacccggaccatgaggttaatagaattttaaaggttgccaaacccaactttgtggttatgaagttattggcaggaggacacaaaaaggaatctaaagttcctcctgaatttgatttctctgctcataaatattttcctgttgtgaaacttgtttgagagagactggggaggtggccataaaggggcagagtcttctttcagacccaactcttagagggcacatcaccaggctccacatcacgggaagtgagatggatttcttgggtaacaactcattataaggaatacttttagtttgacagccttatatgacatgaatgaaaactgctgttttaaagtggtttattatgttccatggaagaaactggtcttattgaatgcattgatgaacgttatatgggtttattacagatttaatcacaaatcattttttatgaatgattgagtgaaaatagtgtttataaaggttaataa

SEQ ID NO: 188661 - DNA, 1921 bp, Homo Sapiens
ttggctggtacaagtacctccttttcagctacaacatcatcttctggttggctggagttgtcttccttggagtcgggctgtgggcatggagcgaaaagggtgtgctgtccgacctcaccaaagtgacccggatgcatggaatcgaccctgtggtgctggtcctgatggtgggcgtggtgatgttcaccctggggttcgccggctgcgtgggggctctgcgggagaatatctgcttgctcaactttttctgtggcaccatcgtgctcatcttcttcctggagctggctgtggccgtgctggccttcctgttccaggactgggtgagggaccggttccgggagttcttcgagagcaacatcaagtcctaccgggacgatatcgatctgcaaaacctcatcgactcccttcagaaagctaaccagtgctgtggcgcatatggccctgaagactgggacctcaacgtctacttcaattgcagcggtgccagctacagccgagagaagtgcggggtccccttctcctgctgcgtgccagatcctgcgcaaaaagttgtgaacacacagtgtggatatgatgtcaggattcagctgaagagcaagtgggatgagtccatcttcacgaaaggctgcatccaggcgctggaaagctggctcccgcggaacatttacattgtggctggcgtcttcatcgccatctcgctgttgcagatatttggcatcttcctggcaaggacgctgatctcagacatcgaggcagtgaaggccggccatcacttctgaggagcagagttgagggagccgagctgagccacgctgggaggccagagcctttctctgccatcagccctacgtccagagggagaggagccgacacccccagagccagtgccccatcttaagcatcagcgtgacgtgacctctctgtttctgcttgctggtgctgaagaccaagggtcccccttgttacctgcccaaacttgtgactgcatccctctggagtctacccagagacagagaatgtgtctttatgtgggtggtgactctgaaagacagagagggctcctgtggctgccaggagggcttgactcagaccccctgcagctcaagcatgtctgcaggacaccctggtcccctctccactggcatccagacatctgctttgggtcatccacatctgtgggtgggccgtgggtagagggacccacaggtgtggacagggcatctctctccatcaagcaaagcagcatgggggcctgcccgtaacgggaggcggacgtggccccgctgggcctctgagtgccagcgcagtctgctgggacatgcacatatcaggggttgtttgcaggatcctcagccatgttcaagtgaagtaagcctgagccagtgcgtggactggtgccacgggagtgccttgtccactgtccccctgtgtccaccagctattctcctggcgccggaactgcctctggtcttgatagcattaagccctgatggcgccggtggcgcggtgggcatggttcttcactgagagccggctctccttttcttaaagtgtgtaaatagtttatttataggggtaagaatgttctcacaccatttcacttcctcttcctctcctccagcattctcctctgagcagccttagatagtgtccatggctggagccgaccctttgagtccccttgagtgtcttaagaaccagcccacaacagcctctctttctcctccacatactgcagcctccctccatgcatcccacatacaagcactcccccactccccagcgtggcctcactgtcttctggtcttggtgctactgaaattgtcacccagaatttgaatcctgaccctccccactgcaagcccagggagccccagcccaagatggccacctgaaactgttggccagggctcctcttgtg

SEQ ID NO: 188662 - DNA, 1259 bp, Homo Sapiens
aaaccatccaccaacacacttgtgaaggaggcatggaacgctcacccacacgattgtgagctcatagtagacaataggagcaccagtgttttggtttctcataagcaaccgctgaacatctcctctgttgatttctgagggcaggggaggcgccatcatgtttgtgtccatcggctgagagccatcctgggtcatggggtcttcaggaggcaggtaagcaggtgggggcgtatcagctggcatctggaaagggcttcctgggtctgagctggtgggagagtgagggtaggtgctgctgctgctcccaggagagtttgggtaactgctattgggagagtgaggaaacgggtggctgttgggttgctggaaagaatctggaaaagtggcgttgagtggcatgtgaggctcattttgtcctaagttacggaactgagctaagaggctgtgctgaggattatattcgctgtgtcttggaaccagcacaggaggaagtacagggctttctactctcttatagtggtagggattgatgcagacctccttctgcttggaaccaaaaggaaactcacagcattccagtggttttagttcatggtggctctgaagatcgggccagcgccacacacggcagtaaatgacatgaggcagtcccttccggtgggagacttgcagcctgccatccagagagcggggaatggtgacacagttactcggttgccctgggcagctcaaggccttttccagttcctccatggcacctttctttttcttcagttttttcaccaaagcatcaacagctttctctgcccatttttcttcttcatcgccctgtttccacccaagaagtctcttcacagctggacttgtaaaggaaaataaacttgtcacattcataatgacagcactagttatactccttggatatggtgaaataaagctgtctccaaatgcaaaaggacagcagaagagatttgtttatttacagagaagtctctttaacttcttagtttgaagtccagaagagtagaaattaccattcctagtgtttaaaaaagtaacccagtcagcaccgggttggcggcgcgcccgtccgtgcgggagcacgagtggccgggcgagcggggtctcgcggcccgggtccggacggccgggcgctgcgccactctccgctccccgagcctcggcccgggttgagccgctcggcctctcctttctccgcccgcccgcctgctttctcctggagcctggattgatcccaa

SEQ ID NO: 188663 - DNA, 2796 bp, Homo Sapiens
ttggcccagggccaaaccctggccctcttagctgcacgctcctattttctccaggcccctgccctccacctgcccttgctcacgccctctgcccattatttttcagcctccaatatcgataatgttgtcctggatgaagatcgttctggggctcgccgcctgcaaaacctctggagggaccagcgagaagaagaactgggcgagtattacatgaagaaatacgccaagtcatctgtgggagagacggtgtatggaggatctgatgagctctcagacgacatcacccagcagcagctgctcccaggagtcaaggatcccaatctgtggactgtcaaatgtaagattggggaggaacgggccacggccatttccttgatgcgcaagttcattgcctaccagttcacagacacgcccctgcagatcaagtcagtagtggcaccagagcatgtgaagggctacatctacgtggaggcctacaagcagacccacgtgaagcaggccattgagggggtgggcaacctgcggcttggctactggaaccagcagatggtgcccatcaaggagatgacagacgtgctcaaagtggtgaaggaggtggccaacctgaaaccaaagtcctgggtccgcctcaagcggggcatctacaaggatgacattgctcaggtggactacgtggagcccagccagaacaccatctccctgaagatgatcccacgcatcgactacgatcgcatcaaggcccgcatgagcttgaaagactggtttgccaaaaggaagaagtttaagcggcctccacagaggctgtttgatgctgagaagatcaggtccctggggggtgatgttgcctctgatggtgacttcctcatctttgaggggaaccgttacagccggaagggctttctgttcaagagcttcgccatgtctgctgtgatcacggagggtgtgaagccaacactctctgagctggaaaagtttgaggaccagccagagggcattgacctggaggtggtgactgagagcacagggaaggagcgggagcacaacttccaacctggggacaacgtggaggtctgtgagggtgagctcatcaacctgcagggcaagatcctcagcgtggatggcaacaagatcaccatcatgcccaagcatgaggacctcaaggacatgttggagttcccagcccaggaacttagaaaatacttcaagatgggggaccacgtgaaggtgattgctggccgattcgagggcgacacaggcctcattgtgcgggtggaggagaatttcgttatcctgttctctgacctcaccatgcatgagctgaaggtgctcccccgggacctgcagctctgctcagagacagcatcaggtgtggatgttgggggccagcatgaatggggcgagctggtgcagctggatccccagactgtgggtgtcatcgtgcgactagaacgggagaccttccaggtgctgaacatgtacgggaaggtggtgactgtcagacatcaggctgtgacccggaagaaggacaaccgctttgctgtggccttggactcagagcagaacaacatccatgtgaaagacatcgttaaggtcattgatggcccccactcaggccgagaaggggagattcgccatctcttccgaagcttcgccttcctacattgcaagaaactggtggagaacgggggcatgtttgtctgcaagacccgccacctggtgctggctgggggctcaaagccccgtgatgtgaccaacttcaccgtgggtggctttgcgcctatgagtccccggatcagcagccccatgcaccccagtgctggaggtcagcgtggcggctttggtagcccaggtggcggcagtggtggcatgagcaggggccggggccggaggggcaacgaactcatcggccagaccgtgcgcatctcccaggggccctacaaaggctacatcggtgtggtgaaagatgccacagagtccacggcccgtgtggagctgcactccacctgccagaccatctctgtggaccgtcagcggctcaccacggtgggctcacggcgcccgggcggcatgacctcgacctatgggaggacgcccatgtatggctcccagacgcccatgtatggctctggctcccgaacacccatgtacggctcacagacacccctccaggatggtagccgcaccccacactacggctcacagacgcccctgcatgatggcagccgcactcctgcccagagtggggcctgggaccccaacaaccccaacacgccgtcacgggctgaggaagaatatgagtatgctttcgatgatgagcccaccccgtccccgcaggcctatgggggaacccccaatccccaaacacctggctacccagacccctcgtccccacaggtcaacccacaatacaacccgcagacgccagggacgccggccatgtacaacacagaccagttctctccctatgctgccccctccccacaaggttcctaccagcccagccccagcccccagagctaccaccaggtggcgccaagcccagcaggctaccagaatacccactccccagccagctaccaccctacaccgtcgcccatggcctatcaggctagccccagcccgagccccgttggctacagtcctatgacacctggagctccctcccctggtggctacaacccacacacgccaggctcatgcatcgagcagaactccagcgactgggtaaccactgacattcaggtgaaggtgcgggacacttacctgggatacacaggtggtgggacagacaggtgt

SEQ ID NO: 188664 - DNA, 1687 bp, Homo Sapiens
aaaatagtttttgcgtgtgtttccttttcccgttgagttccttatactattgggcatgaatgtcccataacctgtccgcccaacattgggatctacagaatttaacattgtggggctctgtgctgacatagtcattcccagggtgggtagggggtcctccgtgcatcatcatggctgggtggtggggatggcttggcaaatatgaatgcattgggaaacgtagtcccctggcatgctctgcaaacctgcaggccggatccccatgtgttgctgaccatccaacacaaagctccccatgggctgaccctctggactatatgctgctccttggctcactgctcgatttgactggtcaatcatgggctgtactattcttcttctggcattaataaaccagttgtttacttggagaattgtaagtcctgtgtcttgcgctaactgtttcttctgctcttcggaagggtacggatgtgtgagatgctggaagagccatgctctcatgatatttgttgctactttggggaaaatgcctcttttcttctggcgttttttgtccttatccggatcatcatcgtcacctgtaccaggtgaagctacactgttgtctaaaccatccccttgctcactgctgttgtctccgctctgggaagcatggcccccactggagggccctggggtgcctgctgagtgggttgaggttgcatcatcgtggtctcgccaagaagaagggttatggtcagcgagatttgtggaggagcctgaaagttcttcatgatctgacttggagctgccgtctctttcatcaatgacgaggtcgatgggcattttccccttcaaacagctaatgtatcggtggcagaagttatcgcacagttcgtggaccttttctaactccaaaagatgaaacctagtacttgtattgcttgtatcatcaaattgtccagctctggatttgagggaaaaagtggcttttcggcgcgaacctgcttggcgaagaccgcgatgtcctcgttgaaggagtcggaggagcagacgtctccgccagccactccaggttcccggggagtgcaggtcgccagctcgcacttctcaaagaccagagctaacagaggaaacaacgggtgcccatagatcgcgtccttgtcccgcttcaaggcgtcgttgacagcggatcccatactggccggcatgacattggggtgcggggcgtgcgcgccgtagtgctgtgtggcgtggagcggcggcccgtggttcaggtggtgaaccggggggatcggccgcggcgcgtgagggtctccgtacatggaagcgggaacccctactccgtccatcccgccgtaatggggcagctcatcgtattctagttcattttcccatcactcccggctcctgcctaactgggtcttgccggggacgtttggcatggcgctctagcttttgttccttttaattccgcggcctccctctcctctgcccgccgattacagcaccccgaaggcttcctgctaacgtccaagggcagcaagctctgcagacggtaccactgccgggctaaattttttattaagtggcactttcttttctgcgcagatccagcaaccttgtcaatactcatttttttccaggaccagaagagaccagcttaactcagagcacactccctccaagcggtgcggacaagggccaa

SEQ ID NO: 188665 - DNA, 1481 bp, Homo Sapiens
actttgtacaaaaaagttggcactccacttcactgtggcagttgcagcaggaaatgttaatgcagttgataagcttttggaagctggttctagcctggatatccagaatgttaagggagaaacacctcttgatatggctctacaaaacaaaaatcagctcattattcatatgctaaaaacagaagccaaaatgagagccaaccaaaagttcagactttggaggtggctgcagaaatgcgagctcttcctgctgctgatgctttctgtgattaccatgtgggctattggatacatattggacttcaattcagattcttggcttttaaaaggatgtcttctagtaacactgttttttctgacatctttgtttccaaggttcttggttgggtataagaaccttgtatacttaccaacagcctttctgctaagttctgttttttggatatttatgacttggttcatcttattttttcctgatttagcaggagcccctttctatttcagtttcattttcagcatagtagcctttctatactttttctgtaagacttgggcaactgatccaggcttcactaaggcttctgaagaagaaaagaaagtgaatatcatcacccttgcagaaactggctctctggacttcagaacattttgtacatcatgtcttataaggaagccattaaggtcactccactgccatgtatgcaactgctgtgtggctcgatatgatcaacactgcctgtggactggacggtgcataggttttggcaaccatcactattacatattcttcttgtttttcctttccatggtatgtggctggattatatatggatctttcatctatttgtccagtcattgtgccacaacattcaaagaagatggattatggacttacctcaatcagattgtggcctgttccccttgggttttatatatcttgatgctagcaactttccatttctcatggtcaacatttttattattaaatcaactctttcagattgcctttctgggcctgacctcccatgagagaatcagcctgcagaagcagagcaagcatatgaaacagacgttgtccctcaggaagacaccatacaatcttggattcatgcagaacctggcagatttctttcagtgtggctgctttggcttggtgaagccctgtgtggtagattggacatcacagtacaccatggtctttcacccagccagggagaaggttcttcgctcagtatgaagaaaagcaacccaaaactctcaatctgatttgtttttgtttatgtcgatgccctgtagtttgaaagtgaagtaaagatttagaattcacctaagtcctaaggaaaacacgtggtttttaaagccattacgtaaaaaaagttctcaataaaggcattacaattttttaggtttagaaagatggacttttctgataaatcttggcagacatctaaaaaaacaaaccatatttttcacagaaaatg

SEQ ID NO: 188666 - DNA, 815 bp, Homo Sapiens
  misc_feature (355)..(365): n is a, c, g, or t
ttgggttctggcctatgtggcctttgaggtaatcaaggtctgaattagggaagtaggaatagaaagaaagaaacttattgatgtcagtggccagtccattaagtggggaatccaaaatgaagtgatgatgaaaaacccaattaagtggctgagcgagcagaagccaggaaatctccaaatatagattcaggtccagaaataggcttcagttttaaggtaccagaagcccaggaactatctgatctaccccatctacccctggatttctgcaagatgttcaaaggacattgcatattatagattctccataaatgtttgtcaagctacacaggaaatatagtaagacatgttctcnnnnnnnnnnncttggcagtcttggattcatgcagaacctggcagatttctttcagtgtggctgctttggcttggtgaagccctgtgtggtagattggacatcacagtacaccatggtctttcacccagccagggagaaggttcttcgctcagtatgaagaaaagcaacccaaaactctcaatctgatttgtttttgtttatgtcgatgccctgtagtttgaaagtgaagtaaagatttagaattcacctaagtccaaaggaaaacacgtggtttttaaagccattaggtaaaaaaagttctcaataaaggcattacaattttttaggtttagaaagatggacttttctgataaatcttggcagacatctaaaaaataaaccatatttttcacaagaaaatgcaagttactttttttggaataatactcactgattaggataaaatgggaatattttcaga

SEQ ID NO: 188667 - DNA, 1168 bp, Homo Sapiens
ggaggagacggagtatggcagactctggaatgccatttgtgtgagttccacctactttctaggcttcagggtaaatggaaaaagtcgcaataggcgaaatgtatttcctaaaaagctggacagaggtatgtgacattccctttgcttaacaagcaaaacaaaatcaatgagtctggtgaactgacgccatgacagcaatgtggagaagactgggagtctacactgggaatggtgctgtggacgctctgggcacaggagcccaatttggaacctcttctcagaagcatgggaggtggtggaggccaagcccaccagaggcggggcctctccccagctgcctcgggatcatctctggttctcctgggccaggctccatggagtcatcaatcctcagtcacaggtggaggaatgagctgcagctggaagttctcattctggaagatgctgttgaaagcaggagcactctgcgagccactgaatggcctatagctctcgctgctgcgattctgggagagttccgtgaggagagccagcctggagcttcctcggtagagacggcaaagctgatcaaatgcttgggtttgctgtggatccagaacaggttctgaggttccctttttagcagtgggatcccctttggactgatgatacgatggagacatttttacctgtgatggggttatccttccctttttaatttcagatgaattttcactgagttttcctactttgttacttgaactgcatttgtagcatgtccatcttgtttggccctcaaattccacagtgcattctttgttttgtaggcagaatgagtgatacaaatggccacagctaaagacaattatttcatcagccatttcttggcgtctcttgtactgctgcaaacatatagagcagtaatcttgtttgggattcagtcctctggtgaccgaagctctcaggttacacaatgaccaatggagatcttggtttagaaggctggttgttgtttccagcagggtttgttcatagttaaaggtatctaacattcccaagataagtccctggatttctccaagttttccttttccataaactggatcctgtaagattctttgcaagattgatggaagggcaataaatgctgccatgctatttaaatacttttgcagaggggtcaaagacc

SEQ ID NO: 188668 - DNA, 1266 bp, Homo Sapiens
ttggatccgatcctggaaagactcttctctgcccccacacatcttggaggtcattgataagtgtggctacaaggaaccaacacctatacagcgtcaggcaattcccattgggctacagaatcgtgacatcattggtgtggctgagactggcagtggcaagacagcagccttcctcatccctctgctggtctggatcaccacacttcccaaaattgacaggatcgaagagtcagaccaaggcccttatgccatcatcctggctcccacccgtgagttggctcaacagattgaggaagagaccatcaagtttgggaaaccgctaggtatccgcactgtggctgtcattggtggcatctccagagaagaccagggcttcaggctgcgcatgggttgtgagattgtgattgctacccctgggcgtttgattgatgtgctggagaaccgctacctggtgctgagccgctgtacctatgtggttctggatgaggcagataggatgattgacatgggctttgagccagatgtccagaagatcctggagcacatgcctgtcagcaaccagaagccagacacggatgaggctgaggaccctgagaagatgctggccaactttgagtcgggaaaacataagtaccgccaaacagtcatgttcacggccaccatgcccccagcggtggagcgtctggccaggagctatcttcggcgacctgctgtggtgtacattggctccgcaggcaagccccatgagcgtgtggaacagaaggtcttcctcatgtcagagtcagaaaagaggaaaaagctgctggcaatcttggagcaaggctttgacccacccatcattatttttgtcaaccagaagaagggctgcgacgtgttggccaaatccctggagaagatggggtacaatgcttgcacactgcacggtggaaaaggccaggagcagcgagagtttgcgttgtccaacctcaaggctggggccaaggatattttggtggctacagatgtggctggtcgtggtattgacatccaagatgtgtctatggttgtcaactatgatatggccaaaaatattgaagattacatccaccgcattggccgcacgggacgagcaggcaagagtggggtggccatcaccttcctcacaaaagaggactctgctgtgttctacgagctgaagcaagctatcctggaaagcccagtgtcttcctgtccccccgaactagccaaccacccagatgcccagcataagccaggcaccatcctcac

SEQ ID NO: 188669 - DNA, 1562 bp, Homo Sapiens
  misc_feature (1276)..(1311): n is a, c, g, or t
ttgggctcgctccgctcgtcccgctcgtcatggcctacccgggatacggaggagggtttggaaattttagcattcaggtgccaggaatgcagatgggacagccagtgccagaaacaggcccagctatactcctcgatggatactctgggccagcatattcagacacttattcctcagctggtgactccgtgtatacttacttcagtgctgttgctggacaggatggtgaagtggatgctgaagaacttcagagatgtttgacacaggctggaattaatggaacttactctcccttcagtttggaaacctgcagaattatgattgccatgttggatagagatcacacaggaaaaatgggatttaatgcattcaaagagctatgggcagctcttaatgcctggaaggaaaacttcatgactgttgatcaagatggaagtggcacagtagaacatcatgagttgcgtcaagccattggtcttatgggttataggttgagtcctcaaacattaactactattgttaaacgttatagcaagaatggcagaattttctttgatgattatgttgcttgctgtgtgaagcttcgagcattgacagatttctttaggaaaagagaccacttgcaacaagggtctgcgaatttcatatatgacgattttttgcagggcactatggcaatttgaatgcttagaattttaaacctgaagagacactgtgaattcttttgtttggaagaagtgaactggactactttaaaacttttaagggttttctatgttcttcctacctgttaaacctcttccctttctgtgtgtttttattttagcagatagttcaaagcaataaaaggatttcttttttaatttgaggtattactgcttttggaaaagttattttataaatatgtgcatattgtcataaaatattgtatgattaattgatttaaataatgcttagccttaattttagataatgtaaatttagaggaatgtactttacaagatagattgtataagaagccaaataatgaaagcctagaaaaaactaatttatacttatctgaaggttacaaattagacttttaaattttctttgtagttggtggtgtttgagggttggctagaaatgaaagcctggattttgtgccatgtttgtaatatagtttgttccttgatcaaataatcagagaaaagaaacttaaagatctttgtctgtgaagaagaaaattatctccctagttcaatctgtagtgaaataagactacagaaggcattgnnnnnnnnnnnnnnnnnnnnnnnnnnnnnnnnnnnncttaaatatgttttattgtcttctctaagcaaaaagttcttaataaacatagtatttctctctgcgtcctatttcattagtgaagacatagttcacctaaaatggcatcctgctctgaatctagactttttagaaatggcatatgtttttgatgatatgtcaacattcaaaattgtcctaattaaaattgttgtttaaatgtaatgtcaactctttataaacttaaaaataaacaagtaattatccactct

SEQ ID NO: 188670 - DNA, 899 bp, Homo Sapiens
aataaatttaaggaaaaacaagaatatatattctatatttttttaacttatgagaatgtgttcatttcatttgtaacatataatgggaaacagtaatacgtactctgagaaaaattgcaaagcacagataaatggaaataaacaggaaaaagaatcacctataacctcaccatccatagacagacactgttaaaattttggcatatttcctgctgattttttctactgctgatttttgcacaggtgagataattttgaacagagaattttgtatctttggtttttgtgttttgctgcacacaaaaacaaaagatataaaaatggatcataaacatttttctaaatcctgaaaaatgcatagacatattttagtgcctgtatttcacaagatggacataccataatttacttacacagtcctttttgttagatgtttaagttgttttcaagcttctcagtgctggaaaaaatactgagatagacatgtttagttgaagttatttcatttcaggttatattatcttgggtcagagaatgaatggttctcaggcttttcaaaagagctggtcagtttttatgcctctggcagtttttgagagtgctcaatcatactacactgttgccagcattagatcttatcacatttaagtcattgctaattttataaacaaaaacaatggttttactttgcatctccctgattggtattgctgtaaaacatatttggagaagtttgtttgtctttggtgtttatttcatgaatagattgtgtgcccattttctcttggggtattcagttttttattactgatgtgagcatgtgtatgggtgattatttgatgattatcagttttgcttagtagactggcaatatttagtcttgctgtcactgtgttccc

SEQ ID NO: 188671 - DNA, 1556 bp, Homo Sapiens
  misc_feature (1142)..(1174): n is a, c, g, or t
ttggatatttttattggaaaatgttagggtagaggcctgagaaagttagcaaatgctattgactgatactggctctgtgtcttccagtgatttttagtttggtttttacagtcaagcctactgcttgcaattaagatatcaatctgaaatgcatctgtaattcctggccacaggtccttattgccattatttttaagtatcttcattggagatgaacactgacttttgcatatggtctcttacctcagggaagatcacttgctagcaactcatactactaatgacaggtttttgagaattgtactgacatcacatgttagctactaaatgcaaaatgtataaaagtattgttttatgtagttacctaccaatactatctgctactgaataactctctaaatatgtagacctcactaataactaacctttaggtaaaaaatttacttctgtcattaattacacttcaactggtcaatatagtggcagcataaagtgtttatttcagaatatcaatacagttttgtcttcatttttcaacagtaatttcaattggttcatacttaaaatactacacagattttgagttttatggttctcaaagcaaggtttccatcttaagatttttataaacacaaagcctttgcaaaattggattaaattccacctatcttaatgtgaattaaaaaccaccatttataataataatagcgccatattctaagttgagtaaatgcatcctaccattcaaggttatcatataatttaacaaaattgtacaaccttaaggctcttcacagtataaattaatttttcaaaccagagctgttcacatgaaaatattccttagtagaatgtatatttaagaaataaaacaacaaaggggaactatatcacccatgtaagttatagagttaattacaagttctaccattcctgataattctctgagatgctaagtgtttcagttcatatttaatgatacttaaatcgtgggaattttaatgtttgttccaaaatagcagaaattgtaaaaattatgaattattggagaaaatgccattacttgtatatctgacatttaattttttaattatggagactacatgcttttgtagtataatattaatgattattctcttgtnnnnnnnnnnnnnnnnnnnnnnnnnnnnnnnnntttagttgatgttacctgcttgtgagtatcaattacttagtttttaaatttttaaggtattgcctacttttctttagaatgcagaaatctcgtcctgagcccttattatgcctgtggtagagcaatgcaagactgaaaaggttgccagtattttcaggcttatttgactaagaattagtgccaagaactggaaagtctactttttggagggaaatgatacttagaatttgtaaacataagcagtaatagtgtaaatatttagaaaaatagcaagtgctttaactgctcaataaaatagtatagatgttatttcacccttaaggcactggctgttgcccattattttccgatttcgtgattacccaacttttttgtacaaagt

SEQ ID NO: 188672 - DNA, 1318 bp, Homo Sapiens
  misc_feature (180)..(227): n is a, c, g, or t
  misc_feature (279)..(287): n is a, c, g, or t
ttggattcgaaattattggagtcaagagccaggaagccagccagaccctcctggactctgtttatagccatcttcctgacctgctgtagaacatagggatactgcattctggaaattactcaatttagtggcagggtggttttttaattttcttctgtttctgatttttgttgtttgggnnnnnnnnnnnnnnnnnnnnnnnnnnnnnnnnnnnnnnnnnnnnnnnnttaacagagaatatggccagtgcttgagttctttctccttctctctctctcnnnnnnnnnaaataactcttctgggaagttggtttataagcctttgccaggtgtaactgttgtgaaatacccaccactaaagttttttaagttccatattttctccattttgccttcttatgtattttcaagattattctgtgcactttaaatttacttaacttaccataaatgcagtgtgacttttcccacacactggattgtgaggctcttaacttcttaaaagtataatggcatcttgtgaatcctataagcagtctttatgtctcttaacattcacacctactttttaaaaacaaatattattactatttttattattgtttgtcctttataaattttcttaaagattaagaaaatttaagaccccattgagttactgtaatgcaattcaactttgagttatcttttaaatatgtcttgtatagttcatattcatggctgaaacttgaccacactattgctgattgtatggttttcacctggacaccgtgtagaatgcttgattacttgtactcttcttatgctaatatgctctgggctggagaaatgaaatcctcaagccatcaggatttgctatttaagtggcttgacaactgggccaccaaagaacttgaacttcaccttttaggatttgagctgttctggaacacattgctgcactttggaaagtcaaaatcaagtgccagtggcgccctttccatagagaatttgcccagctttgctttaaaagatgtcttgttttttatatacacataatcaataggtccaatctgctctcaaggccttggtcctggtgggattccttcaccaattactttaattaaaaatggctgcaactgtaagaacccttgtctgatatatttgcaactatgctcccatttacaaatgtaccttctaatgctcagttgccaggttccaatgcaaaggtggcgtggactccctttgtgtgggtggggtttgtgggtagtggtgaaggaccgatatcagaaaaatgccttcaagtgtactaatttattaataaacattacgtgtttgtt

SEQ ID NO: 188673 - DNA, 220 bp, Homo Sapiens
ttggggcggcgtcggcgccagttatttctgtcccgccccccggcctcggctctttctgcgagcgggcgcgcgggcgagcggttggcttgtgcttgtggcgcgtggtgcgggtttcggcggcggctgaggaagaagcgcgggcggcgccttcgggaggcgagcaggcagcagttggccgtgccgtaacagcgtcccgcgcgcggcgggcatcggcccagga

SEQ ID NO: 188674 - DNA, 862 bp, Homo Sapiens
ttggcccgagagggtcaggagaaaagcggaggaagctgggtaggccctgaggggcctcggtaagccatcatgaccacccggcaagccacgaaggatcccctcctccggggtgtatctcctacccctagcaagattccggtacgctctcagaaacgcacgcctttccccactgttacatcgtgcgccgtggaccaggagaaccaagatccaaggagatgggtgcagaaaccaccgctcaatattcaacgccccctcgttgattcagcaggccccaggccgaaagccaggcaccaggcagagacatcacaaagattggtggggatcagtcagcctcggaaccccttggaagagctcaggcctagccctaggggtcaaaatgtggggcctgggccccctgcccagacagaggctccagggaccatagagtttgtggctgaccctgcagccctggccaccatcctgtcaggtgagggtgtgaagagctgtcacctggggcgccagcctagtctggctaaaagagcactggttcgaggaagtcagggaggcaccacccagagggtccagggtgttcgggcctctgcatatttggcccccagaacccccacccaccgactggaccctgccagggcttcctgcttctctaggctggagggaccaggacctcgaggccggacattgtgcccccagaggctacaggctctgatttcaccttcaggaccttcctttcacccttccactcgccccagtttccaggagctaagaaggagacagctggcagcagccggacttcagtgagccaggcctcagattgctcctggagaccccagtccagcctgctttctctcttcctaaaggagaacgc

SEQ ID NO: 188675 - DNA, 2377 bp, Homo Sapiens
  misc_feature (299)..(435): n is a, c, g, or t
ttggctatcatttaatgtgttttttctttttgtcacacaaagtggcttacctactcatttgcatggtaatctttggttttataggttctggacttaccctggaaactcaaatttagctacattatcttgtttggatgatactttatatcagcaagtactctgaaatcagcctacctcctctctttttttctctgcttctaactttagcttcagttttgagttcatttgtttgtttgttttctgagacaggttctcactctgtcacccaggctggaatgaccttccaggctcaagccatnnnnnnnnnnnnnnnnnnnnnnnnnnnnnnnnnnnnnnnnnnnnnnnnnnnnnnnnnnnnnnnnnnnnnnnnnnnnnnnnnnnnnnnnnnnnnnnnnnnnnnnnnnnnnnnnnnnnnnnnnnnnnnnnnnnnnnnnnccaggagtgaaaaaggaaagtaaaaggcagctgctggcctagatgttggtttgggaatattaggtgatcctgttgagattctggatccagagcaatttctttagcttttgactttgccaaagtgtagatagcctttatccagcagtattttaagtggggaatgcaacgtgaggccaactgaacaattccccccgtggctgcccagatagtcacagtcaaggttggagagtctccttccagccagtgacctacccaaaccttttgttctgtaaaactgctctggaaataccgggaagcccagttttctcacgtggtttctagcttcttcagactcagcccaaattaggaagtgcagaagcacatgatggtgaaaaacctaggatttggcagccttccagaatggtatggaatctgagggaagatttatgtttcgttttggaggatagctcaagttgaattttctttccagccagttaccctttcaacctacccatactttgtacaactcttacacaaatacttagatatttattagatagccctgaattcactctaattataaacagggagtgtaaactgcccccagatgttcctgggctgggtaaaagcagctggagtgaagcactcattttccataaaggtaacaaagggcagctcagtggttactcaagctcaaaagggtttttttaagagcaagcattggttaagtctgtgtatactgagttggaagtgatttcagcacattcttttttagtggagtgaaagttctgaagcccccttttaacttcctcttggtttttcattataattggtagccatctcatgaactgtctctgactgttgtctctttgtggtcatgtgattgtgagcttgctttctgacttgcatttctgactttatcctgttgttaggaagatagaaactaggttttgaaagattacatgattcaagcgagggattttaaagtaaagatgtatttattctgaagaatctaaaagataacagattatttgcttatgaaagaacaatatagtctgggaatcccagaatgtcaagccaaaggtctaagaagtcatctccttcaaatactttaataaagaagtatttcgaggagatatctgtccaaaaaggtttgactggcctccagattccagttatttttaaaaagcaacttaccactaaatccttgagtctccatagagtaacagtaaagaaactgatgtaacagactctcctctcaaaggatctcctctggaagagactatcagcggcagcattctccagggaagacccatcccctagtgccagagcttgcatcctggagactaaagattgcacttttttgtagttttttgtccaaatgcaatcccatttctgtgcctcttagcatgcagttagatttggacaaacaagattcctaaggaatgactttattaactataatatggttacagctattatataaatatatattctggttatagttctaatatggagatgttgtgtgcaatgctggcctgtggtggtctgtgtaatgctttaacttgtatggaggaggccaggctcagagctgagatgtggcctgaaccttccctgtatcgatcctttaatttagaactgtcaagatgtcactttctccccctctgccttttagtggtatctgacatatactcaaaacagtaatttcctggtcacatcattaactgctaattctgtatttataaagaattttcagatggacatgtacaaatttgaactcaaaccatccccagtccagatacagggcagcgtgtatgtgaccacaccagagcctcagcctcggtccttctcagccgtcgggatagatccaggcatttcttttaaatctcagaggtagcagtaaacttttcagtattgctgttagcaagtgtgtgtttgccaatagatacccattatactaatg

SEQ ID NO: 188676 - DNA, 1611 bp, Homo Sapiens
  misc_feature (53)..(70): n is a, c, g, or t
  misc_feature (303)..(329): n is a, c, g, or t
ttgggtaacacttaaagcaattttctcccattgtgcgaacattttattttttnnnnnnnnnnnnnnnnnntatttttccccctaaaataggagagagccaaaactgaccaaggctattcagcagtgaaccagtgaccaaagaattaattaccctccgtttcccacatccccactctctaggggattagcttgtgcgtgtcaaaagaaggaacagctcgttctgcttcctgctgagtcggtgaattctttgctttctaaactcttccagaaaggactgtgagcaagatgaatttacttttcttnnnnnnnnnnnnnnnnnnnnnnnnnnngagtttctggctgatgggtgactcaaagtgcaggactgcctggccgtggggcaaaggggtttgcccttctcggagggtacctcctgttccctgtctgagcatcctgcatggaagtcaaaggaaatccctttcttggtgacgacttaaatctgggttccctcagacattgggttgcaccccaacaaatattaaatggcttcttcttaaagcccagagaaagaggttttttaaaagactgtcgccaaatagctgagccaaaaggctgatcagaattcactttttggaatgtggcagttaaacactaccttgatcattctctcctctttcctcgaggaactcctggagggtttgagcgtctggaaactctctgctctgacccgaggaagcaccctcctgacgccgccttcctccggttattgaaaggacgcctcagaaatgctttgttttcttttacgatgtattcagaagcctttactgattaaagttttcttttatttgggtggccgggagagacccagggaggttctggaggttcctttctgtctcctggccccaccagggatttccccatttctgtttgctgcctgaaagcaggatgaggaaggccaaggagagtccttgcacccgtgagcgtcaggatgaggaaatgacaggaggaagacgtgggtttgggttagtggctgctggcgttttggcccttggtgtttctggagcctccagggatctaggggagcctgggctgcgtgcatgtcgataagcagagctgttcttggggagaaggagggaggtctcgggagtgtagcaccatgccaaccagccctgcgcgaagacagagtgagccacgcccggatggcagggcatgtttctgttttggtgtctcactttcctcccagcgtgacttatttggggattcctcagggcctactggaatgtgactgcccactgcccagctgcctcgggtacaagtcctggccctatgtcccagctgtcaggggctcagggaatcctacccagccacctgtcctgggatggagtgtcagcatccaccccttggttgtcatcgaggccgccctcccagtcctgggtgaagatatttgggccaccagggctcccttggccccttcacgtagaaatagacacgtgctttttaatgcaagacactttgagtgttacaaaatctgtagaccctggcagtaaggtcatgatgttgggaaggtgtagtgccctaaggttggtgacagaaaggacagacacttgtgcacaggtgtctttggtgatgggg

SEQ ID NO: 188677 - DNA, 1019 bp, Homo Sapiens
ttggcagtggtcttctccatggtgagttagtggaagacataccaggaggtgaatttggtgaacaaccaaatgaacagcaccctgtgtctttggctccattggacgagagtaattcctacgagcacttgacattgtcagacaaagaagttcaaatgcactttgccgaattgcaagagaaattcttatctttacaaagtgaacacaaaattttacatgatcagcactgtcagatgagctctaaaatgtcagagctgcagacctatgttgactcattaaaggccgaaaatttggtcttgtcaacgaatctgagaaactttcaaggtgacttggtgaaggagatgcagctgggcttggaggaggggctcgttccatccctgtcatcctcttgtgtgcctgacagctctagtcttagcagtttgggagactcctccttttacagagctcttttagaacagacaggagatatgtctcttttgagtaatttagaaggggctgtttcagcaaaccagtgcagtgtagatgaagtattttgcagcagtctgcaggaggagaatctgaccaggaaagaaaccccttcggccccagcgaagggtgttgaagagcttgagtccctctgtgaggtgtaccggcagtccctcgagaagctagaagagaaaatggaaagtcaagggattatgaaaaataaggaaattcaagagctcgagcagttattaagttctgaaaggcaagagcttgactgccttaggaagcagtatttgtcagaaaatgaacagtggcaacagaagctgacaagcgtgactctggagatggagtccaagttggcggcagaaaagaaacagacggaacaactgtcacttgagctggaagtagcacgactccagctacaagtctggacttaagttctcggtctttgcttggcatcgacacagaagatgctattcaaggccgaaatgagagctgtgacatatcaaagaacatactttctgaaactacagaaagaacaccaaagcatgatgttc

SEQ ID NO: 188678 - DNA, 1135 bp, Homo Sapiens
  misc_feature (211)..(282): n is a, c, g, or t
gcattagtttgatcagttgaaaatcagaaccttcaaagcatctgtgaatgagagaaatggaactggacctgggcaaggcatggggatggtagagatccatatgaataaatgatttagctgttgatgtggacagcaagagagttggtgggaaatgttacagcagacctgaccacgctacaaagggtctgtgaagaacacagtacaggtatcnnnnnnnnnnnnnnnnnnnnnnnnnnnnnnnnnnnnnnnnnnnnnnnnnnnnnnnnnnnnnnnnnnnnnnnncatttcacaggttcaaagttcaagggaagtaaacgtctttaaattatttttgtcagttcaaccctgatttaaaaatatggctagcaaaaacaaggaagccacagctgtcgacatcctgagcaagcatcggtctcctttgagaagctgcactcccaagcctcttctcaagctgctacacgaggaggagacacttctctcttgaattccatctcagttctctttatttccacactcttggaatacatcgattgctttccattttggtgtctacagttctggctgctatagatttagacgtggggatactggaggagggaaggcaaattctcggaggatgctccgggcaacttcgacattattctgggctatctctaaggctctcttcacctcttcaaaggcataaccctctcccatgagttttgcaatttttgcatcgacattttccaatgccgcctcaggcccatggggttttctgtggtgaatttctggtgcagtcctgcgcggtcgtggtttagggggtctggctggtgcctgtgaaccatctgaacatgaaggaagctgatcatagtcctgtgatgttctgttagttttgacattttcacctggtaaccttctagcaggaggcaaaggaacttggccacttgctagatcaacaaagggatcttaaaaataaaaacaagtttcaaattaaaaggatgatctctgttgattggctgaagaaaaaaattctagaattattttatgaagattatggctttcaaaaataaattagaaaattaaattcatgactgatattaaccattttttactgcctgcatattttgtaatttattcccaacttttttgtacaaag

SEQ ID NO: 188679 - DNA, 1613 bp, Homo Sapiens
  misc_feature (972)..(1011): n is a, c, g, or t
ttggatctagtgccagggtaagaagtgtctgaatttctctcttccagcagatccatcccctgcagggactccagaatgttctccacacaatacctggagctctcaacctttcttggttcagacacacacatacacaccccttgagtaactcagtatcattttgtagttcacagaaggatgtagtccctggcattttggtttgcactgtagaatccatagccttgtcactttgttatgctctggaaatgtactgatttcttacttgggaggaaacttgtgtaaggagatgtgcaaaccaccctgaaagccatgtgcatcctcacctcttccattaccccctccatgagctcgaagcgacattaagtagagggaaatgcttttaacaaatgctgctcatgtggatctgtcagctattgcttgcctagatttgggcacccatgaagcagggttggaatggatcattttgaattgcttctttgcagacacccccttcgcccccatctttaagataaaccctttactagtcaagaagcccttttcagttggatctcactgatcttgtatagtgacgacttcctttgaaggaagaagcttgattataagtgcatgcatattatccacccaccttctgatttgggcactgttcaccttggaattttatttattttgtttatctggaggccctttttctatcagtctctgatccctcatgggttctgcctgcccttgtatctcttgtacaatgctcccaaagggctttgctgatctctgcacttctttcctgggacactccccccaccaccaccctttgcacacaccagtgaccaaagtgtatgcagtgatctcacagaagacatcaaaaatggtgcatgcaccgtgaatgtgctcacagagacacgtgcacaagattctgcacccttggccttaatctcagtatgacttaaggtgcaggaacatttttaacaggttttnnnnnnnnnnnnnnnnnnnnnnnnnnnnnnnnnnnnnnnngcagatacaacagctcaactgttcccactcctaactctccactatgtgcttataacttcacattctatgccctccccgccacccacctcatccctgttctgcgtaaccaaaaaacagacaacaaaagcaacctgaggagaggtttctggactattttatctgtctccatttagatggagatataaatgctgctttgggttccataatcctagggggctatgtttacatagtaaaatacatcctaccaaatcaggaaacagtgaataatgggagtcacttcacagagacgcaggaggacctggggggcgtagcagaggaggataggtagagaagtaccattttaattatttgtgacttgtggcttccttcctcctctcctcctccctccacgtctctctttgccccctttagacagaaaatgcagaaaagggcatcaaaaagaggctggattttttaaaaggcagctttccaactttgcacacaaacaggtaacaggaagtacagcaaaaatcctctcatctgaaacactgtcagcagaaacaaaacctgtaaaaatgactaatcagctgcacatattgatgctctctgcaagttacctttaa

SEQ ID NO: 188680 - DNA, 1124 bp, Homo Sapiens
ttgggccgagagaagatctgtgatggctgcagcccaggttgcaggcttaaattgtttaaggttgatgaatgaaactactgcagttgcactggcgtatggaatttataaacaggatcttcccccattagatgagaaaccaagaaatgtagtatttattgatatgggacattctgcctatcaggtcttggtttgtgcttttaacaaaggaaaacttaaagtcttggctactacctttgatccatatttgggtggcaggaactttgatgaggctttagtagactacttctgtgatgagttcaagaccaaatataagataaatgtgaaagaaaactctcgggccttgttggcgtttatatcaggaatgtgaaaaactaaagaagctaatgagtgcaaatgcatcagatcttccattgaacattgagtgtttcatgaatgaccttgatgtttctagtaaaatgaacagggctcaatttgaacaactgtgtgcttcccttttggccagggttgaaccacctttaaaagcagtaatggaacaagctaacttacaacgtgaagacattagtagtatagaaattgtaggaggagcaacacgaattcctgcagtgaaagaacaaatcactaaattctttcttaaagacataagtaccacattaaatgctgatgaagctgttgcaagaggatgtgcgttacagtgtgcgattctctcaccagcatttaaagtgcgtgaattttccataacagaccttgttccctattcaatcacattaaggtggaagacctcttttgaagatggaagtggggaatgtgaagttttctgtaagaaccatcctgccccattctcaaaagtcattactttccacaagaaggaaccatttgaactagaagcattttatactaatttacatgaagtgccttatcctgatgcaagaattgggagcttcactattcagaatgtttttccacagtctgatggtgatagttccaaagtgaaggttaaagttcgtgttaacatccatggaatcttcagtgtggctagcgcatcagtaattgagaagcaaaatttggaaagcgatcacagtgatgctccaatggagacagaaacttcatttaaaaatgaaaacaaa

SEQ ID NO: 188681 - DNA, 1238 bp, Homo Sapiens
ttggggggcccaggcgttggtcctgggggccaggccagggctggcagtggttggagatgggtggggccgggacacacagggcagggctgtccggcagggccatccggcagggccgcggccccagggctgcgccaggttctcaggccaagagggagctgtgcccaccaggcggggctgtgccctgaggagagcttaactgtctgtttccttgctcttagccctgacgaagagtcctcccaaaagttcattccctttgtcggggttgtgaaggttggaattgtggagccatcctcggccacatcaggcgactcggacgacgcggccccctcgggctctggcacgctctcctccaccccgccgtccgcatctcctgcggccaaggaggcctcacccaccccgccctcctccccgtcggtgagcggaggcctgtcctcccccagccagggtgtcggcgccgagctgatggggctgcaggtggactactggacggcagcacagcctgcggacaggaagagggacgccgagaagaaggacctgcctgtcaccaaaaacacgctcaagtgcactttccggtccctccaggtcagcaggctgcccagcagcggcgaggctgcagccacgcccaccatgtccatgaccgtggtcaccaaggagaagaacaagaaggtgatgtttctgcccaagaaagcgaaggacaaggacgtggagtctaagagccagtgcattgagggcatcagccggctcatctgcactgccaggcagcagcagaacatgctgcgggtcctcatcgacggcgtggagtgcagcgacgtcaagttcttccagctggccgcgcagtggtcctcgcacgtgaagcacttccccatctgcatcttcggacactccaaggccaccttctagccccacccaccagggggcccacctcctgccccatgctgtgaggggcccagctgcatttctgttaacatttcagtttactacagagacagacgcttaaaacacaaagagaaacagtcttaagtatgaatgtgctcacaacgtggaaactaacgggggagctcctgccaggagccgaataactgctctgcttattaacccgaacgttcggcccggggctgggaagccagaaaggacgatgctgagcccatggatcgcggaaggcgtcctctggcctcggagccacccagagcctcacaggctgagttctatgcctctgtgtcctgtccttcctggaagtc

SEQ ID NO: 188682 - DNA, 1737 bp, Homo Sapiens
  misc_feature (1198)..(1223): n is a, c, g, or t
  misc_feature (1355)..(1366): n is a, c, g, or t
  misc_feature (1409)..(1453): n is a, c, g, or t
tatatataaaataagtcaaatgaggaattgaaatactgtttttaattgtagctaacccaagtacactgcctctccacctgccacccccaccccaacaaagtatgtgtgtgtgacttaatcagctttaatttctaccctaggggaaattaattgcaactaaaaaccagaaaatagctttaactaggttttattggtttgtattggtttttagctgtaataaaaataaggtggataaagaaacaaatatctttttatcaacatatttggaataaaaactgtatggtgactttggggtttatattagctattcaaactctttgataattgatctttcaattactattggtgagacaaaaaaattcaaccaaagccaaagaaatgtcttgtttaatgttcttaaatatttcaagttaaagtaaaacaaatttgctaggtatgttagtgtacagattgaaaaagacatgagggaacaaagaaaagtacactagaattatgttttagttttcctttggtattaagagatatattatctctttcaaatctattctgttacttaaaaaatatcaataatgtaatgatttttcttaagaagggtgagaatacaacagctgacacctgctttgtgtattaagaaaaatatggttaaaacattttacttcccataatgatttacctatcataatgatttactttcatggaaaactgaaccattatatcatttaaatatgttaatagattaaggacatcagactttgttttccaattttttcttctgtgggagtataaatatggggacatgactatgggactatatattttcacattgttagcactttgttagtacaattacttttaggtattgtcttttagtagcattattaaagttaaaaaataaaggaaacagaagtaaagagtttatagaaggatacacagaaatacggtacttatctctgagtggtgacattagaatgggtttttcattctatcctttttactttatttatacattgcttatataacagatatcattcaagagcaatgaagataactgtataatgctatggcgtcaacttaccttagcatacaaccaacttgataataaataatggtcaaatggccaaacctaccaatccacagagatcattcaaatatctaaaatgattatggatcagacatacagaataccaaacataggatnnnnnnnnnnnnnnnnnnnnnnnnnntttcccatgattaaagccaaggctttaaagaagacacactttcttaggtattttcaactaaatgttatccacctcaaaagtgtttaagctcatggaatgtccatagattccagaaaatttgtgcaattctgnnnnnnnnnnnngagatggagtctttgctacattgccaggctggctgagtatctnnnnnnnnnnnnnnnnnnnnnnnnnnnnnnnnnnnnnnnnnnnnnatgtgcccagcttaattctgctttttatataatacttcccactaggcataatctaattgcagtgtgggtcatcttaatataaatcagtaatctaaaaacattttaaacaactaatttggtgacatcctagaaaagtatgcatagtaacacaaatcccagaatatatgactctgatttatataacaaaatttaaccaattagcttttctatttaatgctttaaaataaaatgaggaataatttgaaaattgaataaacctagagaaattgtggcattctatccaa

SEQ ID NO: 188683 - DNA, 1351 bp, Homo Sapiens
ttggcaactatatcacatggagaaactgaggcacagagaggttaaagttacacagcttagaaacatgttcaaccaaatggcaaagtgggtgaaacaggacaatgaaacaggaatttattatgagacatggaatgtaaaagccagcccagaaaagggggcagagacatggtttgattcctacgactgttccaaatttgtgttaaggacctttaacaagttggctgaatttggagcagagttcaagaacatagaaaccaactatacaagaatatttctttacagtggagaacctacttatctgggaaatgaaacatctgtttttgggccaacaggaaacaagactcttggtttagccataaaaagattttattaccccttcaaaccacatttgccaactaaagaatttctgttgagtctcttgcaaatttttgatgcagtgattgtgcacaaacagttctatttgttttataattttgaatattggtttttacctatgaaattcccttttattaaaataacatatgaagaaatccctttacctatcagaaacaaaacactctctggtttataaaacaccttaattctactgctcttttttctccaatcaccagcatctgtttttcagggggtgattttacttttgtgaattccttagcctttcttccttggtgcataaagttaaaatgcacatcagcagaattgctgcatattaacatctcaggactcttctcttgtaaagaagctgaaattcgtactatattggccaaagtgagcgagttaggtgatcttggtttcaatttccgagcctttgttaatatggagaattatggttcatatcagttatgtaggacctttggacccagggtcctacagatagatatggtgtgcccagattttaaaaataccttcaaaaataaaaaatacattcagtgacattttcatggtgggagctcttctttctgatatggcagttacactttttcacttaagtgctttagtttagactaactttacaacttctataacttttggaaccaagtttagtatagtctgattacattccattcacctaactttagacattcgtttagacaccataactggagtgattgtgcttctagatgtggcaaatccagtgttaacacatatttctggctgagattttggaactagctagtaactggcttgtgttctttaagcatactaacatcactaaatcttagatttacgattgctgtaaagatgtaagttgtgtatgtttggcagtcacattgaatggcagtgataatgattaatcaaagaacaaatgtcatccttgatcttgcctaatgtagtttatgtgccaaacttt

SEQ ID NO: 188684 - DNA, 868 bp, Homo Sapiens
ttggctcatatcatgagcatgtttgaaatggcattacttctgggaagtttttataataggaattcttctgtgtctttgctctcttaattttacctattttgtctaaatgtcattgcaataagcttttcagaagaaagaaacctagaaaactggaagattggtttgtagataaaacatattggatggcttcttatttcatggttgtgctaaaatagttttgtatgtgtgtgctttagatttcagaagaaagtggtagcttcctttccaagaacagttctgagcacaggaatggataaccggtacctggtgttggcagtcaatactgtacagaacaaagagggaaactgtgaaaagcgcctggtcatcactgcttcacagtcactagaaaataaagaactatgcatccttaggaatgactggtgttctgttccagtagagccaggagatatcattcatttggagggagactgcacatctgacacttggataatagataaagattttggatatttgattctgtatccagacatgctgatttctggcaccagcatagccagtagtattcgatgtatgagaagagctgtcctgagtgaaacttttaggagctctgatccagccacacgccaaatgctaattggtacggttctccatgaggtgtttcaaaaagccataaataatagctttgccccagaaaagctacaagaacttgcttttcaaacaattcaagaaataagacatttgaaggaaatgtaccgcttaaatctaagtcaagatgaaataaaacaagaagtagaggactatcttccttcgttttgtaatggggcaggagatttcatgcataaaaacacttcgactgacttccctcaga

SEQ ID NO: 188685 - DNA, 940 bp, Homo Sapiens
ttggctcatgcccagcagcagcaagcagtcattgaagtcaacaagagagacatagtcttcctggggatggctcatctgcactgggactggccaacttcaatgccatccgagacttcattgctaaagtcatccagaggctggaaatcggacaggatcttatccaggtggcagtggcccagtatgcagacactgtgaggcctgaattttatttcaatacccatccaacaaaaagggaagtcataaccgctgtgcggaaaatgaagcccctggacggctcggccctgtacacgggctctgctctagactttgttcgtaacaacctattcacgagttcagccggctaccgggctgccgaggggattcctaagcttttggtgctgatcacaggtggtaagtccctagatgaaatcagccagcctgcccaggagctgaagagaagcagcataatggcctttgccattgggaacaagggtgccgatcaggctgagctggaagagatcgctttcgactcctccctggtgttcatcccagctgagttccgagccgccccattgcaaggcatgctgcctggcttgctggcacctctcaggaccctctctggaacccctgaagagagcaagcgagacattctgttcctctttgacggctcagccaatcttgtgggccagttccctgttgtccgtgactttctctacaagattatcgatgagctcaatgtgaagccagaggggacccgaattgcggtggctcagtacagcgatgatgtcaaggtggagtcccgttttgatgagcaccagagtaagcctgagatcctgaatcttgtgaagagaatgaagatcaagacaggcaaagccctcaacctgagctacgcgctggactatgcacagaggtacatttttgtgaagtctgctggcagccggatcgaggatggagtgcttca

SEQ ID NO: 188686 - DNA, 823 bp, Homo Sapiens
gacaggacgtggcaaggcaacaagatgccttgtgcctggcgtaggattacagccaacagcccttttggccagaattcacctcctcaaggggaggtctccatggaatgaccatgattcccaacatggccagaaaacccatctatcccactcatggggcagatgatcagaggagctgcacttttccctcccgagtaactcagacgaagtagggccggacaggcccacaaaaggtagcatgagagaaagtgaaggtgtgacacctctctgtcacgttgtagaaggagacctcaccagcatcatagtccaagaaaatccccacccgctggagcggggtccgcaggggtagggcagtcattggggaggtaagagcccaatattctttcccataccacaaagacactgcccagaatccattctggggggctgaggttactccaccttttctgcacactgagtcttcacagacacctatggtccacttggctttatctcccacctctacctcccaataatgtctcccggcgatgaagcatggagagcccaagacacagggaaacagattgaacctctcggggttgtcaggcaggtcctgttggaggtaactgtaccgcacttgccgcagattatcagagaggatcaggctggggtaggccgtgtctgggtccagagtcacgtccactgagtataactgagcctctcttaattcttggattttctccatatctgactgcattttttctgtgaactgctttagactctccgtcaagaatagacatttttgggcaaaaagggggattttctctccaacttttttgtacaaagt

SEQ ID NO: 188687 - DNA, 857 bp, Homo Sapiens
taaaactgcccaagcagccaattttattgatagtacattacaaacaatttaacacaatgatgtttttacagaaagccagtatctgaacaaccttccatcgttcaaattgtattttgtaagattaaaaggcttttagtttctaacctattatttacatcaaaaagctttcaaaaagttagagcataactgttaagacataggattttgttcattttctcagtggagagtacagagtacagctgacattctagtgggtctttggaagtacagtaatcctgcaaacatttaaactccaattcacaaacatgaatcaccggaaatcctttgatagtcatacccaacaatacaggtagtctttatcctttcgttaacactgagggaaaaaaacagttgctgttcaactacaacaacataaatctagaaacagaatgaaacctgttccaaatgtttctgttcttataacaaggtgaacactacaggtgttttggggttccttttctgctatcagtaaatgtttgacaatttccaaaagagcaccaagaactgtataccaccatgaacagaatcccttgaagtagattcacttagtctttctccaagcattaaaatgccctataaggtaaaacaaaacattgctataatctaggcaaaaattaaaggttgaatcatttcacataagataaaaataattactaaagaaataaagttcacaaatctacttggttatcacatttactctaaagtccggttttttcattgaccataatatatttagtgaaacatttcctcagtttttgtctaccagcaaaaggtctcaaaataatttgcttaacccaacttttttgtacaaagttggc

SEQ ID NO: 188688 - DNA, 1166 bp, Homo Sapiens
ttggagtggctacagcttcctaaagatgaaagaccacacttttacactctgtatttagaagaaccagattcttcaggtcattcatatggaccagtcagcagtgaagtcatcaaagccttgcagagggttgatggtatggttggtatgctgatggatggtctgaaagagctgaacttgcacagatgcctgaacctcatccttatttcagatcatggcatggaacaaggcagttgtaagaaatacatatatctgaataaatattttggggatgttaaaaatattaaagttatctatggacctgcagctcgattgagaccctctgatgtcccagataaatactattcatttaactatgaaggcattgcccgaaatctttcttgccgggaaccaaaccagcacttcaaaccttacctgaaacatttcttacctaagcgtttgcactttgctaagagtgatagaattgagcccttgacattctatttggaccctcagtggcaacttgcattgaatccctcagaaaggaaatattgtggaagtggatttcatggctctgacaatgtattttcaaatatgcaagccctctttgttggctatggacctggattcaagcatggcattgaggctgacacctttgaaaacattgaagtctataacttaatgtgtgatttactgaatttgacaccggctcctaataacggaactcatggaagtcttaaccaccttctaaagaatcctgtttatacgccaaagcatcccaaagaagtgcaccccctggtacagtgccccttcacaagaaaccccagagataaccttggctgctcatgtaacccttcgattttgccgattgaggattttcaaacacagttcaatctgactgtggcagaagagaagattattaagcatgaaactttaccctatggaagacctagagttctccagaaggaaaacaccatctgtcttctttcccagcaccagtttatgagtggatacagccaagacatcttaatgcccctttggacatcctataccgtggacagaaatgacagtttctctacggaagacttctccaactgtctgtaccaggactttagaattcctcttagtcctgtccataaatgttcattttataaaaataacaccaaagtgagttacgggttcctctcccc

SEQ ID NO: 188689 - DNA, 1305 bp, Homo Sapiens
gggggggcgctcattttataaggcactcgttcagtttggcattaaacaaagagtgtactaattgtctctaggaaccttcgattcaagactcaaaacattatttcctgaaaaaaattcgttaatagtatgtcttatctcttaggagggcaactagcatggatctgccaatgcccatgcgcttccggcacttaaaaaagacttctaaggaggcagttggtggctacaggtctcccatccatggccggggtcttttctgtaagagaaacattgatgcaggtgagatggtgattgagtatgccggcaacgtcatccgctccatccagactgacaagcgggaaaagtattacgacagcaagggcattggttgctatatgttccgaattgatgactcagaggtagtggatgccaccatgcatggaaatgctgcacgcttcatcaatcactcgtgtgagcctaactgctattctcgggtcatcaatattgatgggcagaagcacattgtcatctttgccatgcgtaagatctaccgaggagaggaactcacttacgactataagttccccattgaggatgccagcaacaagctgccctgcaactgtggcgccaagaaatgccggaagttcctaaactaaagctgctcttctcccccagtgttggagtgcaaggaggcggggccatccaaagcaacgctgaaggccttttccagcagctgggagctcccggattgcgtggcacagctgaggggcctctgtgatggctgagctctcttatgtcctatactcacatcagacatgtgatcatagtcccagagacagagttgaggtctcgaagaaaagatccatgatcggctttctcctggggcccctccaattgtttactgttagaaagtgggaatggggtccctagcagacttgcctggaaggagcctattatagagggttggttatgttgggagattgggcctgaatttctccacagaaataagttgccatcctcaggttggccctttcccaagcactgtaagtgagtgggtcaggcaaagccccaaatggagggttggttagattcctgacagtttgccagccaggccccacctacagcgtctgtcgaacaaacagaggtctggtggttttccctactgtcctcccactcgagagttcacttctggttgggagacaggattcctagcacctccggtgtcaaaaggctgtcatggggttgtgccaattaattaccaaacattgagcctgcagctttgagtgggagtgttgcccccaggagccttatctcagccaattacctttc

SEQ ID NO: 188690 - DNA, 1051 bp, Homo Sapiens
ttggctcaaggaaatgtctcagcttatgctaaaggaacctacacattgtgaggctaaccctgacctgatctttgaagatatggaagttatgacagacttcgaactacatgtactttgtaaacagtaccgacacattaataactttcagttagacatggacttgattttagattctggaaaatttcgagttttaggatgcatcttgtctgaattgaaacagaagggtgatagagttgtgttatttagccaatttaccatgatgctggatatcttagaggttctattaaaacatcatcagcataggtacctcagattagatggaaagactcagatttctgaaaggattcatctaattgatgagtttaataccgatatggatatctttgtgtttctgctatcaacaaaagctggtggattaggaataaatctgacttcagcaaatgttgttatacttcacgatattgactgtaatccttataatgacaaacaagcagaagatagatgccatagagtaggccagactaaagaagtactagttataaaactaataagccaagggacgattgaagaatccatgctaaaaattaaccaacagaaattgaaactagaacaggatatgactacagtagatgaaggtgatgaagggagtatgccagcagatatagccacattactaaaaacatcaatgggcctgtgaaataagaactgtgaactctcaattgatgaggaaatatcaacttggtgcactcaaggacatttacattatgatgaccatggggtttatgaacatttataactttttataatttccatattacatttctcatagtatggacaactttttgccactaactgaattctccaaatactcacacgtgaaatttcaaaaaagaagccacaaatatgtagttctgaagatgttgaataatcattttacaaagcagttttctgaatggggattagttggtgattgtttgtaacaaatatgctaatgctttagaaatgtcagtatttttgtaattatttctacctccaatatatatatattgtc

SEQ ID NO: 188691 - DNA, 1366 bp, Homo Sapiens
ttgggagaagccaacaattgcagctctccggctgggatcctggttgacgccatgtcccagaagcaccttcagatcaaccagacatttgaggagctgcgactggtcacgcaggacacagagaatgagctgaagaaactgcagcagactcaggagtacttcatcatccagtaccaggagagcctgaggatccaagctcagtttgcccagctggcccagctgagcccccaggagcgtctgagccgggagacggccctccagcagaagcaggtgtctctggaggcctggttgcagcgtgaggcacagacactgcagcagtaccgcgtggagctggccgagaagcaccagaagaccctgcagctgctgcggaagcagcagaccatcatcctggatgacgagctgatccagtggaagcggcggcagcagctggccgggaacggcgggccccccgagggcagcctggacgtgctacagtcctggtgtgagaagttggccgagatcatctggcagaaccggcagcagatccgcagggctgagcacctctgccagcagctgcccatccccggcccagtggaggagatgctggccgaggtcaacgccaccatcacggacattatctcagccctggtgaccagcacattcatcattgagaagcagcctcctcaggtcctgaagacccagaccaagtttgcagccaccgtacgcctgctggtgggcgggaagctgaacgtgcacatgaatcccccccaggtgaaggccaccatcatcagtgagcagcaggccaagtctctgcttaaaaatgagaacacccgcaacgagtgcagtggtgagatcctgaacaactgctgcgtgatggagtaccaccaagccacgggcaccctcagtgcccacttcaggaacatgtcactgaagaggatcaagcgtgctgaccggcggggtgcagagtccgtgacagaggagaagttcacagtcctgtttgagtctcagttcagtgttggcagcaatgagcttgtgttccaggtgaagactctgtccctacctgtggttgtcatcgtccacggcagccaggaccacaatgccacggctactgtgctgtgggacaatgcctttgctgagccgggcagggtgccatttgccgtgcctgacaaagtgctgtggccgcagctgtgtgaggcgctcaacatgaaattcaaggccgaagtgcagagcaaccggggcctgaccaaggagaacctcgtgttcctggcgcagaaactgttcaacaacagcagcagccacctggaggactacagtggcctgtccgtgtcctggtcccagttcaacaggagaacttgccgggctggaactacaccttctggcagtggtttga

SEQ ID NO: 188692 - DNA, 958 bp, Homo Sapiens
tttgtacaaaaaagttgtccccgacgagaccttttacacagcttttacaaatcaataaagatgattgtacaagagtattttcagactaattggattcaaggttatattcttttaagtgttgttagtctgcatgcacattggcagtaaactagttacttgtgtactctgtaatatttgtataatgatcatttcttcttaaggctcaagatattagaaaagaaatcagacctaaataatcattgatgaagtatgtcagttacaagcacaaaagaatataactgcttttataaatcttttgaatcatgtacaagacttatatctacattttttgatcaccagttgtaccaaaacactaatttttgaaaaagataggttaaagtatttgacaaaagtgaatacaataataacacttgtgtcaaaatgatatagcttagtataaaaataaaattcaacgttttggccaaaatgtttgtttttcactggattctgaatataataaattcaaagtaccctttttttagagtttctaataaagtagtatgtaaaaagaaactgcattttaagtcagacagtaaatgttttttttaatttacagcaaatgaagcagttttattagcatgttacaaatattgccaaaccaagacttctctaccatactttaacagctttccttcagaaaactctgaagttatatttgcaataataatgaaaccagcatttagtaccagcatatggttcatatgcaaataatactttccccaaaatctttctgggctaactattttcttgctatgcttcctgcacccaaccagcagaattcttccagggtggaggaactaatcagcttgttctccaacagttctgagccaacccacaaatctttgagaaaaggggtcacttgtttactattctcttggagatggaagtgattctgctcttccatttgggtatattattt

SEQ ID NO: 188693 - DNA, 899 bp, Homo Sapiens
ttggcacttggctctggctggagcttgaggacgcaaggagggtttgtcactggcagactcgagactgtaggcactgccatggcccctgtgctcagtaaggactcggcggacatcgagagtatcctggctttaaatcctcgaacacaaactcatgcaactctgtgttccacttcggccaagaaattagacaagaaacattggaaaagaaatcctgataagaactgctttaattgtgagaagctggagaataattttgatgacatcaagcacacgactcttggtgagcgaggagctctccgagaagcaatgagatgcctgaaatgtgcagatgccccgtgtcagaagagctgtccaactaatcttgatattaaatcattcatcacaagtattgcaaacaagaactattatggagctgctaagatgatattttctgacaacccacttggtctgacttgtggaatggtatgtccaacctctgatctttgtgtaggtggatgcaatttatatgccactgaagagggacccattaatattggtggattgcagcaatttgctactgaggtattcaaagcaatgagtatcccacagatcagaaatccttcgctgcctcccccagaaaaaatgtctgaagcctattctgcaaagattgctctttttggtgctgggcctgcaagtataagttgtgcttcctttttggctcgattggggtactctgacatcactatatttgaaaaacaagaatatgttggtggtttaagtacttctgaaattcctcagttccggctgccgtatgatgtagtgaattttgagattgagctaatgaaggaccttggtgtaaagataatttgcggtaaaagcctttcagtgaatgaaatgactcttagcactttgaaagaaaa

SEQ ID NO: 188694 - DNA, 1203 bp, Homo Sapiens
ttgggttcttttctatggctgtgggcaaacttaaacacaacaaaactagatatgtgatatgaggttcataactgatttttatctagaaactatatttacttttgtgttcttgtctttgtaggttttaaaatcaaagatgggaaaatcggagaaaattgcccttccccatggccagcttgttcatggtatacacttgtatgagcaaccaaagataaacagacagaaaagcaaatataacttgccactaaccaagatcacctctgcaaaaagaaatgaaaacaacttttggcaggattctgtttcatctgacagaattcagaagcaggaaaaaaagccttttaaaaataccgagaacattaaaaattcgcatttgaagaaatcagcatttctaactgaagtgagccaaaaggaaaattatgctggggcaaagtttagtgatccaccttctcctagtgttcttccaaagcctcctagtcactggatgggaagcactgttgaaaattccaaccaaaacagggagctgatggcagtacacttaaaaacgctcctcaaagttcaaacttagatttcagatttcagtatgtgtgtaaaacataatttttcccatatccctggactcttgagaaaattggtacagaaatggaaatttgccttgttgcaacatacaattgcaaaagatgagtttaaaaaattacatacaaacagcttgtattatattttatattttgtaaatactgtataccatgtattatgtgtatattgttcatacttgagaggtatattatagttttgttatgaaagtatgtattttgccctgcccacattgcaggtgttttgtatatatacaatggataaattttaagtgtgtgctaaggcacatggaagaccgattttatttgcacaaggtactgagatttttttcaagaaacagctgtcaaatctcaaggtgaagatctaaatgtgaacagtttactaatgcactactgaagtttaaatctgtggcacaatcaatgtaagcatggggtttgtttctctaaattgatttgtaatctgaaattactgaacaactcctattcccatttttgctaaactcaatttctggttttggtatatatccattccagcttaatgcctctaattttaatgccaacaaattggttgtaatcaaattttaaaataataataatttggccccccctttta

SEQ ID NO: 188695 - DNA, 1018 bp, Homo Sapiens
tgtccgtacgcaggatctccgtgcctccacggcaatctgtttctgcgctgcacaactcaatctcaatctcttctgccggatcttctgctgttcacgggcccctgcagctcataggccaactgggcctcagctgtcttgatgttaacctcctcactgaaggctgacttttgcagctcgaaggctcgcttagagtcagcaatcttggtgtctgccatgaacttcacatccagcatctcctttttgcactcagcttcccggatgcctgcgtcccgttcagcctcggccacgccaatgtcagcatctctctgcaccacggcagtctgcgtcttgcccagggagctcagatagtccactttgtcatacacgtccttgatggtgaagctgaggatctcaatgcccatgcggccaacatcaggggctgccacctcccgcaccagcttggcaaactggtcccggtcctgataaatctgctccactgtcagggtcccgaggatggagcgcagatgtccctccagggtctgcaggacgacgtttttgatgtcctgcacattcttacccagaaactgctcacaagccacggccaggagttccttctccgtcatgatcttcacctgggcgacacccgtcacagttaaagctaccccctcggccgtctctacgtcctcgcagcggggctgcaacgtcataatctctagggaaatcctctgagtgtcggagatacaccaccaggcccaggcccagccgccaaacacgtactgtttatagtcggaaccacaacagccccctgaaaccaccagcgcctcgttgggccccaccgtgtggcaattgcccatggcgccggcggcacggagggccctcgggaccgcacagacccggacaacagcagcgggtctgcagcgccggccgcgcccagcctatcccgccacccccagcggccggccgcccgctcgctcgcccgcgcccctctgcgccaacttttttgtacaaagttggctattatagaaaaagcattgctcat

SEQ ID NO: 188696 - DNA, 1265 bp, Homo Sapiens
  misc_feature (1094)..(1112): n is a, c, g, or t
ccttttggtaactgtgcactgtgtcctttagccagggccgtgccaacttatgaagacactgcagcttgagaggggctttgctgaggcttccccttggccatgtgaaagcccgccttgttgcctgctttgtgctttctgcaccagacaacctgatggaacatttgcacctgagttgtacatttttgaagtgtgcagggcagcctggacacaagcttagattctctatgtatagttccccgtgttcactaacatgccctctctggaaagcatatgtatataacatgtgtcatgtcctttggaaacctggtcacctggtgaaaacccttgggattcttccctgggcatgactgatgacaatttccatttcatcagtttgttttgttttcctttttctttaaatcttggactttaaaccctacctgtgtgattcagtagggtttgagacttacgtgtgatactgacaggtaagcaacagtgctagcattctagattcctgcctttttttaaaaagaaattattctcattgctgtattatattggaaaagttttaaacaaccaagctaaagctatgtgaaagttgagctcaaagtagaggaaaagttactggtggtaccttgctgcctgctctgctggtagaattctgtgctccccgtgacacttagtacattaagaatgactacactgttcctcgtatgtgaaggaggcagtgctgactccgtgagtgtgagacacgtgctttgaactgcttttctattcatggagcactccatagtctcaaactgtcccccttatgaccaacagcacatttgtgaagaggttcgcagggataaggggtgcactttatagctatggaaacatgagattctcctctattggaagctaattagcccacaaaggtggtaaacctgtagattgggccttaattagcattgtactctaatcaaaggactctttctaaaccatatttatagctttcttaacctacacatagtctatacatagatgcatattttacccccagctggctagagatttatttgttgtaaatgctgtatagatttggttttcctttctttacttaccctggtttggannnnnnnnnnnnnnnnnnngaatggatttatgctgtcttaacaatatgacaataatcctctgtagcttgagctacccctcccctgctgtaacttacgtgacctgtgctgtcactgggcataggacagcggcatcacgggttgcattcccattggactcatgcacctcccgga

SEQ ID NO: 188697 - DNA, 1714 bp, Homo Sapiens
ttgggccatggagtcagccgggctagagcagctcctacgggagctgctgctaccggacaccgagcgcatccgtcgggccacggaacagctccagatcgttcttcgggcccccgccgctttgccggctctctgcgacctgctagcctcggcggccgacccccagatccgccagtttgcggccgtgctgacccgcagacgactgaacacccgctggcgacggctggcggcggagcaacgggagagcctcaagtccctgatcctgacggccctgcagagagaaacagagcactgtgtgagcctcagcctggcccagctctcagccaccatttttcgaaaggaaggcttggaggcctggccacagcttttgcagctgcttcagcacagtacccacagcccccacagcccagagagagagatggggcttttgctgctaagtgtggtggtgacctcccggcccgaggccttccaaccccaccaccgggagcttcttcggcttctgaatgagactcttggtgaggtgggctctcctgggctgctcttctactccctgcgcactctgaccaccatggctccctacctcagcactgaagatgtgcctctcgctcggatgttggtgcccaagctgatcatggccatgcagactctgatccccatagatgaggcaaaggcctgtgaggcccttgaggctttggatgaactgttggagtcagaggtgccggtcatcaccccctacctctctgaagtcctcacattctgcctggaggtagctagaaatgtggccctgggcaatgcgatacgcatacgtattctctgctgcctcactttcttggtcaaagtcaagagcaaggccttactgaagaatcgtctcctgccacccttgctgcacacccttttccccattgtggctgctgagcccccaccaggccagttggatcccgaggaccaggattcagaagaggaagagttggagattgagctgatgggggagactcccaagcatttcgctgtacaagttgtggacatgctggcactacacctgccccccgagaagctctgtccccagctgatgcccatgttggaagaggctttgcggagcgagagcccataccagcgcaaagctggactcctggtgctggccgtgctgtctgacggagctggcgaccacatcaggcagagactgctgcccccactgctgcagattgtgtgcaagggcctggaggacccctcgcaagttgtacgcaatgctgcgctgtttgccctgggccagttctcagaaaacctacagccccatatcagcagctattcaagggaggtaatgccactgctcctcgcctacttgaagtcggtgcctcttggacacacacaccacctagccaaggcctgctatgccctggagaattttgtggagaacctagggcccaaggtgcagccctaccttccggagcttatggaatgcatgctgcagcttctgaggaaccccagcagtccccgggccaaggagctggctgtgagcgccctgggagccattgctacggctgcccaggcctcgctgctgccctacttccctgccatcatggagcacctgcgggaattcctgttaacatgccgtgaggaccttcagcctgtgcagatccagagcctggagacactgggggtgctggcacgagcagtgggggagcccatgagccgctggctgagaatgctgccagctggg

SEQ ID NO: 188698 - DNA, 1731 bp, Homo Sapiens
ttggcttgcaatgagttcacggggcagtgccagtgcatgcctgggtttggaggccgcacctgcagcgagtgccaggaactcttctggggagaccccgacgtggagtgccgagcctgtgactgtgaccccaggggcattgagacgccacagtgtgaccagtccacgggccagtgtgtctgcgttgagggtgttgagggtccacgctgtgacaagtgcacgcgagggtactcgggggtcttccctgactgcacaccctgccaccagtgctttgctctctgggatgtgatcattgccgagctgaccaacaggacacacagattcctggagaaagccaaggccttgaagatcagtggtgtgatcgggccttaccgtgagactgtggactcggtggagaggaaagtcagcgagataaaagacatcctggcgcagagccccgcagcagagccactgaaaaacattgggaatctctttgaggaagcagagaaactgattaaagatgttacagaaatgatggctcaagtagaagtgaaattatctgacacaacttcccaaagcaacagcacagccaaagaactggattctctacagacagaagccgaaagcctagacaacactgtgaaagaacttgctgaacaactggaatttatcaaaaactcagatattcggggtgccttggatagcattaccaagtatttccagatgtctcttgaggcagaggagagggtgaatgcctccaccacagaacccaacagcactgtggagcagtcagccctcatgagagacagagtagaagacgtgatgatggagcgagaatcccagttcaaggaaaaacaagaggagcaggctcgcctccttgatgaactggcaggcaagctacaaagcctagacctttcagccgctgccgaaatgacctgtggaacacccccaggggcctcctgttccgagactgaatgtggcgggccaaactgcagaactgacgaaggagagaggaagtgtggggggcctggctgtggtggtctggttactgttgcacacaacgcctggcagaaagccatggacttggaccaagatgtcctgagtgccctggctgaagtggaacagctctccaagatggtctctgaagcaaaactgagggcagatgaggcaaaacaaagtgctgaagacattctgttgaagacaaatgctaccaaagaaaaaatggacaagagcaatgaggagctgagaaatctaatcaagcaaatcagaaactttttgacccaggatagtgctgatttggacagcattgaagcagttgctaatgaagtattgaaaatggagatgcctagcaccccacagcagttacagaacttgacagaagatatacgtgaacgagttgaaagcctttctcaagtagaggttattcttcagcatagtgctgctgacattgccagagctgagatgttgttagaagaagctaaaagagcaagcaaaagtgcaacagatgttaaagtcactgcagatatggtaaaggaagctctggaagaagcagaaaaggcccaggtcgcagcagagaaggcaattaaacaagcagatgaagacattcaaggaacccagaacctgctaacttcgattgagtctgaaacagcagcttctgaggaaaccttgttcaacgcgtcccagcgcatcagcgagttagagaggaatgtggaagacttaagcggaaagctgcccaaaactccggggaggcagata

SEQ ID NO: 188699 - DNA, 1044 bp, Homo Sapiens
tttgtacaaaaaagttgggatcattttaatcttttaaaaaaactgtaagacataagctgttatttatcaaaaaatataattctaatgttgccccagtgttgctccaaataacaaaacttttaaagtcataaaaacaagtaaaaattttgggtaaaaacgtaactttttattaaataagcattgcattacagttgagcaaaagataatgttgaaattcaaaattgtgtgtagaaacgatactggagtatttgtgtcagacattgtcaaaggaggaattgcagatgccgatggaagactgatgcagggagaccagatattaatggtgaatggggaagacgttcgtaatgccacccaagaagcggttgccgctttgctaaagtgttccctaggcacagtaaccttggaagttggaagaatcaaagctggtccattccattcagagaggaggccatctcaaagcagccaggtgagtgaaggcagcctgtcatctttcacttttccactctctggatccagtacatctgagtcactggaaagtagctcaaagaagaatgcattggcatctgaaatacagggattaagaacagtcgaaatgaaaaagggccctactgactcactgggaatcagcatcgctggaggagtaggcagcccacttggtgatgtgcctatatttattgcaatgatgcacccaactggagttgcagcacagacccaaaaactcagagttggggataggattgtcaccatctgtggcacatccactgagggcatgactcacacccaagcagttaacctactgaaaaatgcatctggctccattgaaatgcaagtggttgctggaggagacgtgagtgtggtcacaggtcatcagcaggagcctgcaagttccagtctttctttcactgggctgacgtcaagcagtatatttcagatgatttaggacctcctcaatgtaagtctattacactagagcgaggatctagatggcttaacttcagtatagttggaggatatgggcagctctcatggagacttactcattta

SEQ ID NO: 188700 - DNA, 2131 bp, Homo Sapiens
  misc_feature (563)..(868): n is a, c, g, or t
ttggcatcaagacaactaaaacaaatgataaaaatgtttatttttacactccagcatatcgggtgagttttagggatgtgtatgaatatttaaatcttttaatttcagttttaatgaaagctgaacttaataggaaagctagctcttggtaactagcaatgatcaggcattgtttgcctctgtcaggttttcttatctgttttaggtacattttttcagattctgattgtttgagttaatggttgaatttttaaagtttttagttacttaaaatatgattttaaattacatattaatttagaaaattcctgtgtttacttatattttaaattgtgaaatggatccaatcattagaacagagagaatagttctttgaaactgaaatactttagttttactgaccttgtgtaaagataaatatttatgaagaaccagcttccaaaagaaaccagcatatggcactataaactatttcatttgagcaccattctttaccatggatatattaattatgtattatagtggagtgatcatacagttcccccaaatgtgatgtttcagtnnnnnnnnnnnnnnnnnnnnnnnnnnnnnnnnnnnnnnnnnnnnnnnnnnnnnnnnnnnnnnnnnnnnnnnnnnnnnnnnnnnnnnnnnnnnnnnnnnnnnnnnnnnnnnnnnnnnnnnnnnnnnnnnnnnnnnnnnnnnnnnnnnnnnnnnnnnnnnnnnnnnnnnnnnnnnnnnnnnnnnnnnnnnnnnnnnnnnnnnnnnnnnnnnnnnnnnnnnnnnnnnnnnnnnnnnnnnnnnnnnnnnnnnnnnnnnnnnnnnnnnnnnnnnnnnnnnnnnnnnnnnnnnnnnnnnnnnnnnnnnnnnnctcttaaaacaaaaacctcacacatacctaaaataagtatatatctgtaaccaaaggaacttaattttagagccaaatttttctatcttgttggattttttacagtgtttaagatagacacttaagtgttgccgtagtatcaatatttctgtcattgaattttttctcaccccttattatttctcacttacaatttctgagcatgatttttcataattcattatcttcagatcattactataataagataccgtggctcttatgcagatattgcagcaagccttgtttggtttggatttttgcatccctttttctcccattaagggaattaagttttgggatgatggattaaaagcctgtaaagaattgtttgggctctaaaagttgggctcatggtggcaatatccttttaatgtgttttaacattttttaatcaacatcgtttaaaaataatttactaaggattagattatttaatgaatgtctttttttctatatattgaattagatgttatcccaaaaaaaatatcttttcacttcaaaatgaaaatatatgttcaaagatgttttatttttagaatagttataaaaagtattagtcttaacataatgtgtcttgttctttttaccaataataatttatcaaaataagagggaaagtgcaatcaaatctgaattattttactatttgtttctagacacactacttaacactcctaaagactactttgagtaggcaacataactaaatttttctagtttcttatgatacaggttcataaactacaatatttggatttttttccccaaggcacaaaatgtataatggagaccaaatagtgatctgatccatagtatcctatgcctatacactttaaaatgtatatacattttagacaaaaatgcacactccagtattaatatttgtgctaccatctacttggagaagtttaatgagaaaattttagaagaaaagtattacaaacaatattttgactctattacctgttttgccttatacattttagaaactggaaattttttaaagaaaatgctttagttttcttctgttcttcactgtctacagtgtgcttttgtatatggatcagactgagcaaagtaattacatgtatcagagatactttatctctatactaattcacagacagctcctgatgtaagatttagagggcctttctgctctctgaatatatggtgaggagaatgggtatctggaaaaggaaatgatctggataaatctga

SEQ ID NO: 188701 - DNA, 994 bp, Homo Sapiens
ttggctgcccagaattcccgccggaacgtgatgcttcgcaatgatccgatgatgtcctttgctgcccagcctaaccagggaagtttggtcaatcagaacttgctccaccaccagcaccaaacccagggcgctcttggtggcagccgtgccttgtcgaattctgtcagcaacatgggcttgagtgagtccagcagccttgggtcagccaaacaccagcagcagtctcctgtcagccagtctatgcaaaccctctcggactctctctcaggctcctccttgtactcaactagtgcaaacctgcccgtcatgggccatgagaagttccccagcgacttggacctggacatgttcaatgggagcttggaatgtgacatggagtccattatccgtagtgaactcatggatgctgatgggttggattttaactttgattccctcatctccacacagaatgttgttggtttgaacgtggggaacttcactggtgctaagcaggcctcatctcagagctgggtgccaggctgaaggatcactgaggaaggggaagtgggcaaagcagaccctcaaactgacacaagacctacagagaaaaccctttgccaaatctgctctcagcaagtggacagtgataccgtttacagcttaacacctttgtgaatcccacgccattttcctaacccagcagagactgttaatggccccttaccctgggtgaagcacttacccttggaacagaactctaaaaagtatgcaaaatcttccttgtacagggtggtgagccgcctgccagtggaggacagcacccctcagcaccacccaccctcattcagagcacaccgtgagcccccgtcggccattctgtggtgttttaatattgcgatggtttatgggacgttttaagtgttgttcttgtgtttgttttcctttgactttctgagtttttcacatgcattaacttgcggtattttctgtaaaatgttaaccgtccttcccc

SEQ ID NO: 188702 - DNA, 676 bp, Homo Sapiens
ctttgtacaaaaaagttggcggtgcagggggatgagggccgcggtggctgccagcgtggggttgagcgaggggcctgctggctcccggagcggtcgcctcttccgcccgccgagtcccgctccggcggcccccggcgcccggctgttgcggctcccggggagcggggccgtgcaggccgcgagcccggagcgcgccggctggaccgaggcgctgcgggccgccgtggccgagctgcgcgccggcgccgtggtggccgtccccaccgatacgctgtacggcctggcctgcgcggcgagctgctcggcggctctgcgcgctgtgtaccgcctcaagggtcgcagcgaggccaagcctctggccgtatgcctcggccgcgtggccgacgtctacagatactgccgtgtgagagtacctgaggggctcctgaaagacctactgccaggaccagtgaccctggtgatggaacgctcggaggagctcaacaaggacctaaacccttttacgcctcttgtaggcattcggattcctgatcatgcttttatgcaagacttggctcagatgtttgagggtccgcttgctctcactagtgccaacctcagctcccaggccagttctctgaatgtcgaggagttccaggatctctggcctcaattgtcccttggttattgatgggga

SEQ ID NO: 188703 - DNA, 938 bp, Homo Sapiens
ttgggtacctaagttcccgctgtaggtggtacctttgcagacggtgcgatgggggaagcagagaagtttcactacatctatagttgtgacctggatatcaacgtccagcttaagataggaagcttggaagggaagagagaacaaaagagttataaagctgtcctggaagacccaatgttgaagttctcaggactatatcaagagacatgctctgatctttatgttacttgtcaagtttttgcagaagggaagcctttggccttgccagtgagaacatcctacaaagcatttagtacaagatggaactggaatgaatggctgaaactaccagtaaaataccctgacctgcccaggaatgcccaagtggccctcaccatatgggatgtgtatggtcccggaaaagcagtgcctgtaggaggaacaacggtttcgctctttggaaaatacggcatgtttcgccaagggatgcatgacttgaaagtctggcctaatgtagaagcagatggatcagaacccacaaaaactcctggcagaacaagtagcactctctcagaagatcagatgagccgtcttgccaagctcaccaaagctcatcgacaaggacacatggtgaaagtagattggctggatagattgacatttagagaaatagaaatgataaatgagagtgaaaaacgaagttctaatttcatgtacctgatggttgaatttcgatgtgtcaagtgtgatgataaggaatatggtattgtttattatgaaaaggacggtgatgaatcatctccaattttaacaagttttgaattagtgaaagttcctgacccccagatgtctatggagaatttagttgagagcaaacaccacaagcttgcccggagtttaagaagtggaccttctgaccacgatctgaaacccacgctgccacgagagatcagttaaat

SEQ ID NO: 188704 - DNA, 965 bp, Homo Sapiens
ttggctttagatttcacattttatatggctgatcaattttcatacattgagaaaccaagtcaatcaagcaggaatcatttaaaaaccagataaagccatgtttttcttctgtgacaatttatcagtatctttaccaatgagccttaatttttatataggtccaatattgagcttttacttaaaatttagatagaacttttttttggatacagcacaaactccagttgacagtaaaatgaagcttctaggtattttgtattgtacatatttcctcctactgggtgttcaaaagaaatttaaattcaagtaccttttgtgataaaatgttttagatttgtgcacccattggcaaaacaggaaagtttccagataggtattgtatcattgagaatgcagcacagatagtgtgggcttcacactatagacacagaatatagctttttcttaaagccaaatttgggtgataggacactttaaatatccttaattttggcaaccactagcaaaaaaacttgtcagaataatttaaccaagcccctctccacttcttttatttaaaagcactgattcaattgctaggaatatttttgcagatttttctttacagtattccataggcaggtccactggaaaactgcagaaaaatgtgagctctcctggtaaatagtatacattttataagctatattttaaaggcctaagaacatggcaagtatttacttttatcttttttttaaaaacactcatgacagaaaacagtttaataatatctcattctaaaataaaacactggttgcagggtcttcaggatgcctattttgccaagaaacttcagtatacaggttagaaatatgcttttgtttttgaacaataatatattggtttgctttaaagaagggactaaatatgactttaaagagacttcaaatattgagtattttaaaaatttaaagtaggtcagttta

SEQ ID NO: 188705 - DNA, 1542 bp, Homo Sapiens
agatcaatttccctcacagcctggcttctgcttaaggacaagtaagttcatttccctgcagaacttggtgaggcccccgagttgcccaatttagccacaacaggtgcccaatgtaggcatcaccttgctttcccggccttcctggtcattccctgttaagttcattttgtgtccaactgacccaactttggcagctataggtgccaaacaaggcatcaccttgagactctgaccatctgcatcactggaaggattagctacttttaaacctagaggggccaactttggcataggcctccacaaagtgtctgtgctgttgctgttctccaagccagtcttcatgtgtagggtggggggtgaggacacactttcgggctctgcagggaggccagaagtattcttccctccatcaatagctttcttgttggaaaggagggaatcctttatttcagagtcaataacaatcttaaggacatctggctcagaggctggttctgcaagttgtttttcattctcagaaaagtcatcgtcttccaagtgcaagaggaggggactgatagagtcactctccccttgaacatcaggcaactctttcaaaccagttcccaagtgctcaacctggaaagttgctctgcttccaggaggaaccttactaataaaagcccgccgagcatcccctgggaactctgtatccatagagctgggtagttcagccaggccaacagagtcatcatttagttgttgattaagaaaggcaatttcattgagcagtgaagtcagtgtctcatcagtatcatcctcatcttccatgttagtcagcagttcactggaatcaagagctgcttcctctatagctgatgttactttcctcagttccatctctatgcttgagtccttgagatctttcatctttaatttatgaaatgaagaatcctttgacttcactctctcccctcttgattcactctctttccatttatactgaatccctctcatatcaccagaaatctttttaggtaagaactcttgtgctttctgcatattggaaacgtcaactatttgtggataaccagaatctttgtttgccagaaaaacctgcgttggacccaacgtcactctgccatctctgtttcctctggaagagattctacccttatcctctaaggaattatcttcattcctgacggtgtctttcagatggtcagatggcttgctatcaggaacttcatgaggatatttgctgccacccatatctaccaaacctccctctgtggccaatgatgtcacattaacaattcgtggcatcataaataagtcgtcattttctggtagagccacagcactaccggcaacttgaggcttaagatcagattctaagagatcaggagaaacagctaccactggtcctgagaataggggaccttttagggtgagcaattgcccttgcggagtcatcacaaggttggcagaggtgtgtggagtgttcaagggtgaggtattttctgtggcctggtctttttttctggaaagaatcaaagccaa

SEQ ID NO: 188706 - DNA, 1364 bp, Homo Sapiens
ttggcaaaatggatataaacaaaaatgttatcggtggttatttttgggcagtagaattataggtttttaatttcttttgcttatttatagtttcaaaaattttcaattttaatataaattaatgtgctctatttatagagacaatacatgaaatatacttaataaaaattcaaatgttatagaactgaaaaagatgaaaagtaaaaacaacctattccccagaggtagccactgtccatagtttctattttagattctttcctttatacaagattattatagcttctattttttggtgtatgaactgtagtcctagaggattttattagttatgagttctataactaagatccatcatcttagttgctaagaacgtagatactgagaacatcatttaaaaaaacatttttggctggcacctctatgatcactggagtctcgcgggtccctcaggctgcacagggacaagtaaaggctacatccagatgccgggaatgcactgacgcccattcctggaaactgggctcccactcagcccctgggagcagcagccgccagcccctcgggacctccatctccaccctgctgagccacccgggttgggccaggatcccggcaggctgatcccgtcctccactgagacctgaaaaatggcttcggggcaaggcccaggtcctcccaggcaggagtgcggagagcctgccctgccctctgcttctgaggagcaggtagcccaggacacagaggaggttttccgcagctacgttttttaccgccatcagcaggaacaggaggctgaaggggtggctgcccctgccgacccagagatggtcaccttacctctgcaacctagcagcaccatggggcaggtgggacggcagctcgccatcatcggggacgacatcaaccgacgctatgactcagagttccagaccatgttgcagcacctgcagcccacggcagagaatgcctatgagtacttcaccaagattgccaccagcctgtttgagagtggcatcaattggggccgtgtggtggctcttctgggcttcggctaccgtctggccctacacgtctaccagcatggcctgactggcttcctaggccaggtgacccgcttcgtggtcgacttcatgctgcatcactgcattgcccggtggattgcacagaggggtggctgggtggcagccctgaacttgggcaatggtcccatcctgaacgtgctggtggttctgggtgtggttctgttgggccaagtttgtggtacgaagattcttcaaatcatgactcccaaaggtgccctttggggtcccggttcagaccctgcctggacttaagcgaagtctttgcctttctctgctccc

SEQ ID NO: 188707 - DNA, 876 bp, Homo Sapiens
ttggcaggtttctgataaactgaggtttgttttggcaccttctgccaccccagcagaagccttcatacaacatgacgaaacaagggatcatgttgaagtgtgtcctgatgctggtgttatcatcgaggaactttctcaacgcattgcattaactggaggtgctgcactggttgctgattatggtcatgatggaacaaagacagataccttcagagggttttgcgaccacaagcttcatgatgtcttaattgccccaggaacagcagatctaacagctgatgtggacttcagttatttgcgaagaatggcacagggaaaagtagcctctctgggcccaataaaacaacacacatttttaaaaaatatgggtattgatgtccggctgaaggttcttttagataaatcaaatgagccatcagtgaggcagcagttacttcaaggatatgatatgttaatgaatccaaagaagatgggagagagatttaacttttttgccttgctacctcatcagagacttcaaggtggaagatatcagaggaatgcacgtcagtcaaaaccctttgcatccgttgtagctgggtttagtgaacttgcttggcagtgatatttcagcttggacattttacccttcagtcggcccaagaaatcaaaataaaggaaacacatttcatatactgcaggtaacaaaagtcaaagtattttatcttttcacagcaagaacagtccatgttgtatataatacaaccaacattatagaacttttagggttgtgactggctttggtgcaaatgtgtgctcaagctaataagttattgtgaaactgagtttcctttaacttacaaagctagttgccatatttctattttattttaaaaa

SEQ ID NO: 188708 - DNA, 886 bp, Homo Sapiens
aaatgaaagtaaagtcacagaagtaacattttgccatttatataaaattcagaaacatacaaaattaacatttcacttacagatacatacgtatgttgtaaaactataatagacaaatgacaaacacaaaattccaaataattatttgagagggagagggccttagggaacttctaaaatgtcgacaacatctgtatcttaagctggctgatgagtacacagatatttacatttattatccctttatatatacgtttatgtatttttgtagtatgaaatacttcattaaaaaaagagtgaaaatgtaagacttcaaaaatgaagactaccatttatgtataacaataaaattagtgtaaaaaagtatacaaagaaaatgttcaattctttatctttccgtgctctatataatcagtattaatctaaagaccataatcctagtatgaaaaaaataacaagctttgacacaaaatctaagcatctgctttcctggcactcttaagttagacaagagtaaatatgttagcctctcaattctgcctcttcatctttcatctatacttagatttttctttatctttggacttctttggacttctgcttcggtctctctttttactcctttctctttcataaagatctgtttggtattttgatttatgactattactataatggccatccctctctcgagatcggctacgacttcggttctgagttcggtctctcttttcactcttttgtttctcccaacagctttcttcttcttcatagtgaccaaaccccatttctctatagatatcctgtcaaaggaagggggaattacaagtgaatcagtaaaataatcattttgtgggcattttcaatccaacttttttgtacaaag

SEQ ID NO: 188709 - DNA, 886 bp, Homo Sapiens
ttggggggctctcgcggttggggaacatagatggctggagacagaatctagagccttcaaataatgtggagatgtttccaccttcaggttccactgggctgattcccccctcccactttcaagctcggcccctttcaactctgccaagaatggctcccacctggctctcagacattcccctggtccaacccccaggccatcaagatgtctcagagaggcggctagacacccagagacctcaagtgaccatgtgggaacgggatgtttccagtgacaggcaggagccagggcggagaggcaggtcctgggggctggaggggtcacaggccctgagccagcaggctgaggtgatcgttcggcagctgcaagagctgcggcggctggaggaggaggtccggctcctgcgggagacctcgctgcagcagaagatgaggctagaggcccaggccatggagctagaggctctggcacgggcggagaaggccggccgagctgaggctgagggcctgcgtgctgctttggctggggctgaggttgtccggaagaacttggaagaggggagccagcgggagctggaagaggttcagaggctgcaccaagagcagcagtcctctttgacacaggctcacgaggaggctctttccagtttgaccagcaaggctgagggcttggagaagtctctgagtagtctggaaaccagaagagcaggggaagccaaggagctggccgaggctcagagggaggccgagctgcttcggaagcagctgagcaagacccaggaagacttggaggctcaggtgaccctggttgagaatctaaaaaatatgttgggggaacaagtgccttctgaggtccacagccagacatgggaactggagcgacagaa

SEQ ID NO: 188710 - DNA, 859 bp, Homo Sapiens
  misc_feature (435)..(480): n is a, c, g, or t
  misc_feature (670)..(706): n is a, c, g, or t
ttggagcatcgccgccgccagaggagaaatgtctgaagtaagacccctctccagagacatcttgatggagaccctcctgtatgagcagctcctggaacccccgaccatggaggttcttggcatgactgactctgaagaggacctggaccctatggaggacttcgattctttggaatgcatggagggcagtgacgcattggccctgcggctggcctgcatcggggacgagatggacgtgagcctcagggccccgcgcctggcccagctctccgaggtggccatgcacagcctgggtctggctttcatctacgaccagactgaggacatcagggatgttcttagaagtttcatggacggtttcaccacacttaaggagaacataatgaggttctggagatccccgaaccccgggtcctgggtgtcctgcgaacaggnnnnnnnnnnnnnnnnnnnnnnnnnnnnnnnnnnnnnnnnnnnnnncagcgggggcctgcacctgctgctcaagtgaggccccggcggctcagggcggggctggccccacccccatgaccactgccctggaggtggcggcctgctgctgttatctttttaactgttttctcatgatgcctttttatatttaaaccccgagatagtgctggaacactgctgaggttttatactcagnnnnnnnnnnnnnnnnnnnnnnnnnnnnnnnnnnnnnctaaattatgtattcctatggctctgcaattgtcagcggttaattgtggcctctgcccagtaaaagccattcactcctgcccctgcccacacggcatgtaccacggggagtgctggccatacccctgtaggataagtatgccctcggcaaaga

SEQ ID NO: 188711 - DNA, 1182 bp, Homo Sapiens
ttggcactattttgatgaaaaaaatcttcagagttctcaatttggaaactttggcaatatacctgctccaatgacagtaggaaatattcaggcatctcaacaggttctgagtggtgttgctcagccagtagcttttggtcaaggacaacagtttttaccagttcatccacaaaatcctggatttgttcagaatccttcaggagccctccctaaggcatatcctgataatcatctcagtcaggtggatgtaaatgaattgttttcaaaattgctaaaaacaggaattctcaaattgtcccaaactgattcagctacaacacaagtaagtgaagtaactgctcagcctccccctgaagaggaggaagatcaaaatgaagatcaagatgttccagatcttactaattttacagttgaagaattgaaacaacgttatgacagtgttataaatcgactgtacactggtattcagtgttactcttgtggaatgaggtttacaacatcacagacagatgtttatgcagatcatttggactggcattatcggcaaaatagaactgaaaaggatgttagccgaaaagtcactcatagacgttggtactacagtttaacagactggatagaatttgaggagatagctgatctggaagaacgggcaaagagccagttttttgaaaaggtgcatgaagaagttgtgctcaaaactcaagaggctgctaaagaaaaagagttccaaagtgtacctgctggaccagctggagcagttgagagttgtgaaatctgtcaagaacaatttgaacaatactgggatgaagaagaggaggaatggcatttgaaaaatgctattagagtagatggaaagatttatcatccatcatgttatgaagattatcaaaatacatcttcatttgattgtacaccatctcccagcaagacaccagttgaaaaccccttgaatattatgttgaacattgtcaaaaacgaattgcaggaaccctgtgacagtcccaaagttaaggaagaacgaattgatacaccaccagcttgtacagaggaaagcatagcaacaccctctgaaattaaaacagaaaatgacacagtcgagtcagtttaaataaaatgagaaaggtatgtttttcttttttaaaaaagctgctgttggatctagaagtgaagaattttttt

SEQ ID NO: 188712 - DNA, 129 bp, Homo Sapiens
aagccaccccgccgccatgggcctgcgcccgccgcgccgccgggccgagggcagctgaggcgcggtgcgaagatgggcgaggacagagcagggcccgagcgccagccccaacagcccgggcgccccacg

SEQ ID NO: 188713 - DNA, 1426 bp, Homo Sapiens
  misc_feature (494)..(532): n is a, c, g, or t
gggaggggtgccactgtttgcccagctggacagccagccactgggggcttcgtggggccactggaactgggcggtggctgctgttactcttaagccacagcgtcaggccaggaggaaggggattgggtcacgcacccccagacccagcctcccctgcaatgagcatggctcagtgagtcgtacttggggctatgacacaggggccaggacttcagggcacaggtacccccagcacagagcttgtggtcagcaggaagagaaaggcacctacgcatcgcatccctgcaaagtagcccggagccccgtagctgtagaaagatccaaaaatcctaacagaattgccctcggagtggcctccgacacacaaatccttcctccaagcaggccctgcagcccactggccctcggagcagaggcacataagtggcgctggtgcccgcccctccacagagcagaactgcccagcagcctgctacccgggtgggcatgcagtnnnnnnnnnnnnnnnnnnnnnnnnnnnnnnnnnnnnnnnggcacggccctaggggagcctcgaatgccgaggccagggcagcgcaacagggtccctgggccctttggataccaggggcgcccagggattgggtctcagccatggccactagaagatggcagtgcggggacaccagggtgtgtccgggtacaggtggcagtggatggagcggaacctggatgggtcggcctccaccgagaagggccccttcacgtggacggcgttccgcttgttttcaaacataccgtagctcagcgtcacctgctcgtggagctctgaggtgggcacctgctgcaggttctccaggtgggagtggaagaggccgctgcggatgaggggcacacccagcagggcctccacgatgtagccgatggtgcagtcatcaggcagccggatccgctcagccgtattcatgaagtgacccccgctggcccacgggctcatcttcagagccagcccacggctgatgcagaagccagcgccgcccgtggcaaaccagaagtggacaggacgcaccttgttctcgctgacccgctccatggcctggatgggcctgtccaggctgggcttgccgacgtagacgtcccgcgtgtgcgggtagctggccagcagccgcagcagggcccgcaggttgacgtagttgtcatcgtccacgtggcagaaccacttcctgccggactcgatgaagcggtcatactccacggccatcttgcaggacagcgcctggcggctgtgggcggccgagcagtttgtgatgaccacgttgcccgtgtgcctggccagggcctcatcttccccgtcagtgaagatgaacgtcatctccttgtggcgcgagatccaggtctccagcagcaggtcgaggcgcgcgcggtggaactttttggtggtctccaa

SEQ ID NO: 188714 - DNA, 2036 bp, Homo Sapiens
ttggagtaatcttcagctcactgctgttctctgggcttgttgactgtctcagagtcatctttactttttcacaaaaggtagcacacgtttgcagctgagtatcaacttatcagtttgttcttcttttatattctctaaagctttctgttaaaaatggtggtgcttctgctgctataacgttgtcaagaaacttgtgggtcttttacatatgtcacagggatgcactcatttagataggaggctcctcacgtatctttcctggaaaatcctgtctctgtttttggctttttctgaaatagctgagaggatctatgattcacacccttaatatcttcaaagagtcttgtgtgtgacctgatactcagaccttttgatgtttctgaagtattagcaaaaggttatacagccatatcttcatcactttctctagagtaaaggctgtcctgacggtgaatcttagttttagtggcttttgccatttgaataggccgcgaatttcccaaatcatcaagtcctggtttctttatatttaacaggtcttccctcaatctacctctttccacattttactataatcagcaagaagacagcaggctgtaccttccacagcttgcttggaaatatcctcagctaaatattgaagtcatcacttaaaagttctgctttacacataacggcaggacacaactcagcttagcttttcgccactatgtaacaaggactcctttcctccacttctccagtaacatattcctcattttttaccaacagtctattcatgatgatttagatattctatggcaatcgaggtattctctattatgctcctttcttcaaggccgccctagcattaacattccatatttctactaacagtctgtttaaggcagtttagcttcttttctggcatgctcctcagaattcttccagcctccacctactgcccaattccagagccacttttctacttttaggtatttgttacagcagcacctcaagtacctagaaaactcttttatgcctgcttctctgccagatgacttgaatatggtactagatttggaattcacctttctccagggtcactgtttatttcaaagaggtgaatttacctgtgctagggttttcacactgggagtgctaccagaactaccacaggatgaaagtggtgagcccaccactgcagagaagttttctcagtgccgtaatatagaggaattctcaaaataagccctactccttttcacttactgaaaacaacttggataatgtgtaacagccagccccatttcaaaaagattaccaggggtaaaacaactttttcatgggtcaaaatcatcttccgaagaaaatgatttcttaaaagaattgaacattgtaaatcaaagggcattgtcctgttttggattaacaaaacaggaaaaataaccaatccttgtaaaattatttgaaattttcttgtttttatcagttgagtgcctatagatgcacatacaaaaacaactgccatttttgtatataatagtcttccaagatagagatttacattaggagagaattaaacatccaggagggatgaacagtatttcatgtgtgctatgtagtgttttgcttcattgagagtcattttcatgaattatttttactactgcagtcatcttaaatttataatcatctcaaaaaagatgtcacaatgaacagacaaccatctgtgaggtcagtcattttgcatgatgtatgtaatcaaaaagtttgaaatgtctgcttactaataaagaatgttttcactgaaacttattggaaaggtttttcaaattttctttgatttgtagttttgagtcctgaatagattgttttaacatgaataacatttcctgtggtttaatttcccttggcgcacctttgtcaagacagggaaagaactggttgtagcatattatctgaatatcctgttactgtttctgtttttattctacccaaataaaaaggttcaggtgcttcttttttgccacaatggatttctgaaaaccttgtca

SEQ ID NO: 188715 - DNA, 1817 bp, Homo Sapiens
ttggcaccttagaggagtcagtggtgcgcatctgctgcatccgcagctttggtcatttcatcgcccgcctgcaaggcagcatcctgcagttcaacccagaggttggcatcttcgtcagcattgcccagtctgagcaggagagcctgctgcagcaggcccaggcacagttccgaatggcacaggaggaagctcgtcggaacaggctcatgagagacatggctcagctacgacttcagctcgaagtgtctcagctggagggcagcctgcagcagcccaaggcccagtcagccatgtctccctacctcgtccctgacacccaggccctctgccaccatctccctgtcatccgccaactggccaccagtggccgcttcattgtcatcatcccaaggacagtgatcgatggcctggatttgctgaagaaggaacacccaggggcccgggatgggattcggtacctggaggcagagtttaaaaaaggaaacaggtacattcgctgccagaaagaggtgggaaagagctttgagcggcataagctgaagaggcaggatgcagatgcctggactctctataagatcctagacagctgcaaacagctgactctggcccagggggcaggtgaggaggatccgagtggcatggtgaccatcatcacaggccttccactggacaaccccagcgtgctttcaggccccatgcaggcagccctgcaggccgctgcccacgccagtgtggacatcaagaatgttctggacttctacaagcagtggaaggaaattggttgatactgacccccaggccctgcagtggggctgactccagatctctcctgccctccctggcagccaggaccagcacctgtagtcaccccaccacacgcagactcatgcacgcacacaggagggaggcctagctgctcagaggctgcagggagggcccaggagccggctgggagggtggggtccctttgttgccaagacgttaggaaagcgaggaaagtgcttggattaggagagtcttgtgggcccctggccagccttcctgcctcagctcccctgctgtctccaggggcaggtggtaggcatgggtacctgcatttcactggagtgggttcttggatctctgaggggaaggaacagcaaaagaggcccttcttcctcacccaagatgcagggtggttggggccaggagtttggaccctctaggtcttgggggaagagctgggtaatacctggtgtctgagtgattctctgcagacccttcccctcctcaaggatcacccatcctcctttcagccccctttatggggaccaggcagctctggagccagccacaggggctgttagagaagcaaggcctggagtggcctgcaccgagtagcagggtcagggttcgtgtgctcctcctcctgctgcaggggctgcacatcccattgccccacttctgctttgtgtctccctctgtctagcttccagggcagggagcatgccccacctagggctgcaggcagtctggcctgtgccagcacggtctcctgtgcccaccagccccacaggtgctgtgctttgtgctcttggctgctgtgctgggacagaatgggatgccacgaagacaagaaagggggtgcagtctgaggccaccaccccccttcctatctaagggagggctgaagacaaggggccggcattcagtgggcagcaaaaaggagaggccacttgaagctgctcagtcataggcccccgtccctccttttgccttccgcaggactgaagacctgaaggggctggcttttggagtgttgaggtgaatatctggga

SEQ ID NO: 188716 - DNA, 740 bp, Homo Sapiens
ttggctgttccgcgtctgtgcgaccgtccgtcccgagcgcgcagccgcggcaggccaggtcagagcagcccaccatgggatggggagggggtggaggctgcaccccgcgcccacccatccaccagcagccgccggagcgccgcgtggtcaccgttgtctttctcggcctcctgctggacctcctggccttcacgctgctgctgcccctgctgcccgggctgttggagagccacggccgtgcccacgaccccctctatggctcctggcagggcggggtggactggtttgccaccgccatcgggatgccagtggagaagaggtacaacagtgtcctgttcggaggtctcattggctcggcattctctgtcctgcagtttctgtgtgcgccactcactggggccacctctgactgcttggggaggcgcccggtgatgctgctgtgcctggtatgttcctgggcctgggtgcccatggggaagcctcctcccacccagccagtagccccatggggttaggtggggagagggaggtggctgtgggcccctcatggccactggttggccctcatcgcatcctggagggggttctcgggggaccagtggctcctgttccagagccaggctttcaaggagctgctcctggcccctaggaaggcactgataacgcaagtggccctcacatgcttcgaaaatatgggcagggttgaggggtgttgtctgggttgccaagacctactctga

SEQ ID NO: 188717 - DNA, 2277 bp, Homo Sapiens
  misc_feature (724)..(788): n is a, c, g, or t
caagttaattcctataattcttccattttgttatgaatattctgtaatatcaaacattcatttttaatgtgctaaaaatatgggtttacaaaatatgaacaggtaatttttaaagagtaaattatgttaagaactttattattttcgattcattttatagggtagtaaaataatacttcttcaaaatcatttaaatgttattgatgccattgcaaaatcattataaataaattttctccattatccaatcacatctagataacattgaatatgtacaggtttctctggataggtaccaaaaggtaccacattttatacagacttaattgtgaaagctgggtgaaataaattttcagatcaaaattttttttaagtttaaatcattcactctttaaatttcagacagtgtcagtgtgactcttacttttaaaggaaaaaaattagtttaaaatttaatagccacagatttaataattttttactttaacacttaatgtacattttcatgagcagtaattaagatatgttgaaattttaaatgtgaaagatttcaaagtttcagtatgttaacattactcttcaaatgttcttaatatatatataaacacttacaaattatagatacaactagttgtatatctacaatacatatatgaacaccattcttcttctctagccatatttatatgaggataaagtaataaatctctgtgctattcaaggnnnnnnnnnnnnnnnnnnnnnnnnnnnnnnnnnnnnnnnnnnnnnnnnnnnnnnnnnnnnnnnnntgcacaaaataatttaactgtaaatattactacatagtgtaaaacaattttaaaaaaatttttacactctacagtaaatcccactttctaattctataaaagaatttattggaagtccacattaaatgtttagatattaaatgcttacattcagtttgatgggaattcaattttcacaagttaactgagactttgtcttaaaagttcatctatttgagttttgtacatattttttacatcttcgagatctaatcgaagttcttctgcctcttctgctttttctccatacatctgcagaatagtgttgtacctttgatccaaatctcttagctgagttctaagtttgggtatctccttcaccttctcttcaagttcatcattttgatttgttaatttaactagttcttcagccattattgatcgagttttttctagattgccaatttctagctgtaaatgagtgatttccccttcccttagctttagctgagactgtaggttttcaattatgcttgatcctgctcccatccttacagcatcataaagattgcttccatttgctgatataggcattggtccaaatgagtgatcatgagactcatcctgagacagaaaagatgtctgtagtcctgccatatcaacaccacttattgaacttgagcgtgacatggtgggagtgctagaaacagaaaatggcttgcgttccttttcttttattgtttcttgagtaaaaatggctttcttcctttcttgttcaactttcattctttccatttctaactgactattcaacaatgtcttttctttcctcgtctcttcaagtgttcttacatattcatcttttaggttttccaattcaacctggtacctattgttctcatcctccagtttacacagcctatttttctctgattctagctgggcttgaaatctactgttttcctgtcttaaaagagaattctgtgactccatggaagacatctgaattttgttagcaaggagttcttctgtagctgcacgttctctctcaactgctgctgccagcaaggtctgggattcaccaagcctatcagaaagattcttctctaatttctcccacgacgatgtctgggatcccagggttgcttgcaaattttctatttgtcgaagcaatggtcttgttgttgatgaaacactttgactcagttcctggtttcgattctctgcttcctggagtctctgctgaagttcaccgatctcatggcgtaaataatcctcctttctggcagccgcttgttctgtacgctgcaatgcaagcctaaggtcccccacttgaatggctaatgtttcttgctgctgacgggcttcttcttgggccttctctaatgctgcagaaagttcttctttagctttcatttcacggctcagagcagcttcctgtgcctcactatcctttgcagcattggctttgtgaagatcagtaagttctttgtatgcactatccagccaa

SEQ ID NO: 188718 - DNA, 939 bp, Homo Sapiens
ttggccgaaagactggagccgtttccttgtggctggagcgcttcccgtagcctcggggaaggagcaggatttagaggaccactagttggaccccatcctcgtgctggaggaacaggaacctctttcaggagctataaaagaaagggaggaatcatgtccacaattgcagctttctatggcggcaagtccattctcatcacgggggccacaggctttctgggcaaagtgctgatggagaagctgtttcgcaccagcccagacctgaaagtcatttacatccttgtgaggcccaaggctggccagacactgcagcagagggttttccagatcctagacagtaagctatttgagaaagtcaaagaagtttgtccaaatgtgcatgagaagatcagagctatttatgcagatctcaatcagaatgactttgccatcagcaaagaggacatgcaggagcttctctcctgtacaaacataatatttcactgtgcagccactgtacgctttgacgacactctcagacatgctgtgcaacttaacgtcactgccacccggcagctcttgcttatggctagtcagatgccaaagctggaagcctttatacatatctctactgcctattcaaattgtaacctgaagcacatcgatgaagttatctatccgtgccctgtggagccaaaaaaaatcattgattcccttgagtggttagacgatgctattattgacgagattacacccaagctgatcagagattggcccaatatttatacctacaccaaggccttgggagaaatggtggtgcagcaagagagcaggaacctgaacattgccatcataaggccctccattgtgggagcaacttggcagagcctttcccaggttgggttgataatataaatggacctaatggaatcattattgcgactgggaaagggtttcttc

SEQ ID NO: 188719 - DNA, 1438 bp, Homo Sapiens
ttggcttcgaacccgagaggccttaccagtgcgcgttttctggctgcaagaagacatttatcacagtgagtgctctgttttcccataaccgcgcccatttcagggaacaggaactgttttcctgctctttccctggctgcagcaagcaatatgacaaggcttgtaggctgaaaattcacctgcggagtcacaccggcgagagacctttcctttgtgactttgatggctgtggctggaacttcaccagcatgtccaaactcttaaggcacaaaaggaagcacgacgatgaccggaggttcatgtgccctgtggaaggctgtgggaaatctttcacgagggccgaacatctgaaaggccacagcattacccacctgggcacaaagcctttcgtgtgtcctgtggcaggctgctgtgccaggttctctgctcgcagtagcctctacattcactccaagaaacacctgcaggatgtggacacttggaaaagccgttgcccgatctcctcttgtaataaactcttcacatccaagcacagcatgaagacgcacatggttaaaaggcataaggtgggccaggatctcttagctcagctagaagcagcaaattctcttacacccagcagtgaacttaccagccagagacagaatgatctcagtgatgcagagatagtgtctctcttctctgatgtacctgacagtacttctgctgcattgctggacacagcattggtgaactctggaatcttgactattgatgtggcttctgtgagctcgactctggcagggcacctccctgctaataataataattccgtagggcaggctgtggaccctccgtccttgatggccaccagcgaccctcctcaaagtctggatacctctctcttttttggaacggcggccactggttttcagcagagctccttaaatatggatgaggtctcaagtgtaagtgtggggccattgggatctctggactctttggccatgaaaaactccagtccagagcctcaggctttgacacccagcagtaagctaacagtggacacagatgctctgactccttcgagcaccctttgtgaaaacagtgtctcagaactactgacaccaaccaaagcggagtggaacgtacatcctgactctgacttctttggacaggagggagaaacccagtttggattccccaatgcagcaggaaaccatggttctcagaaagaaacagatcttatcactgtgactggcagctcatttttggatgcaattggagaaactggctgttttaccaaggctttgactggaagggtatgcttccctttaaggaatcaagcttgacttgcagagctgacaaaaactccttggaaaaactggcctcatatcttgtctatactgtcctttgtacagggttcctattctgcagcggagtaatgaatgtttatttt

SEQ ID NO: 188720 - DNA, 951 bp, Homo Sapiens
taccaggtctggtttttgaaattctttctctgtattaaacaccaaaacttaacatatagtttactttgtgttaaacaacaacagtatgttttaaagcaagtatgtctttatttgtaagcatattactgaaacgatcaaatgaacagaagtggataaacgtcgagtcacttggctgagatcatacgcatcttccgtactgcttgtattaggatgcaagattgaatgtgtcttttttttaaaaatgcagccttgtgttgcactctgaaataagtgatttaaaaagaaaaacatgatacagagatcccatcctgaccttggaggcttggataaagctgtggggagacagcctcatggtccagccaggctagtctgcctgcttcaggactctcaagatctccccaagactttcaggatcagctgctgttaatcaaacaagtgcttataaaaatggaaattgggacaaaggaaatgttaaatttcctccctgcaaccaggcagatgagaaatatggaaataaggaaaagggaaaatgaagatatgacaaagttgatgaaaaggttgaaatagtgatttatacatgatgggcaatcaagtgccccttttgccctgttttttggagagggtgtatcattgcctcaatggtgcgtctgcctgcactgagggcattacacatggctgactcgacctccctgcctcttacactctgtgtattttgtgaagctccacaaacggggtcacgtcatccaggtgaggccaccaccggtacagaaacctctcggcaatggttcttagccagggggtgactttgacttcaccccctcgcctccctctccagcaagctccccacagctcctcttggggacaggtagaggatgcttttcgattcattgggatccgggctccagtttgacgtttttcctctcaagcgaaaggtaccaaatttcagctctc

SEQ ID NO: 188721 - DNA, 963 bp, Homo Sapiens
ttccccaggcaaacggaaggcttccaggtagaggcggagggcttcgtccagtcgcagaccctgaaaactgaaggtgctcacaaagctctccaacaggtcaatgtttttgcggtcactcacaaactctccaatcatcttcttgtccagccgagggttctctcggagccactgagcaacctctgtgttgtccattgggatggtgaggaggcctttctcttgcagaaactgaatccccttctttggtttctgattgaactgctctgtgccagtgattagcagcttctttttgtttttaatttcaattagttcccgtggatctggcaggagacaggaaaatcggggtggcttccgggcaaactttttgtcagccccagagtcaacagcttcctccagatcactgcatcctgatttcccatgttctggtggcagccgccctccacctggcagatgcaggcctgggatgtctgaggccatgcctacagctttcccatcgctggcagttctctcagtattgctagcttctcgggtgccatctactatctcacagcttggtctggctgtctccttcttctcttgctgggtgaggctgttgaggactttagcctggcagtgggcctcggtgctgtcaatcactgtcaatagggcatcaagagatagtaggtgtgttgtatagagttgaccagacacagggaaggcattcttggacagcagctttgtgagttcctcaaagaggttggaacagtagtagtcacaatcatagttgatgtagagctctgtgacaaagctggggatgcgccagagctgcacaatggcctccagtgccatctccttcatctcataaggcatcttggggttctccacagtgatgatctccataagctttttgatgtacatctccatttggaacttgaggtgctctcgcatgctctcaaacagtaggaagcatactcgcagggaagccaa

SEQ ID NO: 188722 - DNA, 1533 bp, Homo Sapiens
  misc_feature (1294)..(1303): n is a, c, g, or t
ttggataagaagaagaaattgaagaagaagcagaagcgccaggcagaattactagagaagcgaatgcaggaaattgaggaaatggagaaagagtcgggccctgggcaaaaaaagaccaaacaagcaagaagaatcagagagtcctgttgaaagacccttgaaagagaacccacctaataaaatgacccaagaaaaacttgaagagtcaagtaccattggccaggatcaaacgcttatggaacgtgatacagagggtggtgcagcagaaattaattgcaatggagtgattgaagtcattaattatactcagaacagtaataatgaaacattgagacataaagaggatctacataatgctaatgactgtgatgtccaaaatttgaatcaggaatctagtttcctaagctcccaaaatggagacagcagcacatctcaagaaacagactcttgtacacctataacatctgaggtgtcagacaccatggtgtgccagtcttcctcaactgtaggtcagtcattcagtgaacaacacattagccaacttcaagaaagcattcgggcagagataccctgtgaagatgaacaagagcaagaacataacggaccactggacaacaaaggaaaatccacggctggaaattttcttgttaatccccttgagccaaaaaatgcagaaaagctcaaggtgaagattgctgaccttggaaatgcttgttgggtgcacaaacatttcactgaagatattcaaacaaggcaatatcgttccttggaagttctaatcggatctggctataatacccctgctgacatttggagcacggcatgcatggcctttgaactggccacaggtgactatttgtttgaacctcattcaggggaagagtacactcgagatgaagatcacattgcattgatcatagaacttctggggaaggtgcctcgcaagctcattgtggcaggaaaatattccaaggaatttttcaccaaaaaaggtgacctgaaacatatcacgaagctgaaaccttggggcctttttgaggttctagtggagaagtatgagtggtcgcaggaagaggcagctggcttcacagatttcttactgcccatgttggagctgatccctgagaagagagccactgccgccgagtgtctccggcacccttggcttaactcctaagcccctgcccagcaccacagcagagatcacacactgaccctccgcccttccccttcaagcattttcctcttcccttttcagggtgaagctcttccttcaagagtttctagatcttgnnnnnnnnnnaatccaacatgttcatttgggtttgcttacttgaccctgtggagatccccacagccattgggcatcctaatgaatttggccttggttgggctctgccaaagactaatggactaaaatgtgaaacagcctcttgccctgtacctttccttcccattaggacatcctttaaattataagcatcctttttgaaagagctatgaagtgtatgagcccatccttttattcattga

SEQ ID NO: 188723 - DNA, 1332 bp, Homo Sapiens
gagggtgacaagttggtgcaggaggtcaggctggctatcaaatagttcaggtgtcagcttcttcatcacttcttccaaatgttctgctgcaagtgagggcaccccataccaggtcttcggctcaccccagtggaggtagttaatggagtaactccagtgatcctcaatatgccagcaaaaggctgagaagaccatgcccacgtagagccagggcaccttcatgccagagatatctgcattgatgtggcacagtacagactgttccaacaccggcatcacatttaggttccaaccactggtagcatactcctcctcttcgggggttaggtgccgtttactgtcactgacagggaaaccgctgccaaattctttggaatggatgtcagctccatactcaacagtcacatcttcctcaatgctatttaccagcctccagaactccttctccacaagttctgtgggcaccatatgcacgggcatgttgaagtagtcagctttaaaggagtcggccatctcgccaaagctctgcagagtgtattcccgggtagcctgctcaaagccaaaggcttctgggggccgcttacactccgccatgacacactttgggcaccgccagacacccttggggatctcaggcagaggaggcagcaggcagaagatgtggtagttgtcatcacagccatcacacagcaggagcttgtcatcctcatcccctcgagaacacatccggcagacatatgactcaataaactgggcattgctgtggttcctccgtagcctcatggtcatcttggtgcagggttctgggctgtgactcagctcctccttgctctccaggaaggtcttaggcgatgttgactccaccttcacatccccacctaactcctccttcaccactactgtggggggacactcaggcccctccttatctttcttccgcagagtcttgtctttggccatgaggcccaggcccatcatcttggggcctgccccatagatctgtagctttttcagctctggattcttctcaatgtcttcctctgtgggttccggatcaggctgcagtctcttggcccgccggccatagctgttgaacttggaaggctgcacagactgtcgtagggggatgctgtggggtttgtattccttgtccttctcctcattatcaaatggacgtgtgttacacacaaggttggctccagactggtacatttcatagggataaacaatgcgttcgtagtgggagcgtagcaaggagccaatatttttgcctggtggatagttgaggcgctgggctacccgagcccaccgacgggccttgcagatagccaa

SEQ ID NO: 188724 - DNA, 1246 bp, Homo Sapiens
  misc_feature (82)..(103): n is a, c, g, or t
ttgggtcaactgtttttgattaacaaaagtaacaatttcatatggttcaacctaatactccaacttaagtttcttacacacnnnnnnnnnnnnnnnnnnnnnnataaagattactgaaggtgttggcatcttgagtattttatttgttcccagaagaaattcattgtaaacagtcttagttacagagctgatgtgtctctgcttactactgaaggatgtgaatgaatggttgttatgagaccagagggaggtggtcttaaacctgccatgtgcttagcaccaaggtccttttcagctcagaattttctctttttccttactgttacaattgtcattaacgtttcttatgtacaaggtttggtggggtaggcgatttttttaccacattcgaacagtgatggtcagtcagtttctgtagagtatctgtgtgcatattaacgctctaattatattttaaaatcttattttatataggatgtaattggaaaatcgatgaatcaagcaatctgtattccattgtatagagataccagaaggtaattctgtttacctattggatggtgtaattccgcagccaatttaaatttttctcatttctttttcccttttattttagtgaggattctacacgtagattgttcaaatttccttttctgtggaataataaaacttcaaatctacattatcttctttttactattctagaagattcactttataaaatgtgcatcttaaggagacatactgatatttctcaatctgtgagtaatggactaattgctattaaatttgggagctttacatatgccacaacagaaaaagtcagaagaagcatctacagttgtttagatgcacagttttatgatgatgaaactgtaacagtagttcttaaagacactgtaggacgtgaaggaagagatagactcttggtccagctgcctttgtctttagtatataacagtgaagattctgcagaatatcagttcactgggacttattctacaaggctagatgaacagtgtagtgctattcccacccgtaccatgcatttcgagaagcactggagattactggaaagtatgaaagcacagtatgttgctgggaatggttttcgaaaagtgtcctgtgtgttaagctcaaatcttcgtcatgtgagagtatttgaaatggaacatagatgatgaatgggagctcgatgagtcttcagatgaagagaggaggcagtaataagcctgtaaaaataagg

SEQ ID NO: 188725 - DNA, 882 bp, Homo Sapiens
ttggatctccattgctgaaaaccgcagtgccttcagctaccattgcaagaccccagattgcaagggatggtgcttctttgaggatgatgtcaatgagttcacctgccctgtgtgtttccacgtcaactgcctgctctgcaaggccatccatgagcagatgaactgcaaggagtatcaggaggacctggccctgcgggctcagaacgatgtggctgcccggcagacgacagagatgctgaaggtgatgctgcagcagggcgaggccatgcgctgcccccagtgccagatcgtggtacagaagaaggacggctgcgactggatccgctgcaccgtctgccacaccgagatctgctgggtcaccaagggcccacgctggggccctgggggcccaggagacaccagcgggggctgccgctgcagggtaaatgggattccttgccacccaagctgtcagaactgccactgagctaaagatggtggggccacatgctgacccagccccacatccacattctgttagaatgtagctcagggagcttcgtggacggccttgcttgctgtagcgttgtaggggccctgcctgcactgcggttgtccacggtcacatctgccccagtgcctttgtccttcccttggggcttgccggccagacttctctcccctgcggctcccacctctgcctgaccccagccttaaacatagcccctggccagaggccttgctgggtggagcctctgtgtgactccatactcctcccaccacaacactcatctgtcaaacaccaagcactctcagcctccccgccttcaactgtcagctttctggggctaacttctctgcctttgtggttggaagcctgaaggcctcttggaacctcttgct

SEQ ID NO: 188726 - DNA, 1772 bp, Homo Sapiens
ttgggtacagttcctcagatgtactgcttagctgttgttgaggttgtaagaagaaaaatgttcataaaacactacagggagtgggctggtgctttagtcaaagatggaaagagattatatgaagcagaaaaatcaaaaagggaatcctttgggaaattatttaggaagtcttttttaagaaatcgtctgtttaggggactggactcctggcccccttccttttgtactcaaaagcctcgaaagtttgactgtgaacttccagatatttcattaaaagatttacagtttctgcaatcattttgtccttcggaagttcagccattcctcagggttcccttactttgtgactttgaacctctacaccagcatgtacttgctctacataatttggtaaaagcagcacaaagtttggatgaaatgtcacagaccattacagatctactgagtgaacaaaaggcatctgtgagtcagacatccccacagtctgcttcttcaccaaggatggaaagtacagcaggaattacaactactacctcaccgagaactcctccaccactgactgttcaggatcccttatgtcctgcagtttgtcccttagaagaattatctccagatagtattgatgcacatacgtttgattttgaaactattccccatccaaacatagaacagactattcaccaagtttctttagacttggattcattagcagaaagtcctgaatcagattttatgtctgctgtgaatgagtttgtaatagaagaaaatttgtcgtctcctaatcctataagtgatccacaaagcccagaaatgatggtggaatcactttattcatcagttatcaatgcgatagacagtagacgaatgcaggatacaaatgtatgtggtaaggaggattttggagatcatacttctctgaatgtccagttggaaagatgtagagttgttgcccaagactctcacttcagtatacaaaccattaaggaagacctttgccactttagaacatttgtacaaaaagaacagtgtgacttctcaaattcattaaaatgtacagcagtagaaataagaaacattattgaaaaagtaaaatgttctctggaaataacactaaaagaaaaacatcaaaaagaactactgtctttaaaaaatgaatatgaaggtaaacttgacggactaataaaggaaactgaagagaatgaaaacaaaattaaaaaattgaagggagagttagtatgccttgaggaggttttacaaaataaagataatgaatttgctttggttaaacatgaaaaagaagctgtaatctgcctgcagaatgaaaaggatcagaagttgttagagatggaaaatataatgcactctcaaaattgtgaaattaaagaactgaagcagtcacgagaaatagtgttagaagacttaaaaaagctccatgttgaaaatgatgagaagttacagttattgagggcagaacttcagtccttggagcaaagtcatctaaaggaattagaggacacacttcaggttaggcacatacaagagtttgagaaggttatgacagaccacagagtttctttggaggaattaaaaaaggaaaaccaacaaataattaatcaaatacaagaatctcatgctgaaattatccaggaaaaagaaaaacagttacaggaattaaaactcaaggtttctgatttgtcagacacgagatgcaagttagaggttgaacttgcgttgaaggaagcagaaactgatgaaataaaaattttgctgga

SEQ ID NO: 188727 - DNA, 1440 bp, Homo Sapiens
ttggctggagaacaactacctgaagaatgtagtcaagcaaatttaccaagatctgtttcaggactgccatttctaccactagacccttggaccaccattggaacaaccaagcagaatgtacttgatattatttcagggtcccattgctgttcagcctttgtttttacgtcattacaagctgagtaaaattccttctgatgatgttatagttaatctgtatgttttttatatctctgcagaatgatggtgatgaagtctggatggtaggcctcatagcctactatcaacttactcatctttgtaccaaaggtttaagtaataggacacttaggaaaaatgtctcctaactaaactagtgctttctgctttagtacaagccctaaggattaacttaagtataagaagtgttatcactgacaagaacattagccattttcccataactagatagagccaccacacccagcaatgttttcttaataagtatagtttttctagggaaagttaattcatttttgtctagtacatatatgtaaatatattaatgttgtttttgtgtttgtgatgtagtaaggagatgtacatagaaattcattgaggtatatagatactcatctgtctaggcagttcccaattttctgaagaatgttttacagcaaaattttctattttcttttattaaatagtgacacgtcaaacaatgtcacatccaaaacactagtttcatcaatttctagcagtaataatagacttgctgtaagtattggtttctgatgccatacccttgtcatacatattattaaatgaccaatattatgtatgaagtagacaaaaaaatttactcaaacttcattcaaatcctaattgtgataatttttgttttatatttaattataaaccaaaatacatttgcatttttaagctaatttgtctcaaaattttgctttatatttttggatcaggttaaagtcctgtggatcccctgaatgttattgtccctcttgattggtttttacttctgagctatacgtcaaaagacacataagcttcaaaagtcaagacaaacctcatttgccataaaaatcaagatatagatgttctgttccgtaaactccttgaaaaacattttaaagtcatcaatatgatctgtttcccatgaaacttaagttagctttcttattggagttatttcttttctgtaagtctgaaaagtagagattttgttttacgcattttagtaacctgcaacaaccaactctaaaaaagatttggcttgtaatgacggtctctgcttttttgggtttggagtacacaattgtaatatttacttagttatttgtgtttttctttgttcaaggtattgactagtttcataaaattttttgcaaagtttttctttcattggttggaaagcagattacattttgcactattaaaata

SEQ ID NO: 188728 - DNA, 1208 bp, Homo Sapiens
ttggcagtgttattaaggaaaagcgggatgcctatgtgagccgcctgaatgccatctatcaaaacaatctcaccaagtcccatatagaaatcatccgtggccatgcagccttcacgagtgatcccaagcccacaatagaggtcagtgggaaaaagtacaccgccccacacatcctgatcgccacaggtggtatgccctccacccctcatgagagccagatccccgccgcagcgtcattgttggtgcaggttacattgctgtggagatggcagggatcctgtcagccctgggttctaagacatcactgatgatacggcatgataaggtacttagaagttttgattcaatgatcagcaccaactgcacggaggagctggagaacgctggcgtggaggtgctgaagttctcccaggtcaaggaggttaaaaagactttgtcgggcttggaagtcagcatggttactgcagttcccggtaggctaccagtcatgaccatgattccagatgttgactgcctgctctgggccattgggcgggtcccgaataccaaggacctgagtttaaacaaactggggattcaaaccgatgacaagggtcatatcatcgtagacgaattccagaataccaacgtcaaaggcatctatgcagttggggatgtatgtggaaaagctcttcttactccagttgcaatagctgctggccgaaaacttgcccatcgactttttgaatataaggaagattccaaattagattataacaacatcccaactgtggtcttcagccacccccctattgggacagtgggactcacggaagatgaagccattcataaatatggaatagaaaatgtgaagacctattcaacgagctttaccccgatgtatcacgcagttaccaaaaggaaaacaaaatgtgtgatgaaaatggtctgtgctaacaaggaagaaaaggtggttgggatccatatgcagggacttgggtgtgatgaaatgctgcagggttttgctgttgcagtgaagatgggagcaacgaaggcagactttgacaacacagtcgccattcaccctacctcttcagaagagctggtcacacttcgttgagacccaggagacacgtgtggcgggcagtgggacccatagatcttctgaaatgaaacaaataatcacattggacttactgtttgagttttatgtatttctttattttaat

SEQ ID NO: 188729 - DNA, 1079 bp, Homo Sapiens
ttgggggtgatctgaattgcagccaaggcgaccttgagtaggtgaatgttggatgtgtacccaaaaaggtaatgtggaacacagctgtccactctgaattcatgcatgatcatgctgattatggctttccaagttgtgagggtaaattcaattggcgtgttattaaggaaaagcgggatgcctatgtgagccgcctgaatgccatctatcaaaacaatctcaccaagtcccatatagaaatcatccgtggccatgcagccttcacgagtgatcccaagcccacaatagaggtcagtgggaaaaagtacaccgccccacacatcctgatcgccacaggtggtatgccctccacccctcatgagagccagatccccggtgccagcttaggaataaccagcgatggattttttcagctggaagaattgcccggccgcagcgtcattgttggtgcaggttacattgctgtggagatggcagggatcctgtcagccctgggttctaagacatcactgatgatacggcatgataaggtacttagaagttttgattcaatgatcagcaccaactgcacggaggagctggagaacgctggcgtggaggtgctgaagttctcccaggtcaaggaggttaaaaagactttgtcgggcttggaagtcagcatggttactgcagttcccggtaggctaccagtcatgaccatgattccagatgttgactgcctgctctgggccattgggcgggtcccgaataccaaggacctgagtttaaacaaactggggattcaaaccgatgacaagggtcatatcatcgtagacgaattccagaataccaacgtcaaaggcatctatgcagttggggatgtatgtggaaaagctcttcttactccagttgcaatagctgctggccgaaacttgcccatcgactttttgaatataacgaagattccaaattagattataacaacatcccaactgtggtcttcagccacccccctattgggacagtgggactcacggaagatgaagccattcataaatatggaatagaaaatgtgaagacctattcaacgagctttaccc

SEQ ID NO: 188730 - DNA, 1248 bp, Homo Sapiens
  misc_feature (91)..(117): n is a, c, g, or t
ttggctttgtattcttcatgaaatgtgttttgtctttttttattactagtgtttaagtcattttttacttgaatcagatggtgtcatttannnnnnnnnnnnnnnnnnnnnnnnnnntaaaatccagactttctttttctacatgtgagatagttttcattttaactggcatgtcatttgcacacaaaaataaagactagagcaaaataatgcaacgcaggaggagaaaagaaatgcactaagacaagaacattctctcatagaacattgatctgttttacaggaaacaaaccttgccttgaaatttacacagtgagactgtacataattgcatgaaaatagctatttttttcctaagacatttttcattcatgaatattttcaagtttttcatactgtacacatttcttaaaacacatgataccagcagcaactgaaaatgaatgccgaatttggtacacatgtgttatctacctcaaggtaacaagagtatgtggcaaaacatataccacccatagtgcttcacaaaatgcacttctatttagccagcgtttattgtagtaaactattcttaataaaactcactcactgtttataaatgttctggtatgcattctttatagtgaagtgttaatacatcacatcttatttattttagcaaatcagtatattttctgtatttaattataaaaaattaacttagtttttaaaatttatttgcaaatatactttactttttccatttggcactatggtttgttgcctacctagctgcatctataatgtcagcttatcctaaggctgtccacgtacttaatttacttaagtgttcattttaagtaacgtgctcactgtgtataggaatttgtattttggaggtgcttgatctatctacaaagaaaaattaattaggaattactttattataaaatgctcctagaagtcttaattgtgtttattttttaaaaaaacaaatgttagacttgtgtgcatggaagtaattaaggtacatcattattgtagtttgaaagttgtacatgataagacattttgtttttactgtatgtttttactgaatgatctattccccatcccaaggcaagcatgaataaaattaggttaaacgtagcatgtggcatcgcagtctcttagaatttgtttcatctattttattttattgaatactgtctgtatctttggttatcctgtttgaagaaaaaggacaaataaaacatggccagcaaatac

SEQ ID NO: 188731 - DNA, 1554 bp, Homo Sapiens
ttggcattcatgcagctatgattcagttcttgcactggtgtgcaaagagccaacccagaacaagccagatcttcatctcttccagtgtgatgaggttaaggcaaacctaattagtgaagatattgaaagtgcaatcagtgacagtaaaggagggaaacagaagaggcggcccgacgccctgaggatgatttccaatgcagaccctagtataccgcctccacccagagctcctgcccctgcgccccctgggaccgtcacccaggtggatgttagaagtcgagtggcagcctggtctgcatgggcagccgaccaaggggactttgagaaaccaaggcagtatcatgagcaggaagaaacacctgagatgatggcagcccgcattgacagagatgtgcaaatcttaaaccacattttggatgacattgaattttttatcacaaaactccaaaaagcagcagaagcattttctgagctttctaaaaggaagaaaaacaagaaaggtaaaaggaaaggaccaggagagggtgttttaacgctgcgggcaaaacctccacctcctgatgaatttcttgactgtttccaaaagtttaaacacggatttaaccttctggccaaactgaagtctcatattcagaatcctagtgctgcagatttggttcactttttgtttactccattaaatatggtggtgcaggcaacaggaggtcctgaactagccagttcagtacttagtcccctattgaataaggacacaattgatttcttaaattatactgtcaatggtgatgaacggcagctgtggatgtcattgggaggaacttggatgaaagccagagcagagtggccaaaagaacagtttattccaccatatgttccacgattccgcaatggctgggagcccccaatgctgaactttatgggagccacaatggaacaagatctttatcaactggcagaatctgtggcaaatgtagcagaacatcagcgcaaacaggaaataaaaagattatccacagagcattccagtgtatcagagtatcatccagccgatggctatgcgttcagtagcaacatttacacaagaggatcccacctggaccaaggggaagctgctgttgcttttaagccaacttctaatcgccatatagatagaaattatgaaccactcaaaacacaacccaagaaatatgccaaatccaagtatgactttgtagcaaggaacaacagtgagctctcggttctaaaggatgatattttagagatacttgatgatcggaagcaatggtggaaagttcgaaatgcaagtggagactctggatttgtgccaaataacattttggatattgtgagacctccagaatctggattggggcgtgctgatccaccttatactcatactatacagaaacaaaggatggagtatggcccaagaccagctgatactccccctgctccatcacctcctccaacaccagctcctgttcctgttccccttcccccttccactccagcacctgttcctgtgtcaagtcccagcaaatataacacgtcaaa

SEQ ID NO: 188732 - DNA, 995 bp, Homo Sapiens
ttgggttttctccggtacaggttgaggctactaaggtatttggctattataaataaaatagtgatgaacacgtgtacaggtgtttgtacggacataagttgtcatttctcttgagtaaatacctaaaagtgggcttgctggagttttactacccttggatgctgctgttgacatggaaaagattgaggaacaatttgctaatctgcacattgttaaatgttccttaggaaccaaagagcccacttaccttcttggtatagacacatcaaagactgtccaagcaggaaaggaaaacttggttgctgttttatgttctaatggatcaatcagaatatatgataaagaaaggttaaatgtactacgagaatttagtggatatcctggacttcttaatggagtcagatttgcaaattcctgtgacagtgtatattcagcatgtactgatggcactgtgaaatgctgggatgctcgagtagccagagaaaaacctgttcagctcttcaagggttacccttccaatatttttatcagttttgatattaattgtaatgatcatattatttgtgctggtacagaaaaagttgatgatgatgcattgttggtgttttgggatgcaaggatgaattctcagaatttatctacaactaaagactcacttggtgcatattcagagacacatagtgatgatgtcactcaagtacgtttccatcccagcaatcccaacatggtagtctcaggttcatctgatggcctggtaaatgtatttgatattaatattgataatgaggaggatgcactggttacaacctgtaactcaatttcatcagtaagctgtattggttggtctgggaaaggttataaacagatttactgcatgacacatgatgaaggattttattggtgggatcttaatcatctggacactgatgaaccagttacacgtttgaacatccaggatgtcagaagagtagttaacatgaaagaagatgctttgg

SEQ ID NO: 188733 - DNA, 1629 bp, Homo Sapiens
ttggcttgtgattacaacggactggatcagctgggacaagctgaatcggggatttttgcccagtgatgaagtttccagagcattccttgcttcttttatcttggtctttgaccttcttattgtgatgcaggactgggaattcccacatttcatgggagatgttgatgtaaatctccctggtttgcacacccctcacatgcagttcaagattcctttcttccagaaaatcttcaaggaggaatatcgtattcacataacaggcaaatggtttaactatggaattatcttcctcgtcttgattttggatcttaatatgtggaagaaccaaatattttataaacctcatgaatatgggcaatatatcggcccggggcagaagatatatacagtgaaagactcagaaagtttaaaagatttgaacagaaccaagctatcctgggaatggaggtccaatcacactaaccctcggactaataaaacatatgttgagggagacatgttcttacacagcaggttcataggagccagtcttgatgtcaagtgtctggcctttgttccaagcctgatagcctttgtgtggtttggattctttatttggttctttggacgatttttgaaaaatgagccacgcatggagaatcaagacaaaacttacactcgcatgaaaagaaaatctccatcagaacatagcaaagacatgggaatcactcgagaaaacacccaggcttcagtagaagaccccttgaatgacccttctttggtttgcatcaggtctgacttcaatgagatcgtctacaagtcttcccacctaacctcggaaaacttgagctcacagttgaacgaatctactagtgcaacagaagctgatcaagacccaacgacttctaaaagtacacctacgaactagactcggagatagacttggagataacacaaaaagcaaccttgagtgtaactttaaaaatttagtctttccttttgtatatgtaaggtttacgtagtgttaggtaaaaatatgaacaatgccacaacggtgctcaacatgctttttctaggattcattgttttctatttgtattataatacacgtgcctactgtatactcaacagtcctctagagattgcttttcacaattgcacaagctattactgactttacagcatagtggaagattagctgatgacccatgtatctgatgttcaaccatagtggtgccttgagacattaaactgtttttaactgtaccagaaatgaagtgtggaacagttacctaacctatttcacatgggcgttttgtatacaactattttgatctacacttgatgtctgagcagaaaacagaaatagctaaatgtgactcaggaagtatctcttggtttcttattcagcagcagagttggtgactttgacaactggactgcagagaaacatggtgatcaccttttaatttttattgggctgtctgccaaatataaatacagatgcaaaattcagtaataggagatccataacccaacatgggtcactactcgtgaaatgtgactttctcccaccagtaattgaaatgagtgatgatacctaattatgttttcctaattaaagataaatttgctacttgattaaaaatc

SEQ ID NO: 188734 - DNA, 1027 bp, Homo Sapiens
ttggcacagagaggagacacaggaaggccagtgggcagggggcaaaaatgcagaacttggagcaggatagtgtctgaaaatttctcacatggggtcattagctgtggttggggggaaggaaatctccagttcatttactcactgattgactgattgattcattcattgtttccatttcccgagcactcccttgctcctgctcacattccaggcccttgtcctggcctcagggtgatccaggagctgcaggacagaagggccaggcaggagagaaggggagagccggcatgcctggtggacctggcaagagtggttccatggggcctgttgggccaccgggccctgcaggagagagaggccaccctggagctccggggccttcggggagccctggcttgcctggtgtgcctggctccatgggagacatggtgaattatgatgaaatcaagaggttcatcagacaagagatcattaaaatgtttgatgagagaatggcttactacacctccaggatgcagttccccatggagatggcggcagctccgggacgaccagggcctccagggaaggatggtgctccgggcaggccaggtgctccagggtcacctgggctccctggtcagattggcagagaaggacggcagggcttgccaggagtaagaggattgcctggtaccaaaggtgaaaaaggggacattggtattggcattgcaggagaaaatggtcttcccggccccccaggtcctcaaggtcctccaggctatggcaagatgggtgcaacaggaccaatgggccagcaaggcatccctggcatccctgggcccccgggtcccatgggccagccaggcaaggctggccactgtaatccctctgactgctttggggccatgccgatggagcagcagtacccacccatgaaaaccatgaaggggccttttggctgaaattccccacctgcctttggatgaaagactccgttgggaataaatggccaaagcttataggactctgtgacaggttgtgaatg

SEQ ID NO: 188735 - DNA, 2459 bp, Homo Sapiens
ttgggtcatggcggaggggacggcagtgctgaggcggaacaggccgggcaccaaggcgcaggatttctataattggcctgatgaatcctttgatgaaatggacagtacactagctgttcaacagtatattcaacagaacataagagcagattgctccaatattgacaaaattcttgaaccacctgaaggccaagatgaaggtgtgtggaagtatgaacatttaaggcagttctgccttgagctaaatggacttgctgtcaaacttcagagtgaatgccatccagatacttgcactcaaatgacagcaactgaacaatggatttttctttgtgcagctcataaaactccaaaagagtgtcctgctatagactatactagacacacacttgatggtgctgcatgtcttctgaatagcaataaatattttcccagcagggttagcataaaggaatcatctgtagcgaaactaggatcagtatgccgtaggatttacagaatattttcacatgcttattttcatcatcggcagatatttgatgaatatgaaaatgaaacatttttgtgtcatcggtttactaagtttgtgatgaaatacaatttgatgtccaaggataacctgattgtaccaattttagaagaggaagtacagaattcagtttctggggaaagtgaagcatgaagggaatcataggaaaaatgtactgatcatataattaacattatgtactgtatatatcattttagacacatcaatcatgtatccatattatagcttctttgtttagtataggtttttgtatgctgggtttgccttttaaaatgggaaatactttttaagttattcataagctgtatattcaccagtgtggcactcatggtttttaaataagattagtattatctgtttataatgcctgttaataaaagaatttacagtttggtaaaattgctgctaaacaatcattggatcacaatcctcatcagacaaacccatctgtaaaaaaaatgagggagagcttgaggtttcacacaagccatttactaaagaggtagaaatgttttctattggttttaccttgagtttagatatcctaaaaaattctgtagtacgtagttttgtcttacctgttaactttccccaattgagataaaagtgttttaaaattctgtttatagtttttgatatgcatatataattatgtgtatatctaaatacaaatgcaaatgaagcattagtaatacttaaataattttactgtgctacataaagtataacatacttggaaaggatttaccgttctgcaacaacggactggtacatacaggatgatcacaatggtaaggcacataaattattttcccactggaaacctgccctgtccaccccttctcatttcccttaaccttatcttcaaactactttagctgagaagcttttcaccagactgagttagtggtggcttatacctatttatatttgtattaattgcttacagattatacctcatattagcaattacattacactacaagaaaatgtatttgcataggctcttgcttatctttgttttgcaaaattgttctacttagaaaacagtccttaaaatagtttgactcttcctgttagtaatatattaatctttcatttaaccagctaggcagcattaaatagaattgaagaaataccatagtatttattttacaccccctctcccacgaagtttatgtttggattacatgcacgtgtgagattatttgcaataattcataggttccaagggtgttgatgaatagtcatacatttttttggactttgttataattcattgtggtaagaatgattgaaatgcagatttaacaatcttataatctattgaatgccatttttgataaagcactggaggtcttattgccaaactgattgtaatgaggcagtaagggtgaaaacattgtacatgttgtgaagaaagtatttaaatccaacttttgaacagatttaacaaacatgaggaacttttttatttagaaggataattttgaaatgaagatgaaaatgtattcatcttaattgttttttcaaatttaagggaataatttataccatcttttcagacaagaatgtacagcaaaaataaggggaacagtagtatactgagagtgtgtgtatgtataatgtatgcctttccaagcttgccagtctttttggctttgaacactgcccatcagctacagtcattactgttccccaacccacaactatcttttaagaagtcttagttcacagtgaaaggaatgatgactttgaaattatggatttatattaatggcactataaaccaatggtaatggtaatttttaaacttgctaaatattgagaaactaaactactaagttaataaattatatatagcagtgtagctgttctctctagatggtgtctcacaatggatttctgttgc

SEQ ID NO: 188736 - DNA, 1257 bp, Homo Sapiens
ttggctcatgttagaaaatctgtgaatgctgaactttgtactcaagcatggtgtaagttccatgagattttgtgcagctttccacttattccacaggaagcttttcagaatggaaaactgaattctctacacctttgtgaagctccaggagcttttatagctagtctcaaccactacttaaaatcccatcggtttccttgtcattggagttgggtagcgaatactctgaatccataccatgaagcaaatgacgacctcatgatgattatggatgaccggcttattgcaaataccttgcactggtggtactttggtccagataacactggtgatatcatgaccctgaaattcttgactggacttcagaatttcataagcagcatggctactgttcacttggtcactgcagatgggagttttgattgccaaggaaacccaggtgaacaagaagctttagtttcttctttgcattactgtgaagttgtcactgctctgaccactcttggaaacggtggctcttttgttctaaagatgtttactatgtttgaacattgttccataaacttgatgtacctgctaaactgttgttttgaccaagtccatgttttcaaacctgctactagcaaggcaggaaactccgaagtctatgtggtttgcctccactataaggggagagaggccatccatcctctgttatctaagatgaccttgaattttgggactgaaatgaaaaggaaagccctttttccccatcatgtgattcctgattcttttcttaagagacatgaagaatgttgtgtgttctttcataaatatcagctagagactatttctgaaaacattcgtctatttgagtgcatgggaaaggcggaacaagaaaagctgaataatttaagggattgtgctatacaatattttatgcaaaaatttcaactgaaacatctttccagaaataattggctagtaaaaaaatctagtattggttgtagtacaaatacaaaatggtttgggcagaggaacaaatattttaaaacttataatgaaaggaagatgctagaagccctttcatggaaagataaagtagccaaaggatactttaatagttgggctgaagaacatggtgtatatcatcctgggcagagttctattttagaagaacagcttccaatcttgagtgtcacttatggcatattttggagggaaagaaactgccaaaggtaaaatgttctcctttttgcaatggtgaaattttaaaaa

SEQ ID NO: 188737 - DNA, 1596 bp, Homo Sapiens
ttgggaagccatcacttaccttgcactgagaaagaagacaaaggccagtatgcacagctttcctccactgctgctgctgctgttctggggtgtggtgtctcacagcttcccagcgactctagaaacacaagagcaagatgtggacttagtccagaaatacctggaaaaatactacaacctgaagaatgatgggaggcaagttgaaaagcggagaaatagtggcccagtggttgaaaaattgaagcaaatgcaggaattctttgggctgaaagtgactgggaaaccagatgctgaaaccctgaaggtgatgaagcagcccagatgtggagtgcctgatgtggctcagtttgtcctcactgaggggaaccctcgctgggagcaaacacatctgacctacaggattgaaaattacacgccagatttgccaagagcagatgtggaccatgccattgagaaagccttccaactctggagtaatgtcacacctctgacattcaccaaggtctctgagggtcaagcagacatcatgatatcttttgtcaggggagatcatcgggacaactctccttttgatggacctggaggaaatcttgctcatgcttttcaaccaggcccaggtattggaggggatgctcattttgatgaagatgaaaggtggaccaacaatttcagagagtacaacttacatcgtgttgcggctcatgaactcggccattctcttggactctcccattctactgatatcggggctttgatgtaccctagctacaccttcagtggtgatgttcagctagctcaggatgacattgatggcatccaagccatatatggacgttcccaaaatcctgtccagcccatcggcccacaaaccccaaaagcgtgtgacagtaagctaacctttgatgctataactacgattcggggagaagtgatgttctttaaagacagattctacatgcgcacaaatcccttctacccggaagttgagctcaatttcatttctgttttctggccacaactgccaaatgggcttgaagctgcttacgaatttgccgacagagatgaagtccggtttttcaaagggaataagtactgggctgttcagggacagaatgtgctacacggataccccaaggacatctacagctcctttggcttccctagaactgtgaagcatatcgatgctgctctttctgaggaaaacactggaaaaacctacttctttgttgctaacaaatactggaggtatgatgaatataaacgatctatggatccaggttatcccaaaatgatagcacatgactttcctggaattggccacaaagttgatgcagttttcatgaaagatggatttttctatttctttcatggaacaagacaatacaaatttgatcctaaaacgaagagaattttgactctccagaaagctaatagctggttcaactgcagaaaaattgaacattactaatttgaatggaaaacacatggtgtgagtccaaagaagtgttttcctgaagaactgtctattttctcagtcattttaaacctctagagtcactgatacacagaatataatcttatttatacctcagtttg

SEQ ID NO: 188738 - DNA, 1544 bp, Homo Sapiens
  misc_feature (56)..(74): n is a, c, g, or t
ttggatgaataaataaagcacaaaaacctctcttattctacaaggccataaaaggnnnnnnnnnnnnnnnnnnncagtccagtttgtcaaaagtatctcatacttataaacagtatgagataggaggattaaaatattattttaaagaaaccactgtttccccctaaaatgtcataagagcactgaagaacttgaaatatttttttcagagtttctcacacactttaaaagtctaacttttttgtgtgtaagcatttagcttgccagcatatttctttttggctccttaaattgcggttgtgtttgcagtattgtcacttttgctctcactgttatgttgaataataattagcatataattgtctacagaagcaagagcaatctggaaggaacaaaaatgttttctgtgattaacagtgaagaccttgtaaatgcagatgtgtgataaagcatttagtcagtcccccaaacagtcatgccaactgtgaaggaatgtcccacaaaacatttccattccctgaggaaaaacattttctttcctacatgtatctctggtatttagaattgtcactaataaccttttcaagtgattttggctattctctaatgaagatatggtccatttgtttttcttcctgcaatgtggtgtgcagagatgctgcatatcctttttatgggattgcgtgtgaatttgaaccatgagacattcctaataatttgttgtgagatataccaagcatggatgataagtgtgtttttagtggtgtgttgtttttttaaagaggtgattcaagtaccgttgctaagctgtcaacataccaagctgttgaaaaaattgaccatttctttcagaagtaattctcagcctgtggaataatagcaggtgaagacttcatagaaggcgacagattgatagggaggctattgaagcagtttttctgaagcctgcattttgagttagtttatagtgctaatagattctatataactgtgagagtttggtagtaaaccagtagggattgttttctctcctaaaaatttgcacactacttcattgtctaccaactttttacatattggaaaatagaaattgcaaatacatacatgtatggaaacatattcagattgggaaaaacaatggacattagtttttaaaaagttacgtggaagcaagatttctatatttgtttttttaaaggaagcagtcattctttctactaaatccatttcaagctagttctctgaaaattttgccatttatctacagaaatttgattataaatatgttcctttttcaaagaaactttattctagaacaaaatagtctatatggtacttgatctacatttaagtggaaaaattagcagtatttgaaagctcagtttatgtcattgtcttaacttcagatacaaataactgaacagaaagttttaacctttaatatctcatgttctgttttttattcagtattttcctttatgttaattcaattatatacttctgaatggcaccttactttttggaaacaaatcttctgttattta

SEQ ID NO: 188739 - DNA, 1543 bp, Homo Sapiens
  misc_feature (252)..(314): n is a, c, g, or t
  misc_feature (582)..(622): n is a, c, g, or t
ttgggctactcctactgtaagagagaagcggaagaacgtgacagcacagagcaggaagaggcagggcctgaaatcctctcgaatgagcacgtgggtgccagggcgtctccctcacagggcgactcggacgagagagagagtttgacaagggaagaggatgaagacagtgaaaaagaggaagaggaggaggataaagagatggaagaattgcaggaagaaaaagaatgtgaaaaaccacaaggggatgaggannnnnnnnnnnnnnnnnnnnnnnnnnnnnnnnnnnnnnnnnnnnnnnnnnnnnnnnnnnnnnnagaagcaaaaactgaaggtctgatgaaggatgacagggctgaaagtcaagcaagcagcttaggacaaaaagtaggcgagagtagtgagcaagtgtctgaagaaaagacaaatgaagcctaatcgtttttctagaaggaaaataaattctaattgataatgaatttcgttcaatattatccttgcttttcatggaaacacagtaacctgtatgctgtgattcctgttcactactgtgtaaagtaaactaaaaaaatacaaaatacaaannnnnnnnnnnnnnnnnnnnnnnnnnnnnnnnnnnnnnnnnaaataaatccgggtgtgcctgaacctcagacctagtaatttttcatgcagttttcaaagttaggaacaagtttgtaacatgcagcagattagaaaaccttaatgactcagagagcaacaatacaagaggttaaaggaagctgattaattagatatgcatctggcattgttttatcttatcagtattatcactcttatgttggtttattcttaagctgtacaattgggagaaattttataattttttattggtaaacatatgctaaatccgcttcagtattttattatgttttttaaaatgtgagaacttctgcactacaaaattcccttcacagagaagtataatgtagttccaacccgtgctaactaccttttataaattcagtctagaaggtagtaatttctaatatttagatgtcttagtagagcgtattatcatttaaagtgtattgttagccttaagaaagcagctgatagaagaactgaagtttcttactcacgtggtttaaaatggagttcaaaagattgccattgagttctgattgcagggactaacaatgttaatctgataaggacagcaaaatcatcagaatcagtgtttgtgattgtgtttgaatatgtggtaacatatgaaggatatgacatgaagctttgtatctcctttggccttaagcaagacctgtgtgctgtaagtgccatttctcagtattttcaaggctctaacccgccttcatccaatgtgtggcctacaataactagcatttgttgatttgtctcttgtatcaaaattcccaaataaaacttaaaaccactgactctgtcagagaaactgaaacactgggacatttcatccttcaattcctcggtattgattttatgttgattgattttcagaatttctctacagaacgaaagggaaatt

SEQ ID NO: 188740 - DNA, 1255 bp, Homo Sapiens
ttgggacatgaatagccaggggtctgacagcaatgaagaggactatgacccaaattgtgaggaagaggaagaagaagaagaagacgaccctggggacatagaggactattacgtgggagtagccagcgatgtggagcagcagggggctgatgcctttgatcccgaggagtaccagttcacttgcttgacctacaaggaatctgagggtgccctcaatgagcacatgaccagcttagcttctgtcctaaaggtatctcattcagttgctaaacttatattagttaatttccactggcaagtttcagagatattggacagatacaagtccaattctgctcaactgcttgttgaggctcgagttcagcctaatccatcaaaacatgttcccacatcccatccccctcaccactgtgcagtgtgtatgcagtttgtgcgaaaggaaaacctactctctctggcctgtcagcaccagttttgccgcagctgctgggagcagcactgctcagttctcgtcaaggacggcgtgggcgtgggagtctcttgcatggctcaggactgtccactccgtacaccagaggactttgtgtttccattgcttcccaatgaagaattgagagagaaatacaggcgctacctcttcagggactatgtggagagtcattaccagctccagctgtgccctggtgcagactgccccatggttattcgggtacaggagcctagagctcgccgagtacagtgcaatcggtgcaacgaggtcttctgtttcaagtgtcgtcagatgtatcacgcacccacagactgtgccacaatccggaaatggctcacgaagtgtgcagacgactctgaaacagccaactacattagtgctcacactaaagactgtcccaagtgcaacatctgcattgagaagaatggaggctgcaatcacatgcaatgctccaaatgtaaacacgacttctgctggatgtgtctaggagattggaagactcatggcagtgaatactatgagtgcagtcgttacaaggagaatcctgacatcgtgaaccagagccaacaagcccaggcgagggaagccctcaagaagtacttattctactttgagaggtgggaaaaccacaataaaagcttgcagctagaggcacagacataccagcggattcacgagaagattcaggagagggtcatgaacaatctggggacatggatcgactggcagtacctacagaatgctgccaagctcttggccagtgtc

SEQ ID NO: 188741 - DNA, 1008 bp, Homo Sapiens
ttggctctgccttggggcttgaagctcaagaagatgaggacccatcctataagtggagagaggaacacagactctcagcaactcagcagagtgagttaagggatgtgtgtgactatgcgattgagacgatgccctcttttcccaaggaaggttctgcagatgtggagcccaatcaggaaagccttgtggctgaggcctgtgacactccggaacactgggaggcagtaccccagagcctagcaggccgacaagcaaggactctagctcccccagagctctgggcctgccccattcagagtgagcatctagacatggccccattttccagtgacctgggaagcgaagaagaggaggtggaattttggccaggacttacttctttgacattgggatctggacaggcagaagaagaagaggaaacctcttcagataactctggtcagaccagatattattctccctgcgaagagcatcctgcagagaccaaccagaatgaaggcgctgaaagtgggactatcaggcagggggaagagctgccatctgaggagctgcaggaaagtcaagggctcttgcatccccaggaggtccaagttctggaggagcagggacagcaggaagcaggatttcggggggaaggaactctgagggaggatgtttgtgccgatgggctattaggggaggaacagatgatagagcaggttaatgatgaaaagggagaacagaagcaaaaacaggaacaggtacaagatgtgatgcttgggagacaaggagaaagaatggggctcactggggagccagagggtctgaatgacggtgagtgggagcgggaggatatggagaggaaggctcagggtcagggaggtccagaacagggagaagagaggaagagggagctgcaggtgccagaagagaacagggcggactctcaggacgaaaagagtcaaacctttttgggaaaatcagaggaagtaactggaaagcaagaagatcatggtataaaggagccaa

SEQ ID NO: 188742 - DNA, 791 bp, Homo Sapiens
ccatccagatgtggccgcagacgaagcaggagactccgtgacaacaggtagccaaagcccccatgacagtaccgggcctgctcgcttgcgccaatgaactcctctgcccggcctaagtacaggtcttggttgatgctgaggtggccagcaagggctgccaggcggggggcctgcacatatgtgtcatcctgcatgatgaagaaccagtcgtagtcggccccaaagtgtgtgtgaaggtggcgcagggtctctgacatgagccaggcgggccgctcatccccatgagacaccacctgcatccctgctggagcccgggccccccgctgcccagtgaagtagagtaaccgagggaagtgatgggccaccgtacggttcacagccacggccaaagtggacagtgtagctcgggaggtcaggacagccaccagcaaccgctcacgggagcccagctctgtctggatgtaccgagtcctgagcaccttcttgtagggcttgttggggtccctgtagtaggggacaatccggggtttgaagtcttcatcactttggtctagccgagctctggaatctggattctgtggccctcctcgctcccctacagcctcgacacagggatcttctccctccccctggatccaggaaacccgcaggaggctcaggctgcaccccagagacagccctaagatgaggggaagcgctggccgcagcagagccaacagggagctcagtcgcatggtggtaggccctgccaggtgggtgccccaggggcacagcctcaaggatcaatccaa

SEQ ID NO: 188743 - DNA, 1279 bp, Homo Sapiens
ttggggggggctggcagctacaccattatggtcctctttgctgaccaggccacgcccaccagccccatccgagtcaaggtggagccctctcatgacgccagtaaggtgaaggccgagggccctggcctcagtcgcactggtgtcgagcttggcaagcccacccacttcacagtaaatgccaaagctgctggcaaaggcaagctggacgtccagttctcaggactcaccaagggggatgcagtgcgagatgtggacatcatcgaccaccatgacaacacctacacagtcaagtacacgcctgtccagcagggtccagtaggcgtcaatgtcacttatggaggggatcccatccctaagagccctttctcagtggcagtatctccaagcctggacctcagcaagatcaaggtgtctggcctgggagagaaggtggacgttggcaaagaccaggagttcacagtcaaatcaaagggtgctggtggtcaaggcaaagtggcatccaagattgtgggcccctcgggtgcagcggtgccctgcaaggtggagccaggcctgggggctgacaacagtgtggtgcgcttcctgccccgtgaggaagggccctatgaggtggaggtgacctatgacggcgtgcccgtgcctggcagcccctttcctctggaagctgtggcccccaccaagcctagcaaggtgaaggcgtttgggccggggctgcagggaggcagtgcgggctcccccgcccgcttcaccatcgacaccaagggcgccggcacaggtggcctgggcctgacggtggagggcccctgtgaggcgcagctcgagtgcttggacaatggggatggcacatgttccgtgtcctacgtgcccaccgagcccggggactacaacatcaacatcctcttcgctgacacccacatccctggctccccattcaaggcccacgtggttccctgctttgacgcatccaaagtcaagtgctcaggccccgggctggagcgggccaccgctggggaggtgggccaattccaagtggactgctcgagcgcgggcagcgcggagctgaccattgagatctgctcggaggcggggcttccggccgaggtgtacatccaggaccacggtgatggcacgcacaccattacctacattcccctctgccccggggcctacaccgtcaccatcaagtacggcggccagcccgtgccaacttccccagcaagctgcaagtggacctgcggtggacattccgtgtccagtgctatgggcctggtattgaagg

SEQ ID NO: 188744 - DNA, 605 bp, Homo Sapiens
gggtgaccctgtatgagctgctgacgcactgtgactccagcccgagcccccccacgaaattccttgagctcataggcattgctcagggtcagatgacagttctgagactcactgagttgctggaacgaggggagaggctgccacggcccgacaaatgtccctgtgaggtctatcatctcatgaagaactgctgggagacagaggcgtcctttcgcccaaccttcgagaacctcatacccattctgaagacagtccatgagaagtaccaaggccaggccccttcagtgttcagcgtgtgctgaggcacaatggcagccctgcctgggaggactggaccaggcagtggctgcagagggagcctcctgctccctgctccaggatgaaaccaagagggggatgtcagcctcacccacaccgtgtgccttactcctgtctagagaccccacctctgtgaacttatttttctttcttggccgtgagcctaaccatgatcttgagggacccaaacatttgtaggggcactaatccagcccttaaatcccccagcttccaaacttgaggcccaccatctccaccatctggtaataaactcatgttttctctga

SEQ ID NO: 188745 - DNA, 1509 bp, Homo Sapiens
ttggcaatgagaagggagagtatgagattgctgaaggcatcagtgcaactgtatttcgcacagtgctggattattacaaaaccggtatcatcaattgtcctgatggcatctctatcccagatcttagagatacttgtgattatctctgcattaattttgacttcaacactatccgatgtcaagatctgagtgctttactccatgaactgtctaatgacggtgctcataagcagtttgatcactacctcgaagagctcatcttgcccatcatggtgggctgtgccaagaaaggagaacgagagtgccacattgttgtgctgacggatgaggattctgtggactgggatgaagaccaccctccaccaatgggggaggaatattcccaaattctttatagctccaagctctacagattcttcaaatatattgagaatagggatgttgcaaaaacagtgttaaaggaacggggcctaaaaaacattcgcattggaattgaaggttaccctacctgtaaagaaaaaattaagagaaggcctggcggccggtctgaagtcatctataattatgtacaacgccccttcatccagatgtcatgggaaaaggaagaagggaagagtcgccatgtggatttccagtgtgttcgaagcaaatccctcacgaatctggtagctgctggagatgatgtcttggaggaccaggagatattaatgcatcacccaccccaagtggatgaacttgaccggctaaatgccccactttctcagatggcttctaacgactttcaggattagggccagctgtgggtctactccttgttggagcccatctcacctgggatgcctgcagccagccctccctcgtgatttgtctcaccttgagtaggagacatgcttctcccctaaccttttcctttctgccataattaacatatgtccttttcagtaagtccatgcctctggcaggggatgaagaagtactcactggtaattagctaccatctttgcagcagccctggtaacttgaaaaatttgggtctggtgctgttcattgagtctttgtgtaactgcaaaagcaggaaaggaagtcaagactcctgttgcctcgtgcttagcaaagcagtccttatcctttatactctgttcttgggttttgtttttgtcttgttttataccaggcaaattgcttagtagcaaagggaccaaactgaaaaggtgacaatctctaacttctaaaagcagacaccaatcggatgctcattagaggttaatgaagatgccattcttggtggcctctgcacccaaattgcatctggaaagaactagggtctcattcagaatgtccaaaaggaaattcttaagagcttaaattcagatttgtgtctcattaatgcagtgaacaattcaaaaccacacagattccttggcaggaagataatggaataacagtgttgatgagaccttttagcttcaaggtttcggagtctaaacaaatgggatgattcatttggaa

SEQ ID NO: 188746 - DNA, 647 bp, Homo Sapiens
  misc_feature (173)..(462): n is a, c, g, or t
  misc_feature (501)..(555): n is a, c, g, or t
ttggcattgttgggaggagtccaggcataaagtgacataaacagcgcagagaatgggaccagcgcacctgagaggtgatcattagcctcagcaactggatgggacattccgaagagctcccagccaacacagatggtcactccagaggctgacatttaaaaggaaggggcccnnnnnnnnnnnnnnnnnnnnnnnnnnnnnnnnnnnnnnnnnnnnnnnnnnnnnnnnnnnnnnnnnnnnnnnnnnnnnnnnnnnnnnnnnnnnnnnnnnnnnnnnnnnnnnnnnnnnnnnnnnnnnnnnnnnnnnnnnnnnnnnnnnnnnnnnnnnnnnnnnnnnnnnnnnnnnnnnnnnnnnnnnnnnnnnnnnnnnnnnnnnnnnnnnnnnnnnnnnnnnnnnnnnnnnnnnnnnnnnnnnnnnnnnnnnnnnnnnnnnnnnnnnnnnnnnnnnnnnnnnnnnnnnnnntaaaagtaaggggcacagggagggggccccagctcgtgnnnnnnnnnnnnnnnnnnnnnnnnnnnnnnnnnnnnnnnnnnnnnnnnnnnnnnnggtaggcaaggcgtctccacagtggagagcccgacccactgtctcagcccagaggtcaaggctggcaccatcaccgagaggtcacacgggca

SEQ ID NO: 188747 - DNA, 1662 bp, Homo Sapiens
  misc_feature (1275)..(1283): n is a, c, g, or t
ttggacaagatattccttttgtatctactgatataataaatacaccgaaaaatgatcctgactcagcccttggcaatggtagtggagagttctcacaaaactccatggaagaaaaacaagaaactaaaagcacagatggacaaaccacacagtgtagtatatgatacaagcaatggaaagaaggtagttgacagtataagaaacttgaagtcgttgggcccaaaccaagagaatgttcaaaatgaaataattgtctatccagagaacacagaagacaatatgaaaaatggagtgaagaaaacagaaatcaatgtagaaggtgttgccaaaaataacaacattgatatggaagttgagagaccatcaaactctgaggcacatgaaactgatactgctataagttacaaggaaaaccatctagcagcttcatcagtaccagatcaaaaactgaatcaacccagtgcagaaaagacaaaagatgcagcaattcagacaaccccttcttgtaacagttttgatgggaaacaccaagatcataatttatctgactccaaagttgaagaatgtgtgcaaacttcaaataacaacatatcaactcaacactcatgcttaagttcacaagattctgtaaatacctcaagggaattcaggagtcaaggcaccctaattatacattcagaagatccgcttaccgtaaaagatccaatttgtgcacatggtaatgatgatcttttgcctcctgtagataggattgacaaaaattccactgcttcttacctaaagaattacccactttatagacaggactacaatcccaagccaaaaccttcaaatgaaattacacgagagtatatacccaaaattggcatgactacttataaaatagtgcctcccaaatccttggaaatatcgaaagactggcaatcagaaaccatagagtataaagatgatcaggacatgcatgctttagggaaaaagcacactcatgagaatgtgaaagaaactgccatccaaacagaagattctgctatttctgaaagcccagaagagccactgccaaaccttaaaccgaagcctaacctgagaacagagcatcaagtgcccagttctgtgagctcacctgatgatgccatggttagtcctctgaaacctgctcccaaaatgacaagagacactggcacagctccttttgcaccaaatttggaagaaataaacaatattttggaatcaaaatttaaatctcgggcttcaaatgcccaggccaaacccagctcnnnnnnnnngcagatgcagaagagagtatcgggtcactatgtgacatctgcagctgccaagagtgtccatgctgcccctaatcctgctccaaaagaactgacaaataaagaggcagaaagggatatgctgccttctccggagcagactctttctcccttaagtaaaatgcctcactctgttccacaaccccttgttgaaaaaactgatgatgatgtcatcggtcaggctcctgctgaagcctcccctcctcccatagctccaaaacctgtgacaattcctgctagtcaggtatccacacaaaatctgaagactttgaaaacttttggtgccccacgaccatactcaagttctggtccttcacggtttgctcttgctgtagtgaaaagg

SEQ ID NO: 188748 - DNA, 1266 bp, Homo Sapiens
  misc_feature (224)..(232): n is a, c, g, or t
  misc_feature (1192)..(1209): n is a, c, g, or t
ttgggccaaaccttaaaccgaagcctaacctgagaacagagcatcaagtgcccagttctgtgagctcacctgatgatgccatggttagtcctctgaaacctgctcccaaaatgacaagagacactggcacagctccttttgcaccaaatttggaagaaataaacaatattttggaatcaaaatttaaatctcgggcttcaaatgcccaggccaaacccagctcnnnnnnnnngcagatgcagaagagagtatcgggtcactatgtgacatctgcagctgccaagagtgtccatgctgcccctaatcctgctccaaaagaactgacaaataaagaggcagaaagggatatgctgccttctccggagcagactctttctcccttaagtaaaatgcctcactctgttccacaaccccttgttgaaaaaactgatgatgatgtcatcggtcaggctcctgctgaagcctcccctcctcccatagctccaaaacctgtgacaattcctgctagtcaggtatccacacaaaatctgaagactttgaaaacttttggtgccccacgaccatactcaagttctggtccttcaccgtttgctcttgctgtagtgaaaaggtcacagtctttcagtaaagagcgcaccgagtcacctagtgccagtgcattggtccaacctccagccaacacagaggaagggaagactcattctgtaaataaatttgtggacatcccacagcttggtgtgtctgataaggaaaataactctgcacataatgaacagaattcccaaataccaactccaactgatggcccatcattcactgttatgagacaaagttctttaacattccaaagctctgacccagaacagatgcgacagagtttgctgactgcaatccgttcgggagaggctgctgccaaattgaaaagggttaccattccatcaaatacaatatctgtgaatggaaggtcaagactcagccattccatgtcccctgatgcccaggacggccattaaatgttaccctgccacaccactgcacttcacttccacttcagaccaacttcatactaatggaacattttggccaatgtatattcagatgtacactaatatattatctattaaatattaaaatttgtgttgtggcttttatgccagaagaaaagttaccagaatttataatttatagtaannnnnnnnnnnnnnnnnngccttaagagttggaataatgctgctttagaactttaaacaaagtgtaaatgaattt

SEQ ID NO: 188749 - DNA, 969 bp, Homo Sapiens
cttttttattttagccaactttgtacaaaaaagttggctgagtgaagtgcctaaagttgaagctgaaaatatttctccgaagtcacaagatattccttttgtatctactgatataataaatacactgaaaaatgatcctgactcagcccttggcaatggtagtggagagttctcacaaaactccatggaagaaaaacaagaaactaaaagcacagatggacaagaaccacacagtgtagtatatgatacaagcaatggaaagaaggtagttgacagtataagaaacttgaagtcgttgggcccaaaccaagagaatgtagttcaaaatgaaataattgtctatccagagaacacagaagacaatatgaaaaatggagtgaagaaaacagaaatcaatgtagaaggtgttgccaaaaataacaacattgatatggaagttgagagaccatcaaactctgaggcacatgaaactgatactgctataagttacaaggaaaaccatctagcagcttcatcagtaccagatcaaaaactgaatcaacccagtgcagaaaagacaaaagatgcagcaattcagacaaccccttcttgtaacagttttgatgggaaacaccaagatcataatttatctgactccaaagttgaagaatgtgtgcaaacttcaaataacaacatatcaactcaacactcatgcttaagttcacaagattctgtaaatacctcaagggaattcaggagtcaaggcaccctaattatacattcagaagatccgcttaccgtaaaagatccaatttgtgcacatggtaatgatgatcttttgcctcctgtagataggattgacaaaaattccactgcttcttacctaaagaattacccactttatagacaggactacaatcccaagccaaaaccttcaaatgaaattacacgagagtatatacccaaaattggcatgactacttataaaat

SEQ ID NO: 188750 - DNA, 2506 bp, Homo Sapiens
ttggcacctgaccattccttcacgctgtgggaagggatccttgcaccgcatctctgaagtgtttgactgttggtttgagagtggcagcatgccctatgctcaggttcattacccgtttgaaaacaagagggagtttgaggatgcttttcctgcagatttcattgccgagggcatcgaccaaaccagaggatggttttataccctgctggtgctggccacggccctctttggacaaccgcctttcaagaacgtaattgtgaatgggcttgtcctggcaagtgatggccaaaaaatgagcaaacggaaaaagaattatccagatccagtttccatcatccagaagtatggtgctgatgccctcagattatatctgattaactcccctgtggtgagagcagaaaacctccgctttaaagaagagggtgtgcgggacgtccttaaggatgtactgctcccatggtacaatgcctatcgcttcttaatccagaacgttctgaggctccagaaggaggaagaaatagaatttctctacaatgagaacacggttagagaaagccccaacattacagaccggtggatcctgtccttcatgcagtctctcattggcttctttgagactgaaatggcagcttataggctttatactgtggtgcctcgcctggtcaagtttgtagatattctgaccaattggtatgttagaatgaaccgcagaagattaaagggtgaaaatgggatggaggattgtgtcatggccctagaaaccttgtttagtgttctgctttctctttgcagacttatggctccctacacaccttttctcactgaattgatgtaccagaatctaaaggtgctgattgaccctgtttctgttcaggacaaggacacactcagcattcactacctcatgctgccccgtgttcgagaagaattgattgacaagaaaacagagagtgcagtatctcagatgcagtctgtgattgaacttggaagagtgatcagagaccgaaaaactattcccataaagtatcctttgaaagaaattgtggttatccatcaagatccagaagctcttaaagatatcaagtctttggagaagtatatcattgaggaactcaatgttcgaaaagttacactgtctacagataaaaacaagtatggcattcggctaagggcagaaccagatcacatggtcctggggaagcgtctgaagggagcctttaaggcagtgatgacgtccatcaagcagttgagcagtgaggagctggagcagttccagaagactgggaccattgttgtggaaggccatgaattgcacgatgaagacatccgcctcatgtacacctttgatcaggccacaggtgggactgcgcaatttgaagcacactcagatgctcaggctttggtcctcttagatgtcactcctgaccagtcaatggtagatgaaggaatggctcgggaagtcatcaatcgcatacagaaacttcgcaaaaagtgcaatctggttccaactgatgaaatcacagtgtactataaagcaaagtctgaaggaacatatctgaatagtgttattgaaagccacacagagttcatatttaccaccataaaggctcccttgaaaccatatccagtttctccatcggataaagtccttattcaagaaaaaacacagttgaagggatctgaactggaaattacactcaccagaggatcttcccttcctggtcctgcttgtgcatatgtcaatcttaacatttgtgcaaatggcagtgaacaaggtggagtattgctcctggaaaatccaaaaggtgacaataggttggaccttttaaagctgaagagtgttgtcactagcatttttggtgtgaaaaatacagagctggctgtcttccatgatgaaacagaaatacaaaaccaaactgacttactgagtcttagtggaaaaacactttgtgtgactgcaggatcggctccctctctgatcaacagttctagtactcttctttgtcagtatatcaacctacagctcctgaatgcaaagccacaagagtgtttaatggggacagtgggcactctcctgcttgaaaacccacttgggcagaatggactcacccaccaaggtcttctgtatgaagcagccaaggtgtttggccttcggagcaggaagctaaagctgtttctgaatgagacccaaacgcaggaaattacagaagacatccccgtgaagactttgaatatgaagactgtgtatgtttctgtgttaccaacaacagcagacttctagcatgtacttatcaatgttgttcggtcagcccttccctaattacacctatcccctacacatacatgcacatagacacacacatgaacacactgaagatatttccttcaagtgtgtgtaaaatatgctgcttggattgaaattcaaatgggattgattagtcaagtaacttgagacctcacagtaatcttcacacttaaccttagacactatgcagtcatgttggga

SEQ ID NO: 188751 - DNA, 1436 bp, Homo Sapiens
ttggctcggggaggggttggggccgcgctcccactcgcccacacggtccgtctgcagtcggcagcctcgccggcagctcgctcggcccccgcttggcccggcccgcagggttctctccccttgccaccatgagcgagtcatttgactgtgcaaaatgcaacgagtccctgtatggacgcaagtacatccagacagacagcggcccctactgtgtgccctgctatgacaatacctttgccaacacctgtgctgagtgccagcagcttatcgggcatgactcgagggagctgttctatgaagaccgccatttccacgagggctgcttccgctgctgccgctgccagcgctcactagccgatgaacccttcacctgccaggacagtgagctgctctgcaatgactgctactgcagtgcgttttcctcgcagtgctccgcttgtggggagactgtcatgcctgacgctgacacagggtggagtgacataccgtgatcagccgtggcatcgagaatgtctggtctgtaccggatgccagacgcccctggcagggcagcagttcacctcccgggatgaagatccctactgtgtggcctgttttggagaactctttgcacctaagtgcagcagctgcaagcgccccatcgtaggactcggtggaggcaagtatgtgtcctttgaagaccgacactggcaccacaactgcttctcctgcgcccgctgctctacctccctggtgggccagggcttcgtaccggatggagaccaagtgctctgccagggctgtagccaggcagggccctaagccagggctcctggacccaggctttcccataccacgggcccaggactgtggctccttttctaaaccacctctgggactcagctccccccgccaaaaaaaatgggtctccttctgggctccaggattgtctccccactccagcatccccaaactggtactccctgacccaggcccccaatcctgggctcttacagagcctccatgagtcaagccccctccccacacctggactccagaattcaccctctcccctgcagtctgggttcccagactgagtcctctccccaaatcagggctctagacccgagccctccaaacctggactctgggacttaggcccccttaaatctagacttctctttataggtttcaggtctcctatgggtgcctgggaagtccttgaaagtggactgttctcaggcttgacctgccccaccccatccccgcggttgaggctgtgggggcagcagatcaggagcccactgataaggggccctagggtacagggtgctgcccagcaggtcgccaccgagtgtcttctcattttatttcagctccattttgcccataaatgggcagaaggggtgaagattgggctcatcccccttccggattctgcataaagcgtggtgagg

SEQ ID NO: 188752 - DNA, 1045 bp, Homo Sapiens
ttgggtacgagctggagaagcgtgtggagaggttggagctgttccctgtggagctggagaaggactccgagggcctgggcatcagcatcatcggcatgggcgccggggcagacatgggcctggagaagctgggtatcttcgtcaagaccgtgacggagggtggtgcggcccatcgggatggcaggatccaggtgaatgatctcctggtggaggtggatggaacaagtctggtgggagtgacccagagcttcgcggcgtctgtgctccggaacaccaagggccgagtgcggtttatgattggccgggagcggccgggagagcagagcgaagtggcccagctaattcagcagactttggaacaggagcgatggcagcgggagatgatggagcagagatacgcccagtatggggaggatgacgaggagacgggagagtatgccactgacgaggatgaggagctgagccccacgttcccgggtggtgagatggccatcgaggtgtttgagctagcggagaacgaggatgcactgtcccctgtggacatggagcccgagaagctggtgcacaagttcaaggagctccagatcaagcatgcggtcactgaggcagagatctagcagctgaaaagaaagctgcagagcctggagcaggagaaggggcgctggcgggtggagaaggcgcagttggagcagagtgtggaggagaacaaggagcgcatggagaaactggaaggctactggggtgaggcccagagcctgtgccaggctgtggacgagcacctgcgggagactcaggcgcagtaccaggccctggagcgcaagtacagcaaggccaagcgcctcatcaaggactaccagcagaaggagatcgagttcctgaaaaaggagactgcacagcgtcgggttctggaggagtcggagctggccagaaaggaggagatggacaagctcctggacaagatctcagaactggaaggaaacttgcaaacactgaggaattccaattctacttaacaggaatcattccatgactggacaataattaa

SEQ ID NO: 188753 - DNA, 918 bp, Homo Sapiens
actttgtacaaaaaagttgggatggcgccgcggagggtcaggtcgtttctgcgcgggctcccggcgctgctactgctgctgctcttcctcgggccctggcccgctgcgagccacggcggcaagtactcgcgggagaagaaccagcccaagccgtccccgaaacgcgagtccggagaggagttccgcatggagaagttgaaccagctgtgggagaaggcccagcgactgcatcttcctcccgtgaggctggccgagctccacgctgatctgaagatacaggagagggacgaactcgcctggaagaaactaaagcttgacggcttggacgaagatggggagaaggaagcgagactcatacgcaacctcaatgtcatcttggccaagtatggtctggacggaaagaaggacgctcggcaggtgaccagcaactccctcagtggcacccaggaagacgggctggatgaccccaggctggaaaagctgtggcacaaggcgaagacctctgggaaattctccggcgaagaactggacaagctctggcgggagttcctgcatcacaaagagaaagttcacgagtacaacgtcctgctggagaccctgagcaggaccgaagaaatccacgagaacgtcattagcccctcggacctgagcgacatcaagggcagcgtcctgcacagcaggcacacggagctgaaggagaagctgcgcagcatcaaccagggcctggaccgcctgcgcagggtcagccaccagggctacagcactgaggctgagttcgaggagcccagggtgattgacctgtgggacctggcgcagtccgccaacctcacggacaaggagctggaggcgttccgggaggagctcaagcacttcgaagcccaaaatcgagaagcacaaccactaccagaagcagctgga

SEQ ID NO: 188754 - DNA, 1625 bp, Homo Sapiens
  misc_feature (117)..(132): n is a, c, g, or t
  misc_feature (386)..(395): n is a, c, g, or t
  misc_feature (1051)..(1063): n is a, c, g, or t
ttggcaaatattcaatgtaacatacttaatatccaaaggtggaaacaaaagaatgtagagatccagtgttaagagttccatttgcttcaattaattatttaccttcctgtggaatannnnnnnnnnnnnnnnttaatagaaccatagatagactagtagaatttagattataaatgtgtgagtgcagattatcctgctattgcacaagctagaggggggaaaaatctcaattccagctggcaagatgctagccaggacacatataagaaagttgcactagattgaatggtcacagaatcggaggacatggaagaaaaaggaaacttcggtggttctgcagcagacatgggctaggtcatatgtggtttctatgagttcgtgtctcnnnnnnnnnnggagggggggcatctgtccccggtggagctcacctatttggaatatggggcatttgttttttccactgcaatgatttcagtctggtttcatcatgttggaattcgatcacaccattttcaaacaatgttaacatagtccagcttttgtttttctcatctcttctgagaggagactcactgtttctgtctgaggaagctcataccctcggcaaaacatcaggacaaataaagagaaatgggggtacgcattcccaacagaagcagtgtgttatttgttttaaaactctgaacagagatcttggaaatctttcaaaaagaccattgaattcttcattggctgagaacgacgttttaaaatgtcttaaataaggctttgtttgcattgtttgagttcaaggggccttattattgaatggaattgcacaagcctttctttgtgcaatcaaaccattgttattggtagttctgtaaaggaaactgtggaatcgaattggcagtggagtcataaatctatttactgagtgtggcttccaagaaatgttgcaattcaaaatgcactaagtctgtgatttattggagatttggagattctaaataatatttttaaaaaacttccatgcaacttctggtttaatgtttggcaactccacatgatnnnnnnnnnnnnncagcccaaccgagtttcggaattaagtattcttctagtaagtgattcaaacttgtaatatttgccacaggactgacttatttatttactagctagaagctcttaagttcacttgtttatcagggcatatacagaagggtttgttaaaactcgatgttaactttacaactttctgacctggtgcatgaattctcaagtactgtatttcactgtgttggtgtgtctgatggaaatttcgaggtggtcccacaaaaatattttatgtagtgtgccttcaaagagaaccatttatttctcttcacttatcgtcccacaaagtcacatttggtggtggtcagccaagtcgcatctggtctagttttactcttgtcccaattttaaagagaaatggggaatgagtttgccctggtgagacccataccattgcaatgattatcttgagcacttaaagtccagtgttggctgttagtgtatttgatattctgcctgtctcctcatggttgaaatatgtctgaagaatagcagcataatcctcttggctgttatacttttttaaactttcc

SEQ ID NO: 188755 - DNA, 1080 bp, Homo Sapiens
ggaggtggcgaccaccatgggtctgaaataatgcactggtcgatagtctcttggcagctctggaggtggatagattttcttagaagataaaggtttagaagccaaggaaaatccatccaaaattttgccaacgtaccgaaggtctttctctgattctttctggtttttatactgcctgggtgctgtccagccatagagtccgtctccaggctcctcgtccttcagaacagtgtcatactgggatagagtttctgtggcatagatatcatcatcttcctcttccagggcacctacaccaaaagcctggcctgaaattcccaattttcttcctttattcagtccaatttctccaagatcgccagctctctcagaaccaccactgaaaagattaaaatgttctcccgaagttccaaacagtgcctggtggggatccaggcccttgtaagctagaccatgcacattatctttaggtgtgaaatccacaggtgtgacatctttgggtgcaaaggtcacattatcaggcaagtagtcatcatcttcaccctcagatccttccgagcttccagggggtaatgcacagccatagattttgactccaggatcaggtttctgtcggcgtggccgtctctttactcgaggaccaactccttgtccttctttccaacccatttttcttagcaattcgaaaccaacagataattttgctggcgttatgaggtcatcaaggagggtggctccaggaataggggcagtagcagcggccaactgcctagccttttctcgtattctgtctttggttttggaggcaaaatcgtctgtggtgacaatcgctttaggtgctatcccaaattcactaagatcctcttcatccataaaatcttcaggaccaagaacagatttgtctgctctgttctgtcgtgaagacacaaaggtagagggtgtccatccttcttttgagccaacagtattgaagtatccagcagagaaacctccgctaaaggccccgtggaatcgtttataccttcctttttcatctctgacagtctgatcctgaagagggattggtttctttggtcccaa

SEQ ID NO: 188756 - DNA, 1372 bp, Homo Sapiens
  misc_feature (762)..(819): n is a, c, g, or t
  misc_feature (870)..(898): n is a, c, g, or t
  misc_feature (1039)..(1048): n is a, c, g, or t
gaatactggctccatctttgagagctctggtgggcagggcagaaacaggccacagtgctcaacccggacaccctcacgaagggtcgcaagtcactcttgtggctcagattgctcttaggacctggagggacagaccagaatcagggtcccctcctttacccctgagttccttactgttcccccaagcctgggagcagtctatcccccaaccctgccatctcccttactcatccctcttccacagcttcccctttctagccccctctgccctacctgtctttcctgagtgtttgaggggagagagagacccacatctccccaaagagatgagcttttggggcacaacatcccaccgcaggccccctcacccgacaacacctcctacctggccccttgccaaatcccaagcagaattagcaacaggaaaagcagagccccaggagagacactctactatatatactcttctatatattctgtttctattgtatattcactctgtacatgtgggtgtaaatgctgttaaatgacaaacccaatattatactgtggctggtggactattttcatcctcagtgctgtacagatctattttcattgtatatttgatatatttttaattttgtagcgtgtggctgggccaggccccagcgggaggggctgagctggggctgtgtgcttgctaggtgtgggcgcgctagtgctcgttgtagccttttgctgtgtcttcgctgtgtgttagacgtagggcctagagctcgnnnnnnnnnnnnnnnnnnnnnnnnnnnnnnnnnnnnnnnnnnnnnnnnnnnnnnnnnnagcgtgctgatctgtgactcccagtgttcaccaccttcctgaagaccacgnnnnnnnnnnnnnnnnnnnnnnnnnnnnnttggctctattgggagcctcagggccggcagggtgcttcgggagccccctgctacggggaaaggcatgtgtttcttgctggtgactcattgccttcacaccactgggtttgccagaaacagggaaggagggcgttaagggnnnnnnnnnntcctcaaatttatttaccagtcagcttcttgctgttcccagtagaatcgctagctcttctccagaggaaaagtactaggattcttaagatggcgagaccccaagagggatctcatagcactgctgcatttgccgttgacgcagtcctgacagtgtttgaaaagggccgcctgccccctccccactgtgcttttgatgcctttggagtcaaaggcaggtggggtcacctgatgagctaagatcccagccccagaatcctggaggagcagaggtagcagagagaccaggtccccaagtcccttcacagggtccccacccccactgg

SEQ ID NO: 188757 - DNA, 908 bp, Homo Sapiens
ttggctctgcactagcgccgcaggaccgcggacccgagttggaggcatctgtccacccatgtggttccagacacgttcatgtggccaccatgaccccgtcggcatcacaggggtaaccaaggtgatcctccctctcttcctgtgtccactggggatggtagagaccagcttaatgctttgagatcagatccatcacgaaatccgtatgtcctgagacctcctgaatcttaagagagcagcaagttcctgggacagaggagacagaagggaatttccaggttcttcaggacgttcacaaccacactgagaagcatctttgcagataagtatttaaacttaccagcccatagcctaccagcctgccctcttctggtctgtgcaggaaagtgtagtatcctagaatgccaaagtgggaggggaaatgggtgatgtagctcattctcttttctacctctatggaagaaagaaagagcctgtccccattttgtggggtcccagaaagggtgattttcacacttcacatttggcgttagggctagtatttcacaaacattaccgtctggaacttttgaaggctgagttaaatgacttcatcttgtgtacttgtagaactgctattagaaggaggctggggactccctgatgatgtgaaccagcccttctcttctcagttttagcactttgtgatcatatttataaaccttggacagggctccttggccttagagttaagtgaagagttaacactgtgactttagatgcatttttctcagtgtaagtgtctgagctcatctccagttctggactcgtgcccccactcccgggtgctgacagcaagctctgaagatatgctgagagagctccctgactctcctgactcaggtctgccagttgatgaagacagcaca

SEQ ID NO: 188758 - DNA, 1218 bp, Homo Sapiens
aatgtgacccaggagaagtaggacaaactcagcagcctggtgatagctgaatagcagctgaacggagagtcaggaatccagaatctgatcccagctctgctcctgccacactgggtggccctggaacccttcctgccttgacattcactcaaggtgcacggtaatcacccattgtttgaagcaatggatggaaatggaagggacccttctgcccagcctcagttatttttctgctccccctccttctcccctgccctttcctgatgccccatgcaccagaggaaattcggggagccagaggctggactaggactttttaagaccaccctgtgtcaccagtctggagaagaccagagaatgaccactaatcctgacctaggaccatctgccaggttttgtttttggtaacaactgtgctgtcttcatcaactggcagacctgagtcaggagagtcagggagctctctcagcatatcttcagagcttgctgtcagcacccgggagtgggggcacgagtccagaactggagatgagctcagacacttacactgagaaaaatgcatctaaagtcacagtgttaactcttcacttaactctaaggccaaggagccctgtccaaggtttataaatatgatcacaaagtgctaaaactgagaagagaagggctggttcacatcatcagggagtccccagcctccttctaatagcagttctacaagtacacaagatgaagtcatttaactcagccttcaaaagttccagacggtaatgtttgtgaaatactagccctaacgccaaatgtgaagtgtgaaaatcaccctttctgggaccccacaaaatggggacaggctctttctttcttccatagaggtagaaaagagaatgagctacatcacccatttcccctcccactttggcattctaggatactacactttcctgcacagaccagaagagggcaggctggtaggctatgggctggtaagtttaaatacttatctgcaaagatgcttctcagtgtggttgtgaacgtcctgaagaacctggaaattcccttctgtctcctctgtcccaggaacttgctgctctcttggttacccctgtgatgccgacggggtcatggtggccacatgaacgtgtctggaaccacatgggtggacagatgcctccaactcgggtccgcggtcctgcggcgctagtgcagagggctctttgccaa

SEQ ID NO: 188759 - DNA, 1080 bp, Homo Sapiens
  misc_feature (203)..(236): n is a, c, g, or t
  misc_feature (864)..(898): n is a, c, g, or t
ttggctccctcccacctccctccgcggagcagccagacagcgagggccccggccgggggcaggggggacgccccgtccggggcacccccccggctctgagccgcccgcggggccggcctcggcccggagcggaggaaggagtcgccgaggagcagcctgaggccccagagtctgagacgagccgccgccgcccccgccactgnnnnnnnnnnnnnnnnnnnnnnnnnnnnnnnnnncgagctggtcgggagaagaggaaaaaaacttttgagacttttccgttggctgggagccggaggcgcggggacctcttggcgcgacgctgccccgcgaggaggcaggacttggggaccccagaccgcctccctttgccgccggggacgcttgctccctccctgccccctacacggcgtccctcaggcgcccccattccggaccagccctcgggagtcgccgacccggcctcccgcaaagacttttccccagacctcgggcgcaccccctgcacgccgccttcatccccggcctgtctcctgagcccccgcgcatcctagaccctttctcctccaggagacggatctctctccgacctgccacagatcccctattcaagaccacccaccttctggtaccagatcgcgcccatctaggttatttccgtgggatactgagacacccccggtccaagcctcccctccaccactgcgcccttctccctgaggacctcagctttccctcgaggccctcctaccttttgccgggagacccccagcccctgcaggggcggggcctccccaccacaccagccctgttcgcgctctcggcagtgccggggggcgccgcctcccccatgccgccctccgnnnnnnnnnnnnnnnnnnnnnnnnnnnnnnnnnnntggctactggtgctgacgcctggccggccggccgcgggactatccacctgcaagactatcgacatggagctggtgaagcggaagcgcatcgaggccatccgcggccagatcctgtcaagctgcggctcgccagccccccgagccagggggaggtgccgcccggcccgctgcccgaggccgtg

SEQ ID NO: 188760 - DNA, 2028 bp, Homo Sapiens
ttgggattaaaatcccacttgccatactgtaagatgataggaccaaccatacctactgatcaaaaagtttatcagtccaagccagctacactcccacgtgctaaaaagatgaaaggaccaatcaaagatttaattaaagctaaagggaaagagttagagacagagaatgaagaaagaaattctaagttggtggtggacaaaccagaacagacagtgaagacctttccactgccagctgttggtttggaaagagcagctactacaaaggcagataaagacatcaagaatccaatccaaccatccttcaaaatgttaaaaaatactaaaccaatgactactttccaagaagaaaccaaggctcagttttacgcatcagagaaaacctctcctaaaagagaacttgccaaagatttgcctaaatcaggagaaagtcgatgtaatccttcagaagctggagcgtctttactggttggctcaatagaaccttctttgtcaaatcaagatagaaaatattcctcaactctacctaatgatgtacaaactacctctggtgatctcaaattggacaaaattgatccccaaagacaggaacttctagtaaaattactagatgtgcctactggtgattgtcatatttctccaaagaatgtcagtgatggggttaaaagggtaagaacattattaagcaatgagagagattccaaaggcagggatcacctctcaggagtccctactgatgttacagttactgagactccagaaaagaacacagaatccctcattttaagccttaaaatgagctcattaggtaaaatccaagtcatggagaaacaagagaaaggacttaccctgggagtagagacgtgtgggagcaaaggaaatgcagagaaaagtatgtctgcaacagaaaagcaggaacggactgtcatgagccatggctgtgagaacttcaacaccagggattcagtcacaggaaaggagtctcaaggggaaagaccacatttaagtttgctcattccgagggagacgacttaccagtttcattctgtatcgcagtcaagtagtcaaagtcttgcctctctagctacaacattcttcaagaaaagaaagcagaagcccagaatcataattgtgtccctgatgtaaaggcattaatggagagtcccgagggacagttatctctggagcccaaatctgatagtcagttccaagcatcacacactgggtgccagagccctttatgttcagcccagcgtcacactcctcagagccccttcaccaatcatgctgcagctgctggcaggaagactcttcgcagctgcatggggctggagtggtttccagagctctatcctggttaccttggactaggggtgttgccagggaagcctcagtgttggaatgcaatgacccagaagccacaacttatcagtccccagggggaaagactctcacaagtttctttgttggaacgaagctcaactcatataaggagtttggaaccccctgccggacttacaacctccaacttctctctaatgaggctcttgggagctgtacaaaaaggctggatcaggtgcaacaccaccataaggaagagtggattcggtggcatcactatgctcttcacaggatacttcgtcctgtgttgtagctggagtttcagacgtctgaaaaaattgtgccgacccctgccctggaagagcacagtacctccatgcattggtgtggcgaagacgactggggattgccgctctaaaacatgtttggattaggaagcacgtttaagtaggagaagccttcgtgacttctctctagtgccttcgtgccctgtgttgcccactgaattgccctgtaacacctaagtgtagtggtagcattaagggatagcttttcagctctcaaggttatcggagcatttgtatcactgctataaataaagtagtatcacttgtcataatcaggtgctgaaacataatgaaaaggtttaacttagtcacagtaaatattttatatccctgaaaataa

SEQ ID NO: 188761 - DNA, 1314 bp, Homo Sapiens
aagttacaataaaaaaaacctttcaaaaaggaatccttcagtatcttccagcccctccctcccttccttcctccctctatctcccaatgccaggtcagccaagtgtgattcccacagaggccagagcgtcagtggcccaggtgggacagagggtgggatccccgtacatggcgcccaagaagtcccgcacgaagtccgggaagcgcttctccacgatgctggtgcggacggcgctcatgagctgcagctggtaggcgatgttgtggaccgtgaggtggtgcagcgcggccgtgttgtcactgtgcagcagtgcgtgcaggaaggcgcggctgtgcttttggcacgtggggcaggtgcactccgggtctatggggccgaagtccttctcaaacaccttcttcctcaactgcaggttcccagtgggcaccagggcagagccaaagcgcgctgtccgtgtggggaagacgcagtcgaacatgtcacatccaagagccacgcagactaccagatcagtggcatagccaacccccatcagatatcggggcttgtcttcggcagccgagaggtgctcagcgccaccatccgccagaactgcgacttgctctcacccccgctcaggcccccgatggcgaagccaggcacgtctcgcttggtcatctcttcaaggcaggtggcccggagatctgcgtccagcccaccctggataatggcgaagaggttctgcttgtccggccgctgatgggctgcaatgcaccggtccagccagcggattgacctgtacatggcctcctccacacgtggcccagtcacagtactgctaaccacgtcgtccagctgcatgatgatgtccgagcccagcgcattctggatctgcacggatttctccgggctcagcagggtctcattgccgtcgtagggggagcggaagcggacgccctcctccgtcacctcggacagagacaccagcgacaccatctggaaaccgccgctgtccgttagcagattatgaggccaattcatgaagccgtggagaccgttggctttctggatcagctcgggtcccggccttagacccagatggtaggtattgcccaggcagatgcggcaacccagagcgtccagctgttcggtcgtgatgcccttcatggtggcctgcgtgcccactggcatgaacacaggagtggccactgtcccatgcggcagccacagctcgcctgcccgggccctggagcggctgcattcggccaccagccgcatgatccgtggggccgactccagggaagcctgggtagctgctcccgccatcttgaccca

SEQ ID NO: 188762 - DNA, 1694 bp, Homo Sapiens
  misc_feature (351)..(363): n is a, c, g, or t
  misc_feature (1249)..(1293): n is a, c, g, or t
ttggctgacagttccactcccaccccacacaacgcagacggtgcgcctgtgcagccctcccaggtggagtacacggcagactcgaccgtggcagccatgtattacagctactacatgctaccggacggcacttactgcctggcgccgccccctcccggaatcgacgtgactacttactacagcacccttcctgctggcgtgaccgtgtctaactcccctggagtgacgaccaccgccccaccacctcctgggaccacaccaccaccgcccccaaccacagcagagactagcagcggggccacctccacaaccaccaccacaagtgcacttgcccccgtggccgccatcatnnnnnnnnnnnnngacgtccagcccgtgattgacaagctggccgagtatgtcgccaggaacggcctgaagttcgagaccagtgttcgtgccaagaatgatcaaagatttgagttcctgcagccgtggcaccagtataatgcttattatgagtttaagaagcagttcttcctccagaaagaagggggcgatagcatgcaggctgtgtctgcaccagaagaggctcccacagactctgctcccgagaagccaagtgatgctggggaggatggcgcgcctgaagacgcagccgaggtgggagcacgggcaggctcaggcgggaagaaggaggcatcgtccagtaagactgtcccggacgggaagctggtgaaagcttcctttgctccaataagctttgcaatcaacgccaaagaaaatgatctgcttcctctggaaaaaaatcgtgttaagctagatgatgacagtgatgatgatgaagaaagcaaagaaggccaagaaagttctagtagtgctgcaaacactaacccagcagttgccccaccctgtgtagttgttgaggagaagaagcctcaacttacccaggaggagctagaagcaaagcaagcaaagcaaaagctggaagatcgcctcgcagctgctgcccgggaaaagctggcccaggcgtctaaggagtcaaaagagaaacagcttcaagcagaacgtaaaaggaaagcggcgttatttttacagaccctcaaaaatcctctgccggaagcagaagctgggaaaattgaggagagtcctttcagtgtcgaggaatccagcactacgccctgccctctactgactggaggcaggcctctgcctactttagaagttaaaccacccgataggcctttgagcaaaagcaaagatccaccgnnnnnnnnnnnnnnnnnnnnnnnnnnnnnnnnnnnnnnnnnnnnntctcgaacaagatcacgttctcccaagtaccattcgtcatccaagtccaggtctagatcacactcaaaagcaaagcattctcttcccagtgcctatcggacagtgcggcggtcgaggtcccgctcccggtcccctcggaggagagcccactcccctgagagacggagggaagagaggagtgtgcccactgcctaccgcgtgagccgcagccctggggccagcaagaagcggacccgctccagaagtccccacgagaagaagagaagaggcggtcccggtcgcggaccaagtccaggccaggtctcagtcggtgtcacccagcaagcaacagcgccccggcccgcggccccgcggcccactcggcgcactcagccagcgtctcccctgtggagagtcgggct

SEQ ID NO: 188763 - DNA, 718 bp, Homo Sapiens
ttggctcctgcactcgcgctaacagcccaggctccagggacagcctgcgttcctgggctggctgggtgcagctctcttttcaggagagaaagctctcttggaggagctggaaaggtgcccgactccagccatgctggcgctactgtgttcctgcctgctcctggcagccggtgcctcggacgcctggacgggcgaggactcggcggagcccaactctgactcggcggagtggatccgagacatgtacgccaaggtcacggagatctggcaggaggtcatgcagcggcgggacgacgacggcacgctccacgccgcctgccaggtgcagccgtcggccacgttggacgccgcgcagccccgggtgaccggcgtcgtcctcttccggcagcttgcgccccgcgccaagctcgacgccttcttcgccctggagggcttcccgaccgagccgaacagctccagccgcgccatccacgtgcaccagttcggggacctgagccagggctgcgagtccaccgggccccactacaacccgctggccgtgccgcacccgcagcacccgggcgacttcggcaacttcgcggtccgcgacggcagcctctggaggtaccgcgccggcctggccgcctcgctcgcgggcccgcactccatcgtgggccgggccgtggtcgtccacgctggcgaggacgacctgggccgcggcggcaaccaggccagcgtg

SEQ ID NO: 188764 - DNA, 1222 bp, Homo Sapiens
  misc_feature (135)..(148): n is a, c, g, or t
  misc_feature (285)..(295): n is a, c, g, or t
  misc_feature (1023)..(1063): n is a, c, g, or t
  misc_feature (1142)..(1174): n is a, c, g, or t
gctacgctcaatgccatcgtcaatggtgagtggatacaatcaatccatgtggctccctgctcagctattatgtctgtggtagaggatctctgacaagaggacctattatgtcaaaatgagtattcttgcaaatannnnnnnnnnnnnnaaaacagcatgaacaaacggggacacctttccctgcacacagcaatcaaagacaagattagggggccacccatcagtagccttgaagattttcagctaccaatatatgcacaaggtcacatttggttcctgttttgnnnnnnnnnnnaacatgacaatttcacactattaacagcacacgggcctggctgtacgtttttaactatgacatttcccatatgatattcgaggcctggtggacacatgactgacagtgcacatccagagattctacactcatcagacacagacatgaccgcaaaggtatcaaagtgaccccactttaagcagtgaaaaaagacctttccttttgttctcaaatcagcattttctaaagtcaggtgttagccttttgccaacagtgtgtacttgatggtaattatggcaacatagagcttcaaacaagatcgcctgacaacactgccgcatacacatacggcacccaggactcagaatcagtctgtcctggcaaatccttccaaatgacatcatagtgttgtcacattgaaagcaactcacagccttcagtgaggaaaggggagaggagaatgagaaggggagaaaagccaaggcagggacaaaggcccggtgggggatgggggttgcagggtggaggggggtctttattgctatatgcaccataaaacaaaggaaaaccaaatgaacttctgtgtgtaatgttcacttgtgaaggtattttaaagcatgaaatgcttaagtcttaaaaaacatatgctatagcttaccggcattttcaagggcaggaacctgctctctcatatgagccgataagagctttgcaatgcaatttattttctaaataccactctattcttnnnnnnnnnnnnnnnnnnnnnnnnnnnnnnnnnnnnnnnnngcctggccaatcactcccacagtttgtggggatcatatgtccacagaaccatcacatgcaacgaaaaaagccctaaccnnnnnnnnnnnnnnnnnnnnnnnnnnnnnnnnnccatgtaaactatgaaaatcaaggaagttgaaggcaaacaaggcaatt

SEQ ID NO: 188765 - DNA, 830 bp, Homo Sapiens
ttggtgctggcctttaccggatccggaaaggggtgtctgcctcagctgtgcccttcactccctcctccccgctgctgtcctgctcccaggagggaagccgccacacgagcaagctttcccgccacggcagtggagccgacagtgactatgagaacacgcaaagtggggacccactgctggggctggaagggaagaggtttctagagctgggcaaagaggaagacttccacccagagctggaaagcctggatggagacctagatcctgggcttcccagcacagaggatgtcatcttgaagacagagcaggtcaccaagaacattcaggaactgttgcgggcagcccaggagttcaagcatgacagcttcgtgccctgctcagagaagatccatttggctgggaccgagatggcctccctcttcccaaagaggccagccctggagccagtgcggagctcactgcggctgctcaacgccagcgcctaccggctgcagagtgagtgccggaagacagtgcccccagagcccggcgccccagtggacttccagctgctgactcagcaggtgatccagtgcgcctatgacatcgccaaggctgccaagcagctggtcaccatcaccacccgagagaagaagcagtgacctctctccccacaccctcacctgcaccctaggacctcactggccataggagctgggccactccagacattaatccccaccccaacagagccactggcacaagtgcccttagtgctgccacactccctggcagccaggtgccctggtgcccacccctgtcgagcccctaaggatggggaggtggggggg

SEQ ID NO: 188766 - DNA, 1196 bp, Homo Sapiens
  misc_feature (136)..(145): n is a, c, g, or t
ttggctttgaaatatgttcttctttgtcaccaaaaacagaaaaatgcacaacagagggacaacaaaagcctcctacaagagtcctaccaaaacaaggtatcctgttaaaagtggctgaaaccatcaaaagttggannnnnnnnnnctcagtgcaataagaaagatgacttacttcacaagttggatattggattccgactcgactcattacataccatcctgcaacaggaagtcctgttacaagaggatgtggagctgattgagctacttgatcccagtatcctgtctgcagggcaatctcaacaacaggaaaatggacaccttccaacactttgctccctggcaacccctaatatttgggatctctcaatgctatttgccttcattagcttgctcgttatgcttcccacttggtggattgtgtcttcctggctggtatggggagtgattctatttgtgtatctggtcataagagctttgagattatggaggacagccaaactacaagtgaccctaaaaaaatacagcgttcatttggaagatatggccacaaacagccgagcttttactaacctcgtgagaaaagctttacgtctcattcaagaaaccgaagtgatttccagaggatttacactggtcagtgctgcttgcccatttaataaagctggacagcatccaagtcagcatctcatcggtcttcggaaagctgtctaccgaactctaagagccaacttccaagcagcaaggctagctaccctatatatgctgaaaaataccccctgaactctgagagtgacaatgtaaccaactacatctgtgtggtgccttttaaagagctgggccttggacttagtgaagagcagatttcagaagaggaagcacataactttacagatggcttcagcctgcctgcattgaaggttttgttccaactctgggtggcacagagttcagagttcttcagacggttagccctattactttctacagccaattcacctcctgggcccttacttactccagcacttctgcctcatcgtatcttatctgatgtgactcaaggtctacctcatgctcattctgcctgtttggaagagcttaagcgcagctatgagttctatcggtactttgaaactcagcaccagtcagtaccgcagtgtttatccaaaactcaacagaagtcaagagaactgaat

SEQ ID NO: 188767 - DNA, 1476 bp, Homo Sapiens
  misc_feature (1181)..(1195): n is a, c, g, or t
actttgtacaaaaaagttggacatagactatgaaggacgctctgatggggattccattaaaaaaatcattaatcagatgaaaccacgacagttgatcatcgtccatggcccaccagaggccagtcaagatctggcagagtgctgtcgcgcctttggtgggaaagatattaaagtgtacatgccaaagctacatgaaacagttgatgccactagtgaaactcacatctaccaggtgaggttaaaagactcacttgtcagctctcttcagttttgtaaggcaaaagatgctgaattagcttggatagatggtgtcttagatatgagagtttccaaagtggacacaggggttattttagaagaaggagaactaaaggatgatggagaagactcagagatgcaagtggaagctccctcagattctagcgttatagcacaacaaaaggccatgaaaagtctgttcggagatgatgaaaaagaaacaggtgaagaaagtgagatcattcctactttggaacccttgccacctcatgaggttcctggacatcagtcagtttttatgaatgaaccaaggctgtcagacttcaagcaagttctcttacgggaggggattcaagctgaatttgtaggaggtgtacttgtttgcaacaatcaagtagcagtccgcagaacggaaactggacgcattggattagaaggctgcctttgtcaagatttttataggataagagaccttttatatgaacaatatgccattgtataaaggacatgatgtcaagaagtatctgcttgacctttctaagaaaaagggattcttatcttactctgagcttttgatgttttgttttgtaacatacaaaaagaatctgccagaaaaacttacatgtatcagatttttaaaaatataaatagagaacattttgcaaatgctcaaatgagcattctatcttttggctttcagagtgatagagctcctaacaggtgtacaggcccaagagttgaaggtgattggttttctttacagactccttgttctctagaagggctttttacttgaataaaacaatgcaacttagcaaaccaatttatggccttagagaaacatttttgcatgagttcttacaaactgtttgttatattttctggaatgataagtgagaattatttagaaaagacatgctccnnnnnnnnnnnnnnnctgataaaacagtttttcgaaacttacttttaaaagcatacgtgctatgactctctccagtttgaatatgcaattgttttcacaggcaggatgtctgttttctgcctgtatttcccagtgatttactctagggtaaggtagtacacatttggttcagaaattaatttttatttctcctatatcttgttttatcaagattttgttgtggcatttcaatgtaaattataacaccatcatttgagtatacataattcaaaagaactacttgatgcagtatagtc

SEQ ID NO: 188768 - DNA, 1072 bp, Homo Sapiens
ttggatttccaagaaaatatgcaaatccagtcatttcccaggtactggataaaggaacaagattttttcaagcacaagtctgttttggactcattcctgaaatatgattgtaaagatgaatttaacaaacaggaccatagaattgtgttaaattgggctctgtggtgggatcaactaacacaagaatccatccttctccccaggataagtccagaagaatacaaatcatattcccctgaagccctctggagatacctcacagctcgccatgattggttaaacattatcttatggattggagaatttcaaacccagcatagttatgcttcacttcagcagaacaaatggccccttctgactgttgatgttattaaccagaatacttcctgtaacaactacatgaggaatgaaattttagataagctggccaggaatggggtttttttggcatctgaactggaagactttgaatgcttcctcctaagactgagccgtattggaggtgtaatacaggataccctccctgttcaaaactacaagaccaaagaaggttgggatttccattctcaattcattctctattgtttggagcacagtctgcagcatcttctttatgtctaccttgactgttacaaacttagtcctgaaaattgtccctttttggaaaaaaaagagttacatgaagcacacccttggtttgaatttttagttcagtgtcgacaagttgccagtaacttaacagatcccaaactgatcttccaggctagccttgcaaatgctcagattttgattcccaccaatcaggccagtgtaagcagtatgctattggaaggacataccctcctggcccttgctactacaatgtattctcctgggggtgtcagtcacgttgttcagaatgaagaaaatgaaaactgtttgaagaaagtggatccccagctattgaagatggcattaactccttaccccaagctaaaaactgctctcttcccacagtgcactcctcctagtgtcctgccatctgatattacaatctaccaccttattcagtcattatcaccctttgatccta

SEQ ID NO: 188769 - DNA, 1587 bp, Homo Sapiens
  misc_feature (1372)..(1381): n is a, c, g, or t
ttggctcaagatggcgtgcttgttggccccaatccgcatgagcgtcctttcggaagtaacagctagcagtcgccactatgttgacaggctatttgaccctgatccccagaaagttctacaaggtgtcatagacatgaaaaatgctgtaattggaaacaacaagcagaaagccaatctcattgttttaggagctgttccaagattgttgtacttgcttcagcaagaaacctcaagcacagagctgaaaactgaatgtgcagtggtgttgggaagtcttgctatgggtactgaaaacaatgtcaagtctctactggactgccatattatccctgccttattgcaaggactactgtccccagacctgaagtttattgaagcttgcctccgatgcctgcgtaccatcttcaccagtcctgtcactccagaggagctactgtatacagatgccacagtgataccacacctcatggcactgcttagcaggtcccgctatacccaggagtacatctgtcagatcttctcacactgctgtaaagggccagatcatcaaacaattttatttaaccacggtgcagttcagaatattgctcacctactaacctcactgtcctacaaagttcgaatgcaagcactgaaatgtttctcagttttagcttttgaaaacccccaggtatcgatgaccctggtaaatgttttggttgatggagaattgttaccacagatttttgtgaagatgttacagagggataagcctattgagatgcagctcacatcagcaaaatgtttaacttacatgtgtagagctggagcaattcggacagatgataactgtattgtattaaagacattaccttgtttggttcgaatgtgcagtaaggagagattactagaggagagagttgaaggagctgagacacttgcctatctgattgaaccagatgttgagctacagagaatcgctagcataactgatcacctcattgccatgcttgctgattatttcaagtatcccagctcagtgagtgccatcactgatattaaaaggcttgatcatgatttaaaacatgctcacgaactccgccaggctgcattcaagctctatgcctctcttggagcaaatgatgaagacatccggaagaaggtgagtctgggagaggggcgtcccccagtcctgacagccagcaggcagggagtgacgtcaacctgaaagtcgtggtgaagagcactaacagtgactgtttgaatataataaagcagagtgactaaaggcataattgaagaatgaatgggacccggatttggggggttgtttgtttgtttttagaacatagagtggcatggccgtgctggaatgacaaataactggcgtgcnnnnnnnnnngtgtcattaatatgaattattatgttgcacatttttgcatgtgttctgataaaaatcaattctagcactgtgaagcttcagacaccttgaaagtcctaacattagaattgtaaatgttatttatggaaataccttccaatgctattgagaaattcaatctctattgtatattgttcctttgatatgtggcttagttttatgtttga

SEQ ID NO: 188770 - DNA, 868 bp, Homo Sapiens
ttggggccgcgcgggtctggcgggaccggtttggaagactttgccggcctgcagattggccttaagagaaggacggagccacatactgctgacggcccagaactggcagagagaaggttgccatggctgctgttgacagtttctacctcttgtacagggaaatcgccaggtcttgcaattgctatatggaagctctagctttggttggagcctggtatacggccagaaaaagcatcactgtcatctgtgacttttacagcctgatcaggctgcattttatcccccgcctggggagcagagcagacttgatcaagcagtatggaagatgggccgttgtcagcggtgcaacagatgggattggaaaagcctacgctgaagagttagcaagccgaggtctcaatataatcctgattagtcggaacgaggagaagttgcaggttgttgctaaagacatagccgacacgtacaaagtggaaactgatattatagttgcggacttcagcagcggtcgtgagatctaccttccaattcgagaagccctgaaggacaaagacgttggcatcttggtaaataacgtgggtgtgttttatccctacccgcagtatttcactcagctgtccgaggacaagctctgggacatcataaatgtgaacattgccgccgctagtttgatggtccatgttgtgttaccgggaatggtggagagaaagaaaggtgccatcgtcacgatctcttctggctcctgctgcaaacccactcctcagctggctgcattttctgcttctaaagcttatttagaccacttcagcagagccttgcaatatgaatatgcctctaaaggaatctttgtacagagtctaatcccttt

SEQ ID NO: 188771 - DNA, 934 bp, Homo Sapiens
ttggcgttttcccaactgcctccggtcccataacctgatggacagaaaggtgctggccatcatgagggagcacgggctgaaccccgacgtggtccagaacatccaggacatctgcaacagcaagcacatgcagaagaatcccccagggcccagagctccttcttcacatcgtagaaacatggcatatagggctagaagcaagagtagagatcggttctttcagggcagccaagaatttcttgcgtctgcttcagcgtctgctgagaggtcctgcacacctagtccagatcagatcagccacagggcttccctggaggacgcgcctgtggacgatctcacccgcaagttcacgtatctggggagtcaggatcgcgctcggcctccctcaggctcgtccaaggctactgatcttggaggaacaagtcaggccgggacaagccagaggtttttagagaacggcagtcaagaggacctcttgcatggaaatccaggcagcacttaccttgcttccaattcaacatcagcccccaactggaagagcctcacatcctggacgaatgaccaaggcgccaggagaaagactgtgttttctcccacgctacctgccgcccgctcttctcttggctctctgcaaacacctgaagctgtgaccaccagaaagggcacaggcttgctttcctcagactacaggatcatcaatggcaaaagtggaactcaggacatccagcctggccctctttttaataataatgctgatggagtggccacagatataacttctaccagatccttaaattacaaaagcactagcagcggtcacagagaaatatcatcacctagattcagatgctggacctgcttccgagatgtccaggccactggcagaatcgcagatgatgctgacccaagagtagcacttgttaacgattcttta

SEQ ID NO: 188772 - DNA, 1175 bp, Homo Sapiens
catatttttaactttattttcctgttgtacaatttaaaaaccgttttaacattttgcctttttatgttttaaaagctaaccatttttattaaacctatgagtaagcagctcatcctaattgcgaagagtgttttggagttcactggatttggttgacctttgtggaacacaaataatgaaggagcagaacattgacaagctaagatgaaattctgacatagtacatctctgccaaaaaccacacaccctctgtggatatggatatgaattcccagattttatatactcttgaataaaaggtttatttttatttataagtgggcataaaataagaaatgtccatgcagccatttttccaacagatgctgtacaccgttcattttatatagactagggagattcaaatacagtgcattttctattggtatttgttctgtgcatttttagcaacttctaccagcaaataaagtattctcagtaaaacgaaaatgattctcaagttatcagtttgctgtttttaccacttatttcatgccctgccaaactcaagttacacagacttccattttcttaagataatcaatcatgaagaaatcctttatcaatcattcaaaagtaattttaagtgtaacataactgtgtttacttcccatgcacttaatacccttatgcgctaattttgtgaattaagtttactgattatagaagtatgtgctgcatagaagtctgtgcttagagggtgaagttcctaagcttaccttgaattacagctacatttcagtgttaaatgtgcatattaagaataattcttttggggaaagaaattatgaatcttcaggacagtctacaatggtttagagttacattctgcctagacttttatgacttgctgctattgttttaaaaaccccacttagtctcttcctttctgatttctaaagtaagcctcagaatttccaaaccaattcatccacagctgtttctgggctggtttttaaagtagctgcaacagaatcatgaggctttccctttttatcaaatacgaaaaacattttttaaaattctgcacacccagtgatcatcttttgtgcgggaaagcaagatgatgatggatgattttattcatccttttagtaaagacacaaaacatttttctcaacatttgtacagttctg

SEQ ID NO: 188773 - DNA, 893 bp, Homo Sapiens
ttggccggcagtcggcggtccgggcccactgatcgtgaacaacaaacagccccagcccccgccacctccgccgccggcagccgcacagccaccacccggggcaccgcgggccgccgcgggcctcctgcctgggggcaaagcccgcgagttcaaccgcaaccagcgcaaagactcagagggctattcggagtcaccagacctggagtttgagtatgctgacacagacaagtgggctgcagagctctcggagctttacagctacacggaagggccagaattcctgatgaatcgaaaatgctttgaggaggacttccggatccatgtgacagacaagaagtggactgagctggataccaaccagcaccggacccatgccatgaggctcctggatggcttggaagtcactgccagggagaagagactcaaggtggctcgagcaattctctatgttgctcaaggcacgtttggggagtgcagctcggaggcagaggtgcagtcctggatgcgctacaacatctttctcctcctggaggtgggcacgttcaatgctttggtggagcttctgaacatggaaatagacaacagtgccgcctgcagcagtgctgtgaggaagcctgccatctccctggctgacagcacagacctcagggtcctgctcaacatcatgtacctgatagtggagaccgttcatcaggagtgtgagggtgacaaggctgagtggaggaccatgcggcagaccttcagagccgagctgggctccccgctgtacaacaatgagccatttgccatcatgctgtttgggatggtgaccaaattttgcagtggtcacgcccctcactttcccatgaagaaagttctcttgctgctctggaagacagtattgtgcacgctag

SEQ ID NO: 188774 - DNA, 1036 bp, Homo Sapiens
ttggcttcaaatgccctaatgctgcttcgtccagaagaggttgaaattttggtctgtggaagtcctgacctggatatgcatgctctgcagagaagtactcagtatgatggctatgcaaaaacggacttaactataaaatacttttgggatgttgtgcttggatttcctcttgatcttcaaaagaagttgctacattttactacagggagtgacagagtacctgtaggagggatggctgatttgaactttaaaatctcaaagaatgaaacttctactaactgcttacctgtggcccatacctgcttcaatcaactttgccttcccccctacaagagcaaaaaggatctgaaacagaaattgatcattggaatttcaaattcagaaggttttggacttgagtaacctagaagacttgaaatataatcttttatatgtagcattcacttccctcttactgtgcctttagccttttcatgtttctgtctcaaaacactttgacaaagctcaccaactttaaaatattaagtttttaaaaaatcaaatatgaagtatgttcagcaaaggcataattttctaaaaacacacacagaaatcgcttgagtgaggaaaagtccacatggcagagacaggtatggtccagttcctcttttatatagcactttatcattctccacaagtagtttgtcacaggcattccactgggaaagcaaagtacagtgaagaatgaatttatggtatagttgaacccagtggcagattgtacactgctagcactgctagcacacagtagcaaagcaaacagctacattatctttaacataaggcatgtagccatattttcatatagtggtatacaacacagtatcattgcaaatgcagtttacagggatttttgatatactggcttgggacctataagattcttctcagcagttgctgaaaagcatgtaaataactacataatagcctgaaataatgggattttgatagtgccatttattgttaaagatttatttttacaaagtaaattcagttt

SEQ ID NO: 188775 - DNA, 1310 bp, Homo Sapiens
  misc_feature (1039)..(1071): n is a, c, g, or t
ttgggtccgagttgccgccggagaggagtggcctcgcccgcttgagttttgattcatcatggataatctgtcatcagaagaaattcaacagagagctcaccagattactgatgagtctctggaaagtacgaggagaatcctgggtttagccattgagtctcaggatgcaggaatcaagaccatcactatgctggatgaacaaaaggaacaactaaaccgcatagaagaaggcttggaccaaataaataaggacatgagagagacagagaagactttaacagaactcaacaaatgctgtggcctttgtgtctgcccatgtaatagaacaaagaactttgagtctggcaaggcttataagacaacatggggagatggtggagaaaactcaccttgcaatgtagtatctaaacagccaggcccggtgacaaatggtcagcttcagcaaccaacaacaggagcagccagtggtggatacattaaacgcataactaatgatgccagagaagatgaaatggaagagaacctgactcaagtgggcagtatcctgggaaatctaaaagacatggccctgaacataggcaatgagattgatgctcaaaatccacaaataaaacgaatcacagacaaggctgacaccaacagagatcgtattgatattgccaatgccagagcaaagaaactcattgacagctaaagctactgctgttcttctttatcatttattcacttccgtagctcctccttgaaagttattaccttttcagagtttaagttttcggttccacgctcttctaattgggagataatatggaagaagggccagagcagttacagccctccttcttttttgttttctgttgagggccgactgctgctctgccttccttctagtattttctttctcaattcatacgcttagattggttttcatatgtcatgtttagtgttttcatcctcctcatatacttcagcaggttcttttgctttcaagatttggaagcattgccaaagacagccatgaagaaggaagctgtagagnnnnnnnnnnnnnnnnnnnnnnnnnnnnnnnnnggttgagggaaggacaagagataagaggttgttacctcagtaaaaaccttcaggccacaaagcaaaaagttgcatagccacaacgaagatctagttggatatagtttttgatttaagttgcagttatagccaatttaggctaatgcttggttttggagcttttatacacaacgtttttgttaggcatcacagttttgcaacctctgctccaaagagaaaaatagaatgagttttctttc

SEQ ID NO: 188776 - DNA, 1514 bp, Homo Sapiens
gatgcagaagaccaggtgctgcaggatgctctccatgctgtggtagttctgctgccgggtgatgcgcaggtacttctggagagccctggccatggaggggaaaatggcctgggcggcctccctagggtccatcacctcccctggggctttctgctgctcctcagcctggagacgctgaatgtggatgaaggcctcttccactgcaaccaccagccttgctttccgcttctttactcgccgttcatgttcggcctcttcataatacaactcgttgtggcttgagtccctgcgccgagcagctgcagcaatcatggcccgggactggccagtggcattgttactggggccatctacattgtagactttcagcccggccatatgcttggctgctcggaatttggaggctgttaggaggtttgggttatagatggtgaaatctttgtagtaattttctaggaccaccaatgctgctcgctggatactcaggtgtcccaggctgtagaagcgggactcgccatcggtggagcggaccacctgcagcgtgaacatgggctgcagctgcctgagctccagcaggacgatggccaggtaatggatgaagaggagggcatccacaagggagactgcatattgcacaatgccctggtaattccggtcccgagagtccaaaatgcggaccccgtaaaaaagccaataggaaaccacaaagagaaagatgaggaccaacaaaagggcacgaaacacaaacacccgtggcatgtcagctctccgcttgcggaaaaaaagtgcccaggtccctatgagcagaatgaggagtttgaatgccatggagataaagagcccctcacaaattgtgccacaaggctccagctcatccctccacaggatcggaggtaaaaggatgaaggcaataggggtgaggaaaactagaagtccaagaaaagaggcgacggtgaggcccaggtagcgtttgcaatccagccccacgctgtcctccatgtccttgctgatcctggcaatgtcctcttgggatatgctgtgctccgaggtgcctgtgatggccgtggtggtctctccccagttgtcatcctgaacttcctctgtccgagtagaatcatttcccaacaggggctctccagtgggaggttgaatggtgacagacttttctgaccctctgccgtctttattccggggtgacttgtgtctctctctagttctttccccttgtctgtgagattttttcgaatgacttgaatagtaagaatatccagaataagtggattcggtatccatagcaatggagggcttgcgcttgaggaaggagcaggtactgtttctccttagaggtagaaaatttcacctaccagactcctaaaacctcaaggagtctggaaattagaagaggagccactcttcaacaggaacaaattctccgcgccggccgcccgagctccgcggcccgcggtctcggctcacagcggccccggctctgcggcctgcgctgggctccccaa

SEQ ID NO: 188777 - DNA, 966 bp, Homo Sapiens
gtttgcaccatctggtgctgaggccttcaagctctgaggagaaggcatctcgggaggtgccccccgcttcacaagagccaacacactcactgtcgggggcagccagctagatggtctcctggactttagggctccattctcattttctgcggggcccccaggcactccaaatagtcttcccaaccagaggcccctgcctggtgccatctcatctgtgggcaggggtctctcctgtgcaccttcttcagctgcagtcccatgacgccccggtgcccatcgggaaagaggaaagccctcagtgcccccagaggcatagacccgggaggcctgggtcaactgctcccaccagctccctggtgtgggaaggtttggagagtcagaggggtctgaagcagcttccttggaagtcccccgaaggctctgggccagccggcccccaaagtgcagcatggcttgcatagtctgctgcagagctggaggtgggcctggaggggcaggggcctgaggtgggcccaggggcaggtggtggtggtgctcaaagagcaggtccaggtggaaagtgagcaccgacaatggctgcagcaggagcagcagctctgtggacagggagggacaaccaccgcgggccagggagaaaaatcctgttggcaggtacaggagggagagcaggcctgcatcttcctggagactggaaaaccacagctccaactgcttggtgtcacttgaggaggcccaggataaaggcatggaagcggctacggctgctgctcagcggggctagacggctgacctggctatacagggttccaagggagcgggtgctggagcctggcttcaccgacccctccaccacgctccaggggctgctcctgcgctgcccggtgatgaggtccttccggaaaggcttcagcccgtccgccaccagggcgtggagggccgggcagagggtggtcagcaccaggccaa

SEQ ID NO: 188778 - DNA, 1452 bp, Homo Sapiens
ttggctccttatcctcttgtggatgtggagggtggcagacaagtatctatctggtctggtggataagtttccccacttgctctggagcgggactgtgctgaagaccatgctggacatcctgcagaccctgtcactgtcactgagcgctgatattcacaaggatcagccttactatgacatccccgacgccccctaccggatcacggttcctgacacgtacgaagcccgtgagagcattgtgaaggacttcgctgcacgctgtgggatgatcctccaggaggccatgaagtgggcacctaccgtcaccaagtcccacctgcaggaatatctgaacaaacatcagaactgggtatcgggactgtcccagcacacggggctggccatggccactgagagcatccttcactttgctggctacaacaagcagaacacaactcttggggcaactcagctgagcgagcgcccggcctgtgtgaagaaagactactccaacttcatggcatccctgaatctgcgcaaccgctacgcgggcgaggtgtatggaatgattcggttctcaggcaccacaggccagatgtctgacctgaacaaaatgatggtccaggatctacattcagctttagaccgcagtcatcctcagcactacacgcaggccatgttcaagctgaccgcaatgctcattagcagtaaagattgtgacccgcagctccttcatcatctgtgctggggtcccctccggatgttcaatgagcatggcatggagacggccctggcctgctgggagtggctgctggctggcaaggatggagtggaagtgccgttcatgcgggagatggcaggggcctggcacatgacggtggagcagaaatttggcctgttttctgctgagataaaggaagcagaccccctggctgcctcggaagcaagtcaacccaaaccctgtccccccgaagtgaccccccactacatctggatcgacttcctggtgcagcggtttgagatcgccaagtactgcagctctgaccaagtggagatcttctccagcctgctgcagcgctccatgtccctgaacatcggcggggccaaggggagcatgaaccggcacgtggcggccatcgggccccgcttcaagctgctgaccctggggctgtccctcctgcatgccgatgtggttccaaatgcaaccatccgcaatgtgcttcgcgagaagatctactccactgcctttgactacttcagctgtcccccaaagttccctactcaaggagagaagcggctgcgtgaagacataagcatcatgattaaattttggaccgccatgttctcagataagaagtacctgaccgccagccagcttgttcccccagataatcagacacccggagcaactggacataactgtcggctctcggcaacaagccacccaaggctggatcaacacataccccctgt

SEQ ID NO: 188779 - DNA, 1289 bp, Homo Sapiens
ttggggaatgtgttctataaatattagctattatgatcattatggtactcaatgaacagtctgaaacattgctttttttctctggtacatttaggtcctttctgaaatggtatctatgattcagctattcaaaacctaatgaagttggtgactatgacaatgtggagaaatcatgacagaaaatgtggtttgtactggggctgtcaatgctgtaaaggaagtttgggaaaaaagaataaagaaactcaatgaagacctgaagcgagagaaggaatttcaacacaagctagtgcggatctgggaagaacgagtaagcttaaccaagctaagagaaaaggtcaccagggaagatggaagagtcattttgaagatagaaaaagaggaatggaagaccctcccttcttctctgctgaaactgaatcaactacaggaatggcaacttcatagaactggtttgctgaaaattcctgaattcattggaagattccagaacctcattgtgttagatttatctcgaaacacaatttcagagataccaccagggattggactgcttactagacttcaggaactgattctcagctacaacaaaatcaagactgtctccaaggaactaagtaattgtgccagcttggagaaactagaactggctgttaacagagatatatgtgatcttccacaagagctcagcaatctgctaaaacttactcaccttgatctgagtatgaacgattttactacaatccctcttgctgtgttgaacatgcctgcccttgagtggctggacatgggaagcaacaaacttgaacaacttcctgatactatagaaagaatgcaaaatctacatacgttatggctgcaacgaaatgaaataacatgcttgcctcaaacaatcagcaatatgaaaaatctgggtactcttgttctcagcaacaataaactgcaagatattccagtatgcatggaagaaatggcaaatctgaggtttgtcaacttcagagacaacccactgaaattgaaagtatcacttcctcccagtgaaggcacagatgaagaagaggaacgggaattatttggccttcagtttatgcacacatacatacaagagtcacggagaagagcagatcaccaagtcaacggttcaactactttaccaatctccataaatacggatggataatataattcaagatgcccttctaaagaggattactttggtgaattctctaatgtttggatttctgaagtaaaaagaaaagctattaccaaagtttaatgaggccacagca

SEQ ID NO: 188780 - DNA, 1140 bp, Homo Sapiens
tttggaatttgaacccgagacagtctgacaagatatatgagactaaagtcaggaattttaaattggttaggcttcttatttacaaatcatataatcatagaactacaggataaaaatagttatttcagaatatcataatatctaaaattagtaattctgaacctttgtcttggcaaatgtaccatcaattaagacaatttttacaaataaaggcagaaacaaaatagggataagatgcagaagagaataacagtcctaccatatatttggtttagtattttcttgtgcatagaaaccagtcatgagttaaataaggcctaaatttgagaaggtttttggtttcattatctaatttctattttattccaaattattttcccaaacagaagagaacatacttattgtttgtgcctacatatataaaaaatgacctgataaaagatatgagatagctaatcaacttcagaaattatttcaaatttgtgaattatgtttgtaagtatctttttggaagttctaactagacaattatccaacaaaataattaaatgaaataatcttttttctttgaaaacagctcttcagttttgtgtttgtcatggacagattctgacaatatatacatgtatggctctggaaatttgaaggtgacttcattaattaattgtgtttattaattgtgaatatctctgaattgtctgcatttgagaaaatcacaattgtgctttccagatctgtagggaaaaatgtccacatataagtcaaattctcagattggcccttgttacaatcaatcactacctcttgaacttaagaaataaaaaatattaaataaaatcaaaggaagataaatttccaaaattaatacaaacagaaatacgctaattatgtgttgacatgttatgtatgtttcagatcaccaagtcaacggttcaactactttaccaatctccataaatacggatggataatataattcaagatgcccttctaaagaggattactttggtgaattctctaatgtttggatttctgaagtaaaaagaaaagctattaccaaagtttaatgaggccacagcattttttaaagttcatattatttgctatttaaagtatatatttttttgatataaaaaccaa

SEQ ID NO: 188781 - DNA, 921 bp, Homo Sapiens
ttgggccacccagctccccgccaccgccatggtccccgacaccgcctgcgttcttctgctcaccctggctgccctcggcgcgtccggacagggccagagcccgttgggctcagacctgggcccgcagatgcttcgggaactgcaggaaaccaacgcggcgctgcaggacgtgcgggagctgctgcggcagcaggtcagggagatcacgttcctgaaaaacacggtgatggagtgtgacgcgtgcgggatgcagcagtcagtacgcaccggcctacccagcgtgcggcccctgctccactgcgcgcccggcttctgcttccccggcgtggcctgcatccagacggagagcggcgcgcgctgcggcccctgccccgcgggcttcacgggcaacggctcgcactgcaccgacgtcaacgagtgcaacgcccacccctgcttcccccgagtccgctgtatcaacaccagcccggggttccgctgcgaggcttgcccgccggggtacagcggccccacccaccagggcgtggggctggctttcgccaaggccaacaagcaggtttgcacggacatcaacgagtgtgagaccgggcaacataactgcgtccccaactccgtgtgcatcaacacccggggctccttccagtgcggcccgtgccagcccggcttcgtgggcgaccaggcgtccggctgccagcggcgcgcacagcgcttctgccccgacggctcgcccagcgagtgccacgagcatgcagactgcgtcctagagcgcgatggctcgcggtcgtgcgtgtgtgccgttggctgggccggcaacgggatcctctgtggtcgcgacactgacctagacggcttcccggacgagaagctgcgctgcccggagcgccagtgccgtaaggacaactgcgtgactgtgcccaactc

SEQ ID NO: 188782 - DNA, 968 bp, Homo Sapiens
tgatagccataaaagaaatctaaatctcatcaatagacacagtaaagggcatgttttgcactttaattactgtcggtcctggttttccagaactagatgcaaagccagggggaccaccaatatggattgggccagggccgggccggggccggggccaggcccaaaagctggtggcccacccaaatgcccaggggcacttccaagaccaggagggccacttccaaaccccgggggaccgcctaagctaccagggccatttccaaaattctgagggccccctccaaatcccgatggcccacttaaattgtttggtccacctccaaaacccggaacatccagtcctagaccaggcaaaccactgtttccaactgaaggcataccaggcctagcatcaccaaaggccccgcctcctaatcctggaggagggattggtggcccaaaggcatttgatccaccaaaattaccaggaaagttaaatggaggcccattattggcttcctttgatcctacagtcaggaaggcatgctcttcacctcctgcactaggtattcctgcactgggcattcccgcaccaggcagtcctgcactggttattgctgaaccaggcagtcctgtgctgggcaggcctgcaccgggaagtcctgcactgggcagtcccacaccgggcagtcccgcattgggcattcctggaactgcaggattacctggcacaggcatctttaatcccttttttccttgggcagggggatttttctcaatctctctcatatcttctagggtaactacatgaacaaaagcttctctcccattaagttttttacggtgtaagcgttcagacttacgtgcatcatcttcatttttaaactgaaccaatgcctgtcctagaccttgcccattgttatcaacaagaacatgtacagcattttcatccactgggattccttctaggaactgaagaacatccccaa

SEQ ID NO: 188783 - DNA, 1363 bp, Homo Sapiens
ttggatcacatttttgcctggggcaatggtggtaatggccgcctggcaatgacccccacagagagaccacatggctctgatatctgtacctcatggcctcggcctatttttggatctctgcatcatgtcccggacctgtcttgccgtggatggcataccattctcatcgttgagaaagtattgaattctaagaccatccgttccaatagcagtggcttatccattggaactgatctgtcagtgtttcagagctctagcccgggaggaggcggcgggggcggcggtggtgaagaagaggacagtcagcaggaatctgaaactcctgacccaagtggaggcttccgaggaacaatggaagcagaccgaggaatggaaggtttaatcagtcccacagaggccatggggaacagtaatggggccagcagctcctgtcctggctggcttcgaaaggagctggaaaatgcagaatttatccccatgcctgacagcccatctcctctcagtgcagcgttttcagaatctgagaaagataccctgccctatgaagagctgcaaggactcaaagtggcctctgaagctcctttggaacacaaaccccaagtagaagcctcgtcacctcggctgaatcctgcagtaacctgtgctgggaagggaacaccactgactcctcctgcgtgtgcgtgcagctctctgcaggtggaggttgagagattgcagggtctggtgttaaagtgtctggctgaacaacagaagctacagcaagaaaacctccagatttttacccaactgcagaagttgaacaagaaattagaaggagggcagcaggtggggatgcattccaaaggaactcagacagcaaaggaagagatggaaatggatccaaagcctgacttagattcagattcctggtgcctcctgggaacagactcctgtagacccagcctctagtctcctgagcctatagagcccccaggagactgggacccaaagaacttcacagcacacttaccgaatgcagagagcagctttcctggctttgttcacttgcagaaaaggagcgcaaggcagaggctctgaagcactttccttgtacatttggagagtggcattgccttttagataggatctaggagtgattttattgttttggagaatggaagggcccccatggccctggctttgtcatcagtgactgccatagcaacagcagctctgtacctcatctgttgatcccacctttgaagaggagacacagtgctcaccttaattgcgctggtagcagcttatatcccatgtatcattttcaccattgattggaagctgccttgggaattcagtacaagcattacccctctgggtggga

SEQ ID NO: 188784 - DNA, 1111 bp, Homo Sapiens
ttggcaactaccgtggcatcctgaactggtgtgtggtgatgctgatcttgagcaatgcccggttatttctggagaacctcatcaagtatggcatcctggtggaccccatccaggtggtttctctgttcctgaaggatccctatagctggcccgccccatgcctggttattgcggccaatgtctttgctgtggctgcattccaggttgagaagcgcctggcggtgggtgccctgacggagcaggcgggactgctgctgcacgtggccaacctggccaccattctgtgtttcccagcggctgtggtcttactggttgagtctatcactccagtgggctccctgctggcgctgatggcgcacaccatcctcttcctcaagctcttctcctaccgcgacgtcaactcatggtgccgcagggccagggccaaggctgcctctgcagggaagaaggccagcagtgctgctgccccgcacaccgtgagctacccggacaatctgacctaccgcgatctctactacttcctcttcgcccccaccttgtgctacgagctcaactttccccgctctccccgcatccggaagcgctttctgctgcgacggatccttgagatgctgttcttcacccagctccaggtggggctgatccagcagtggatggtccccaccatccagaactccatgaagcccttcaaggacatggactactcacgcatcatcgagcgcctcctgaagctggcggtccccaatcacctcatctggctcatcttcttctactggctcttccactcctgcctgaatgccgtggctgagctcatgcagtttggagaccgggagttctaccgggactggtggaactccgagtctgtcacctacttctggcagaactggaacatccctgtgcacaagtggtgcatcagacacttctacaagcccatgcttcgacggggcatcaccaagtggatggccaggacaggggtgttcctggcctcggccttcttccacgagtacctggtgagcgtccctctgcgaatgttccgcctctgggcgttcacgggcatgatggctcagatcccactggcatggttcgtgggccgctttttccagggcaacta

SEQ ID NO: 188785 - DNA, 1373 bp, Homo Sapiens
ttggttcaagtttgtgtccagaatttgtcagaacttgactttcagctgtcagatagttatcttgtagataccggtgatagtaccgacctgcaactagtaccactgaacacgcagtcccagcagcccatctacagcaagcagtcggtgttcttcgtctgggaactcaagtggacagaagagcctcccccttctctgcattgccggttctctgttggattttccccagcttctgaggaacagctgtctatctccttaaagccgtatacttatgaatttaaagtggaaaatttttttacattatacaacgtgaaggctgagatctttcccccttcgggaatggagtattgcagaacaggctccctctgctccctggaggttttgatcacgaggctctcagacctcttggaggtggataaagatgaagcactgactgaatctgatgagcatttttcgacaaagcttatgtatgaagttgtcgacaacagtagcaactgggcagtgtgtgggaaaagctgcggtgtcatctccatgccagtggctgctcgggccactcacagggtccacatggaagtgatgccgctcttcgccgggtatctccccctgcccgacgtcaggctgttcaagtacctcccccatcattctgcacactcctcccaactggacgctgacagctggatagaaaacgacagcctgtcagtagacaagcacggggacgaccagccggacagcagcagcctcaagagcaggggcagcgtgcattcggcctgcagcagcgagcacaaaggcctacccatgccccggctgcaggcactgccggccggccaggtcttcaactccagctcgggcacacaagtcctggtcatccccagccaagatgaccacgtcctggaagtcagtgtaacatgacaacgccagggtgaacacacgccacttcccagctaggagtgcactttatgggactgtgactggactcttccgttctggctccagccagaccttcagtggtcctgcctggccgtggggacatcagagagtgtcatcacgcagctggccagctgagttctgttgttgttttcatgccgcctgtgatctcagattcctgcctttctcaccccgtccccatgctggtgtccgacgccgcttactcagagccctggcctccctccccctacctcacacgctgctcatgaaagtttccacccacgctgtctccacggaaacagcctccgtctgctggctcttcgtggaaagccatttgtctttcacgtagacactcagcagccctcacagtcttagtgacgtgtgtgcctttctggtcacacagctgcccagtttcctgatcggggtggatatgtgtcccctaaaggggtaaa

SEQ ID NO: 188786 - DNA, 1047 bp, Homo Sapiens
ttgtacaaaaaagttgggcctgtcagtctacaagcacggggacgaccagccggacagcagcagcctcaagagcaggggcagcgtgcattcggcctgcagcagcgagcacaaaggcctacccatgccccggctgcaggcactgccggccggccaggtcttcaactccagctcgggcacacaagtcctggtcatccccagccaagatgaccacgtcctggaagtcagtgtaacatgacaacgccagggtgaacacacgccacttcccagctaggagtgcactttatgggactgtgactggactcttccgttctggctccagccagaccttcagtggtcctgcctggccgtggggacatcagagagtgtcatcacgcagctggccagctgagttctgttgttgttttcatgccgcctgtgatctcagattcctgcttttctcaccccgtccccatgctggtgtccgacgccgcttactcagagccctggcctccctccccctacctcacacgctgctcatgaaagtttccacccacgctgtctccacggaacagcctccgtctgctggctcttcgtggaaggccatttgtctttcaggtagacactcagcagccctcacggtcttagtgacgtgtgtgcctttctggtcacacagctgcccagtttcctgatcggggtggatttgtgtcccctaaggggtaaaacagccgtttaccgcagatcctctcattgtgcttttctagaataacacccttctaggggaggcgggtgggggagggagggatcataaccccttctgtgccttgggatgccggagctgggggacctggaggcccatcagccggagccacgtgaaaggtactgaagaaagctgagacccggctgtgaggagcgcctcagcggtgaggtggtttagggataaatgtttctggaaaccttgtggtcccccataatgttgatagaaatatcatatgcactggggagttaaatatatttaatttaatgatcattatatatgtgggggttaatatgttgttttcctgtcccctt

SEQ ID NO: 188787 - DNA, 1082 bp, Homo Sapiens
ttgggattctcatgggcaccttctgatatttggttttggatgcagcaaaccatatgaaaagattcctgatcagatgttcttccatactgactatcgaccacttattagagattctaataattatgtcttagatgagcaaactcagcaggctcctcatcttatgcctccaccattcttggtagatgtagatggaaatcctcatccaaccaagtatcagagattagtaccaggccgagaaaattctgcagatgaacatttgattccacagctgggctatgtggcaacaagtgatggagaggtgattgaacaaattataagcctgcaaaccaatgataatgatgaacgcagcccagaatcgagtattcttgatggaatgataagacagttgcagcagcagcaagatcagagaatgggagcagatcaggatactattccaagaggactttcaaatggtgaagaaacaccccggagaggttttagaaggctgagcttagacattcagtcccctccaaatattggtctgcgtcgtagtggacaagttgaaggtgttcgtcagatgcatcaaaacgctccacgcagtcagattgctacagaacgtgacctgcaggcttggaaacgaagagtggttgtaccagaggtaccactaggcatatttaggaagctggaagacttccgattagagaaaggtgaagaggaaagaaatctttatataataggaagaaaaagaaagactcttcagctctcacataagtcggattcagtggttttggtatcacagtctagacaaaggacatgtaggcgtaaatatccaaattatggtagaagaaatcgtagctggcgtgagttatcttctggaaatgagtcttcagctctgtaagacatgagacttcctgtgatcagagtgaaggttctggttcttcagaagaggatgaatggagaagtgacagaaaaaagtgagagttacagcgaaagttcaagtgactcttcatctagatattccgattggacagctgatgcgggcatcaatttgcagcctccttttaagaaacatcatgtcgtcgacgaattactcgattttgtag

SEQ ID NO: 188788 - DNA, 1821 bp, Homo Sapiens
ttggccaagatcccacaccgggtttttactcttgatgttgtcttagctctgttagaactgcctgaaagagaggtggataacaccctctccttggagcatcagaagttcttaaagcataagttcctggtgcaggaaattatgtttgatcgttgcttagacaaggcgcctactgtccgcagcaaggcactgtccagctttgcacactgtctggagttgactgttaccagtgcgtcggagagtatcctggagctcctgattaacagtcctacgttttctgtaatagagagtcaccctggtaccttactgagaaattcatcagctttttcctaccaaaggcagacatctaaccgttccgaaccctcaggggagatcaacatagacagcagtggtgaaacagttggatctggagaaagatgtgtcatggcaatgctgagaaggaggatcagggatgagaagaccaacgttaggaagtctgcactgcaggtattagtgagtattttgaaacactgtgatgtctcaggcatgaaggaagacctgtggattctgcaggaccagtgtcgggaccctgcagtgtctgtccggaagcaggccctccagtctcttactgaactccttatggctcagcctagatgcgtgcagatccagaaagcctggttgcggggggtggtcccggtggtgatggactgcgagagcactgtgcaggagaaggccctggagttcctggaccagctgctgctgcagaacatccggcatcacagtcattttcactctggggacgacagccaggtcctcgcctgggcgcttcttactctcctcaccaccgaaagccaggaactgagccgatatttaaataaggcttttcatatctggtccaagaaagaaaaattctcacccacttttataaacaatgtaatatctcacactggcacggaacattcggcacctgcctggatgctgctctccaagattgctggctcctcacccaggctggactacagcagaataatacaatcttgggagaaaatcagcagtcagcagaatcccaattcaaacaccttaggacatattctctgtgtgattgggcatattgcaaagcatcttcctaagagcacccgggacaaagtgactgatgctgtcaagtgtaagctgaatggatttcagtggtctctagaggtgatcagttcagctgttgacgccttgcagaggctttgtagagcatctgcagagacaccagcagaggagcaggaattgctgacgcaggtgtgtggggatgtactctccacctgcgagcaccgcctctccaacatcgttctcaaggagaatggaacagggaatatggacgaagacctgttggtgaagtacatttttaccttaggggatagcccagctgtgtccagccagggtggagaagcgcatcttccttctgattcagtccgtcctggcttcgtctgctgatgctgaccactcaccatcatctcaaggcagcagtgaggccccagcgtctcagccacccccccaggtcagaggttctgtcatgccctctgtgattagagcacatgccatcattaccttaggtaagctgtgcttacagcacgaggatctggcaaagaagagcatcccagccctggtgcgagagctcgaggtgtgtgaggacgtggctgtccgcaacaacgtcatcattgtaatgtgcgatctctgcattcgctacaccatcatggtggacaagtatattcccaacatctccatgtgtctgaaggattccgacccattcatccggagcagacactcatcttgcttaccaatctcttgcaagaggaaatt

SEQ ID NO: 188789 - DNA, 908 bp, Homo Sapiens
ttggctcctctgtaccaatggaatcgatggtgggatagtacccactacatatgcctacagcacaatgccaagcaacggagggagcaaatatattcagtctgttattcttgtttcaaatttctattaacagtattaacccggcccctgctgtgcccccagcttggctctaaccccagctcacaccagcaccctgcagcccagagcaatggggctggctgcctccttatctccaaccctcccgcttctcctcagtcaccgagacttggagccagaatctgagcctcagctggagtcagagacagcaggaaaatgggtcctgtgtaattatgacttccaggcccgcaacagcagtgagctgtcggtcaagcagcgggacgtactggaggtcctggatgacagtcgtaagtggtggaaggttcgggacccagcggggcaggagggatatgtgccctacaacatcctgacaccctaccccggaccccggctgcaccacagccaaagccctgcccgcagcctgaacagcactcctcctccaccaccagccccagccccggccccacctccagctctggctcggccccgctgggacaggcccccctgggacagctgcgatagcctcaacggcttggaccccagcgagaaggagaaattctcccagatgctcatcgtcaacgaggaactgcaggcgcgcctggcccagggccgctcgggaccgagccgcgcagtcccagggccccgcgccccggaaacgcagctcagcccgggctcggacgcctccaaggtccgcgcctggctgcaggcccaaggctttagctccgggaccgtggacacgctgggtgtgctgaccgggggcgcagctttttcttcgctgcagaagaggaggagctgcgggcggtgagcccccgaag

SEQ ID NO: 188790 - DNA, 1083 bp, Homo Sapiens
ttggctaggcaaaacaacaatggtcagcaacagacttcgactggctcttgtgagaatgcagcagctgaagggctttgtggtgagggcaatgacccttgaagatattcagaccagagaggtgcgccatatttctcatctgaatttcactgcctggccagaccatgatacaccttctcaaccagatgatctgcttacttttatctcctacatgagacacatccacagatcaggcccaatcattacgcactgcagtgctggcattggacgttcagggaccctgatttgcatagatgtggttctgggattaatcagtcaggatcttgattttgacatctctgatttggtgcgctgcatgagactacaaagacacggaatggttcagacagaggatcaatatattttctgctatcaagtcatcctttatgtcctgacacgtcttcaagcagaagaagagcaaaaacagcagcctcagcttctgaagtgacatgaaaagagcctctggatgcatttccatttctctccttaacctccagcagactcctgctctctatccaaaataaagatcacagagcagcaagttcatacaacatgcatgttctcctctatcttagaggggtattcttcttgaaaataaaaaatattgaaatgctgtatttttacagctactttaacctatgataattatttacaaaattttaacactaaccaaacaatgcagatcttagggatgattaaaggcagcatttgatgatagcagacattgttacaaggacatggtgagtctatttttaatgcaccaatcttgtttatagcaaaaatgttttccaatattttaataaagtagttattttataggggatacttgaaaccagtatttaagctttaaatgacagtaatattggcatagaaaaaagtagcaaatgtttactgtatcaatttctaatgtttactatatagaatttcctgtaatatatttatatactttttcatgaaaatggagttatcagttatctgtttgttactgcatcatctgtttgtaatcattatctcactttgtaaataaaaacacacctttaaaacatg

SEQ ID NO: 188791 - DNA, 1378 bp, Homo Sapiens
ttggagcttgtgtgcggagctgagaggcctatggatgaggaggacgcggcggccccggtttgttctcatgaacaagatggatgacctcaacctgcactaccggtttctgaattggcgccggcggatccgggagattcgagaggtccgagctttccgatatcaggagaggttcaaacatatccttgtagatggagatactttaagttatcatggaaactctggtgaagttggctgctacgtggcttctcgacccctgaccaaggacagcaattattttgaggtgtctattgtggacagtggagtccggggcaccattgctgtggggctggtccctcagtactacagcttggatcaccagcctggctggttgcctgactctgtagcctaccatgctgatgatggcaagctgtacaatggccgagccaagggccgccagtttgggtcaaagtgcaactccggggaccggattggctgtggcattgagcctgtgtcctttgatgtgcagaccgcccagatcttcttcaccaaaaatgggaagcgggtgggctctaccatcatgcccatgtccccagatggactgttcccagcagtgggcatgcactccctgggtgaggaggtgcggctgcacctcaacgctgagctgggccgtgaggacgacagcgtcatgatggtggacagttacgaggatgaatggggccggctacatgatgtcagagtctgtgggactctgctggagtacttagggaagggcaaaagcatcgtggatgtggggctggcccaggcccggcacccactcagcacccgcagccactacttcgaggtggagatcgtggaccctggagagaaatgctacatcgccctggggctggcacggaaggactatcccaagaacaggcaccctggctggagcagagggtctgtggcttatcatgcagacgatgggaagatcttccatggcagtggtgtgggggacccctttgggccacgctgttacaaaggggacatcatgggctgtggaatcatgttcccccgggactacattttggacagtgagggggacagtgatgacagttgtgacacagtgatcctgtctccgactgcccgggccgtccggaacgtgcggaatgtcatgtacctgcaccaggaaggggaagaggaagaggatgaagatgaagaggaagaggatggggaagagatagagccggagcatgaggggcaggatgtggtggttttcttcactcggaatgggcaagatcattggggaagaaaggatgcttgttgttccttctgggaggcttcttccccaccattgggatgctgagctgcggggagataagtccatgtagatctgcaccccttgagtgggctagggcctccc

SEQ ID NO: 188792 - DNA, 1047 bp, Homo Sapiens
gagccgagcacagaaacagcatcaggacccaggagggagacctgccccggcctcatcatggatgcagggcttaggccaggcccgaggcccaggccggcggccgctgctgcagctgcagcggccgcggcagctgcagcagcggctgcaccctcatgcacccgtttgtgcttggtgaggctggaggcctggccgaaggccttcccgcagagctgacagcgatagggacgctcgcccgaatgcacgtgcaggtgctggagcagcgctgagctctggccgaaggccttggagcagtgcgggcaggcgtagggccgctcgcccgtgtggatgcgcaggtggtgttgcaagttggagctctgcccgaaggctttgccgcagtgggggcagcggtaggggcgctcggccgtgtgtgtgcgctggtgctgcagcagcgccgagctctgcccgaaggccttgccgcactgcggacacgggtagggccgctcgcccgtgtgcgtgccaggtgtttgagcagcgcagagccctggccgaagcccttggcgcacaccgggcacttgtggggccgcgggccgccgtgcgtgcgcaggtgctgtgccaggagcgagccgtgcccgaaggccttgccacacaccgggcagtggtgcggcttctccccgctgtggctgctgcgatgtttcagcagcgtggagcgccagccgaaggccttgccgcaggccgcgcactggtacggccgcgccccagtgtggatgccacggtgctgagccagggtggcaccgtggctgaaggacttcccgcagtcggggcagcggtacggcttctcgccgctgtgcgtgcggcgatgctggctcagcccggagctgcggcggaaggctcgcccgcaatccgggcaggagaagggccggggcgggctggcgggggcggggagcaccgcggggctggtggccaagacctggggggtggcagtgaggccagaggagatggggtccacttttggatcgccggggctgagggtgtcgctgttaggatcgagccaacttttttgtacaaagt

SEQ ID NO: 188793 - DNA, 929 bp, Homo Sapiens
ttggcctaaaactgctaactgtgtacaactgtgaatttcaaaagtctccccagatgatagaattaactcttaatttaacaagatgtcctttgtgttgagactgagctagactaatagaccgggtatgtatttttaagctctacagcattacttgactaaacctctcttttggtttgtatattaaaattatgccataggcaacctcatctcgcatttaaaacctctcataaattagaaaactttgaatggttctccaaagataatactgggtgttgtacaaaatagcagcacaagccttcttttcctagaaatgggtacagattcattgcaaccacatggcttgggaaagttcaagctgctacccaaccagccttaatttgtgagttacaaatttaatagtacttgattcatagagggaacaaaaaatagacccatagtattatcatctttcaataggttcaaggagtagttccagttccagagaggccacctgaacctcgagccatggatgaccctgcgtctgccttcatcagtgacagtggtgctgctgctgctcagtgtcccatggctacagctgtccagccaggcctgcctgagaaagtgcgggacggtgcccgggtcccgctgctgcacctgcgcgccgagtctgtccctgcgcatccctgtggctttcctgcaccactgccccccaccaggatgatggagagtaagatgattgctgccatacactccagcagtgcagatgccaccagcagttcaaattatcattcctttgtcactgcttcatccacctctgtggacgatgcattgcctttaccacttcctgtcccacaacctaagcatgcttctcagaaaacagtttactccctcctttgctaggcccgatgtcaccactgaaccctttggtccaaataactgtttgcattttc

SEQ ID NO: 188794 - DNA, 945 bp, Homo Sapiens
ttggctctgggataggcgaccacggtgtcttcaaaagccccgtcagggttggcttcctggggccggaccgactgtgggtcagtttgcaccagcgctctggaatcgagttacgcgcgaaagggcagagtttctggaggaaaccgcagcctctcaaccgctgaccgggtctcagaaggcccccggcagggccgcttggcgggaactgaccacgcgccagtcaggctctccagggacctgcgcaggcgcgtgtgggcggagtcgtgcgcagggggcggggcttcgggaaggagccacagagagggcggggcgtaggacctgcgcttcgggggtggagtcggagcggcgcggcggcggtcatgcgggacgcggatgcagacgcaggcggaggcgctgacggcggggatggccggggtggccacagctgccgcgggggcgtggacacagccgcagctccggccggtggagctcccccagcgcacgcgccaggtccgggcagagacgccgcgtctgcggccagggggtcacgaatgcggccgcacatattcaccctcagcgtgcctttcccgacccccttggaggcggaaatcgcccatgggtccctggcaccagatgccgagccccaccaaagggtggttgggaaggatctcacagtgagtggcaggatcctggtcgtccgctggaaagctgaagactgtcgcctgctccgaatttccgtcatcaactttcttgaccagctttccctggtggtgcggaccatgcagcgctttgggccccccgtttcccgctaagcctggcctgggcaaatggagcgaggtcccactttgcgtctccttgtaggcagtgcgtccatccttccctagggcaggaattcccacagttgctactttcctggagggtctcatgttttatctggttcttaaatgtttgttactacagaaaataaaa

SEQ ID NO: 188795 - DNA, 819 bp, Homo Sapiens
ttggccaaccagcagcgatgacatgaccctcaccagccccagcatggacaactccagcgcagagctacttcccagcggggactcgccactgaaccagaggatgacggagaacctgctggccagcctgtcggagcatgaacgcgcagccatcctcagtgtacccgcagcccagaaccctgaggacctccgcatgtttgccaggctccttcactacttccgcggccgccaccacctggaggagattatgtacaacgagaacacgcggcgctcccagctgctcatgctgtttgacaagttccgcagcgtgctggtggtgaccacccacgaggaccctgtcattgccgtcttccaggctctgctcccctgagcccaggcggagggcggaaggctgctggggtgcgcaggtgggcgctcgcgtctccccaccccagggctccccccgtgctgaggctgagccctcttggccctgaggcctggcattgggtggatgcgggctggccgtggcccagtgaagcctgcagagccccgctgtccttgcccctggtggttccgctgtggggctgctgccctctgtgttcctacgcttccctccagtccttgccgcacgcgtaggcatctccacgctggaggggggcctgccaggactcctgtctctgggtgaggccgcatccttccaggcccatgtgggctgtgcgtttctcagaccctccttctgtccctacacctgctccttggaccccccagtctgtggccaccctgaaagaatgtgcagaaaacacttgtgtggcctggtcctgtctctctgacacccttccattt

SEQ ID NO: 188796 - DNA, 646 bp, Homo Sapiens
cactggaagtagcgatcgtgtttgtagtgcagtttgctgtgagccaccagctcctgcatgctggggaaggtctcggtgcagctcagggctgagcagcggaagagcttgccttccagggactgtgtgggcgggcagtgggttcgcagatgctgtgccaggtcacggacgctgggaaaactgaggcagcagccagggctggagcaagggatttgcttccctggaggtgggcgtcgtctgggaggccgcaggtcctcgctggtcccggagactatgctggtcaggccagggctgggtccggggccaggctggcagctgtctggggctggggaggagccctgctgcatccctccagcccctccacgttcccacactggcggtgtggctgcctgctcagggcctggctcctccgacatggaggaggaaggggctgcagctggcacagccggggacaacacctccttgtcggtctcactggagctgggctctgcagtggccagcatgtctgggatgggccctgagggtttctcctccatcttcgacacggctcggcctcttgtttctgcggctccggcggctgcagcttaggcggcggccaccctctgggcagtgcgagttcgcgctcacgtcaaaagccattttccaccca

SEQ ID NO: 188797 - DNA, 804 bp, Homo Sapiens
atatttgatacaataggaactatattgcaggtagtaaaaaatgatgaatagtgttagttcaaagcgatagatgatttgtatgtccaaattaaagaaaagcatgtatgggaaaaagattgtcatttttatgtaaatgataagtgctttctgaattgtatttaaagaaaagaagattttataagtccaaagaatcacttaatacaatgaataaagggtaataatttaccacttttggattaccttttatttaagacataaatttttcaactcataagctatttaaaatcttttcacttaagatacctgttgaaattttgtttaggtatctggccaggaacagtcttcacggggacaaagaattttatctattccaatttggcccccaaacctaggtatctcacagaactgtgtgtatgaggtacagcaggtaccaaaagtagaaaagacagacagtgatctgacacaaacacagctgaagcaaacagaggtcctagtgacagctgaaaaattgtcttcaaatttacagcaccatttcagtttgtcatctgtttattcacattactttcctgacactggaattccagaagtgaccacctgtcattcccgaagtgccataactgtggattatattttctactctgcagaaaagaagatgttgctgggcacccaggagctgaagttgctttggttggtggcttgaaacttctagctagactgtcacttcttacagaacaagacttatggactgttaatggacttccaaacgaaaataactcttcaagatcatctgcctttattggcaaa

SEQ ID NO: 188798 - DNA, 1222 bp, Homo Sapiens
tccatgtggttagtcagctcattgatgtccgtctgcagctctgcaaaagcttccttgcactccagggccacacgggactccaggttgtccatctgcagctgcagacgcttgagggtacggtccgcgtcctgagtcttgcgcttgtacgccaccagcacggctgtgatggccagcagcaggagcccaccccccgccgccagccccatcatggccggtagggtcagcgcccgctctgccgagatgtgcagggtgcccagccagaactccaggccacccaccagcaccatgacaggctgccggccagtctggctgggtgagtcgcacaggagttgtgtgtccgagacagtgagcgaacacggctggcctcctatcagcacagtgtagttgaggcgggagctgccggctgccgcgggaatcaggttcttgcccttcagcaccacgtgggagcccggtttgacgtccagcacgccagagggccccagcggctcaaagctgggatcagggtagtaggtaaaggaggagcggttgagggagcgggccgtttgcacgtggtccagcaggaagccaaactcatcagggtgctcgccttgcgcccgaggctggggccgcccaagaaagatgccgggggccttacacagcatggcagtgtcgttgatcacttggcatgtattggtggtctcaatgccgcggtacttggcacggacccggggctcctggaccgtcagcaggtgggtcccactcacagtgatggcagtgcttccattgatgatgctccaggtgggctcaaggcgggtgacggtggggtcctgagtgtaggtgtagatgagcccggggctggagatgttagcccggtcaatggcaagtgtgatgggggcctggctggggcccagggtggagagaggtgagatgcacacgatcgccttggcatctctccttacaaactggcactcgctgtccctcacagtcactgtgaccctgctgccagcatccagagagctgcctgagatggtaagccgtgtgcccccggacgccgggccacggctgggactcacttggtcaaacgttggggtcacaaagctgtagacctgctccgactgcgtgcggaagtcggctgaacagtcacccacacacagctccacgggccccggcggcgggctgggcaccagcgactcctccatctcacacacgatcctagggctcagagagcgccaacttttttgta

SEQ ID NO: 188799 - DNA, 929 bp, Homo Sapiens
tagaactctctcagagaactataaacggaagagacagaagagtacctctgctgcattttaataaagcagaactactgacgttaaatatacttctgaaatggctgaactaaacccgggtggctcagtgcttaaggtaacggccaattgcaatacacaggcggctgcattgataagtcggtggttgaagttgtgcatcccgactctaagtaccataacgtttggcagtagcacccagaacaggaaacgccaactcttttgacagcaaagggttaagtcaactgatttttttctgtcaagagccagagaaatacttgatattcttagctgtgtttctgtaatagttagttaataaattacatgacaaaaacctgactatataaatctattggtctaactacgtatttgtaacttttatagtagtccagccctttcgttactttccctccttgtgctcttaaagccagccttgcagatctgccgagaaaacaaatcccatttttttctttagaatagccttccccattcctcaaaatggaactgaggaaatcagcattccttattagattcctagcttcagtttttatccacggctgggaaaggagcgacctgcaagactgctttaaacacccttcggcatggcctgaagacaaaggcacgtccacactggagtgcagttgtctcaaatgtgaactcactccctcagggcaggcacatcgaggaagtgctaagacacttaaaagttcctagtgtttttgagacccacaattacttacaatttatgtagtgaattctaaaaattaaaaacactaaaaaaggcattattttagcctgtaattagttaacccattcaaaatccaaacatacaaaatggtttatttgaattcaggaactgcccctgttactaagaactctgttttaaagaaacccaa

SEQ ID NO: 188800 - DNA, 1309 bp, Homo Sapiens
ttggctttgttagaggattgagaatgaaatttctgcaaaagggcccatggttcatttggtatccctatttaattgcattgaaaatgtcatcctttctgttgttagataattggggtcttcccctgatatccaaccgtgattttggatcacatgggagaaaaagtcatccagtttttcatgtttgcctcaagtaatctttacagtgttacaaattatttgcttaagaagaatggtcttaaccagaattcttaacagatagtctcttaggttattatgttatggtctaagaggttaactgacatcttttggatggtattttgcattttgaatatgaacttacctgaggaactcccatagttccagaatcaggtgccttttagggagagaacaatacctaagattgtctgagcttccatctttctcatatttcctaagcaaggattctcacttctgaccatatttgggttagagttctgttttgtttctgttttctgtgtctagtgccaattagctaaatcagggagaaagaaatgatcacatgacttttagcatccttgagccatttctctgtgtaatacaggctttagattagtgccttatattggttttggtttggggcactggatgtcgcagctactgctatggtttcaggaggcctgtttagccacatggtgagaccgtggtgaaagggggatggaaattgcttggccagtctttgcctttcatcctgtaaaagtaagcatgtagaaggaggaagttgtgctaaaatgcctttgtttttttgttattattttcttagccagaacatctctctttgaactcacactgatacacacctgctactcttacacagtgcagcagggctgactcttagtctggcttccatgaagcgtcatgggtggaaacgcattctagtaaaaaaggtaggaaatccctaaaacttccagcctcacatagcacggttctcacctgtcactgttttcccacctctaaggatttcatgtacatcttttcaaagctagaaataagcactgtctaagtttatgttgcatttttagtcaaaagggagaaatcttattccttcttgaaaattttaagtgttatggttttatatagttcagttctttgagatttttgaaaagagtattttcagtaataaacgtgccatctctatctcttaaacatttattacaacaattgttttaaaatagaaaaaataaaatgcttctattttaccttttttcatttcagaagcattattctgtttattaacagtgtcccatctactgaatagaaaactttgagaata

SEQ ID NO: 188801 - DNA, 1538 bp, Homo Sapiens
actttgtacaaaaaagttggccttggccctgcactctgagtggcggctcgtggccttcggcaccagccatggctttggcctctttgaccaccagcagcggcggcaggtctttgttaagtgcacactgcaccccagtgaccagctggccttggagggcccactctcccgcgtcaagtccctcaagaagtccttgcgtcagtcattccgccggatgcgtcggagccgggtgtccagccggaagcggcacccggctggccccccaggagaggcacaggaggggagtgccaaggctgagcggccaggcctccagaacatggagctggcgcctgtttagcgcaagatcgaggctcgctcggcagaggactccttcacaggcttcctccggaccctgtactttgctgacacctacctgaaggacagctcccggcactgcccctcgctgtgggctggcaccaatgggggcaccatctatgccttctccctgcgtgtgcctcccgccgagcggagaatggatgagcctgtgcgggcagagcaggccaaggagatccagctgatgcaccgggcgccggtggtgggcatcctggtgctcgacggacacagcgtaccccttcccgagcccctcgaagtggcccatgatctgtcgaagagccctgacatgcagggaagccaccagctgctcgtcgtatcagaggagcagttcaaggtgttcacgctgcccaaggtgagtgccaagctgaagttgaagctgacggccctggagggctcaagagtgcggcgggtcagcgtggcccacttcggcagtcgtcgagccgaggactacggggagcaccacctggcagtccttaccaacctgggcgacatccaggtggtctcgctgcccctgctcaagccccaggtgcgctacagctgcatccgccgggaggacgtcagtggcatcgcctcctgcgtcttcaccaaatatggccaaggcttctacctgatctcaccctcggagtttgagcgcttctctctctccaccaagtggctggtggagccccggtgtctggtggattcagcagaaaccaagaaccaccgccctggtaacggtgcgggccccaagaaggccccgagccgagccaggaactcagggactcatagtgatggcgaggagaagcagcccggcctggtgatggagcgcgctctgctcagtgatgagagagcggcaactggcgttcacatcgagcggccgtggggtgcagcctcagcaatggcggagagtgagtggctgagcgtccaggctgcgcgatgagcacacactactactgatggcctttcgggggtccctgccccagccggagaggccggtgcacagggccccgccaggggctgggggcatcccggcttccacaatgcagctgctctgggcctcgggagaggatagaccccagtcccctgggctgcccttcccgggcctcgtctgtctgggtcctttggtcaatgttgcacagtttttattgctcccatccctttttgtagtgggctgggttttaagttataaa

SEQ ID NO: 188802 - DNA, 1201 bp, Homo Sapiens
ttggctaggcaggggttgcccttcaccatcttccagggtggcatgccacgggccagctacggggaccgccactgcatctcagtgatccacgatggccagcagacggccttcgacttcacctcccgtgtcatcggcttcactgtcctcacagaggcagaccctgcagccacctttgacgacccctatgccctggtggtgctggctgaggaggagctggtggtgattgacctgcagacagcaggctggccaccggtccagctgccctacctggcttctctgcactgttccgccatcacctgctctcaccacgtctccaacatcccgctgaagctgtgggagcggatcattgccgccggcagccggcagaacgcacacttctccaccatggagtggccaattgatggtggcaccagcctgaccccagccccaccccagagggacctgctgctcacagggcacgaggacggcacggtgcggttctgggatgcctcgggtgtctgcctgcggctgctctacaaactcagcactgtgcgcgtgttcctcaccgacacggaccccaacgagaacttcagtgcccagggcgaggacgagtggcccccactccgcaaggtgggctcctttgacccctacagtgatgacccccggctgggcatccagaagatcttcctctgcaagtacagcggctacctggctgtggcaggcacggcagggcaggtgctggtactggaactgaatgacgaggcagcggagcaggctgtggagcaggtggaggccgacctgctgcaggaccaagagggctaccgctggaaggggcacgagcgcctggcagcccgctcagggcccgtgcgctttgagcctggctttcagcccttcgtgttggtgcagtgtcagcccccggctgtggtcacctccttggccctgcactctgagtggcggctcgtggccttcggcaccagccatggctttggcctctttgaccaccagcagcggcggcaggtctttgttaagtgagcaggggcggctgggtcccggggctgggagtggggcccgcgaggactcccaggacctagcagcactgacagcctgccatccccccaaggtgcacactgcaccccagtgaccagctggtcttggaggggcccactctcccgcgtcaagtccctcaagaagtccttgcgtcagtcattccgccggatgcgtc

SEQ ID NO: 188803 - DNA, 790 bp, Homo Sapiens
ctttgtacaaaaaagttggatctcaccctcggagtttgagcgcttctctctctccaccaagtggctggtggagccccggtgtctggtggattcagcagaaaccaagaaccaccgccctggtaacggtgcgggccccaagaaggccccgagccgagccaggaactcagggactcagagtgatggcgaggagaagcagcccggcctggtgatggagcgcgctctgctcagtgatgagagagtcctgaaggaaatccagagcacactggagggagaccgcgggtgaggcaccgcccaggccagctggggtgggcccgaggctctgccagagggctcaggggagcgctgagagtggaggtccctgaggccatgactcccctgtctttgcctgtgcaggagcggcaactggcgttcacatcgagccgccgtggggtgcagcctcagcaatggcggagcagagtgagtggctgagcgtccaggctgcgcgatgagcacacactactactgatggcctttcgggggtccctgccccaaccggagaggccggtgcacagggccccgccaggggctgggggcatcccggcttccacaatgcagctgctctgggcctcgggagaggagagaccccagtcccctgggctgcccttcccgggcctcgtctgtctgggtcctttggtcaatgttgcacagtttttattgctcccatccctttttgtagtgggctgggttttaagttataaatgttaactgcctctgggtgaaaaagtttttaataaacacctattacctcttt

SEQ ID NO: 188804 - DNA, 971 bp, Homo Sapiens
  misc_feature (256)..(267): n is a, c, g, or t
aactttgtacaaaaaagttggatacactagcttgaacttaaatgttaaatgttattattaccagcatttgtccttttgtgaaatcagtatcagaatacttgcactctttaacacattctttataaaatgtataaattattcagaactatttaaaataaagaggagtgttattgcatgctgataatcattttgagtttgcctcagtagatactaaagcaaattgtttcagtttttttaaatgccctttgatgtttcnnnnnnnnnnnnggaactgtaatttgattgactgattttaagatcagccataagtaatcagcaatcttcaaaagcactttcagtggattggtcatctgggttctaaagggaagagtctgtgctactaaccatttcaaatgcagactcaaaccttcccaacatctttatgactctagaataatcatattgatgaaatcgtaattcatggttgagtttcagaacaaaagatattcattgcacattaaccatttagaggtcatttaaataacaaaatattgtattgtaaaagaactgtacaattttaaaacaataaagatttgaacctgtaaatgtgtgtgccttttaaagaaggatacatttttaatatatttgagtgattgctgggaagtgtgaaaatattgttatgtatcatatcaaagagaaacatgtttattacaaaaatgttctttaactatatactatgtaacagggtaaacagtgttatgtagaatagaattgtgtaaactagatctttagagaagttgccattgagcaaagttatttaaatgagttagttgagttggatgagaattgtttgaggtttgttgctagagaacaataataaaataattctttttcagaaatatttaatttcttcataaaaataagttaaatatttttttaaatatgtatatctaatagtaacaaatggaataaacatcatagttgtatagaaa

SEQ ID NO: 188805 - DNA, 1496 bp, Homo Sapiens
  misc_feature (770)..(794): n is a, c, g, or t
  misc_feature (1132)..(1142): n is a, c, g, or t
ttggctttatggagcttgtgcacctgaactcccaggtgaatcagatagatccgctgtggaaacagcagatgaaggaagagtggattcagcaatggagacaagcatgatgtctgtacaagaaaatattcatatgttgtctgaagaaaaacagcggataatgctgttagaacgaacattgcaattgaaagaagaagaaaataaacggttaaatcaaagactgatgtctcagagcatgtcttcagtatcttcaaggcattctgaaaagatagctattagagattttcaggtgggagatttggtactcatcatcctagacgaacgccatgacaattatgtgttatttactgttagtcctactttatattttctacattcagagtctctacctgccctggatctcaaaccaggtgagggtgcttcaggtgcatctagaagaccctgggtacttggaaaagtaatggaaaaagaatactgtcaagccaaaaaggcacaaaacagatttaaagttcctttggggacaaagttttacagagtgaaagccgtatcatggaataagaaagtataacttatggacaaaattaatacattctatgacatttttttctgatttgtcctgcagtgctcattcatcactccaaaaacagcaggccatctttttatgcaaaagtcagcgtgacaatatacttcactggtgtacatcgtttactttttaactggcttcattttaggaataataaattcatcagaatccttggctgaattaaaatggnnnnnnnnnnnnnnnnnnnnnnnnnacccagacaactctagaaatgcggaccaaactacttcattttctcaaagggcataccttgtgcattgtggcttatgatgagccatattaattgcctgttaaatatacactagctcgaacttagatgttaaatgttattattaccagcatttgtccttttgtgaaatcagtatcagaatacttgcactctttaacacattctttataaaatgtataaattattcagaactatttaaaataaagaggagtgttattgcatgctgataatcattttgagtttgcctcagtagatactaaagcaaattgtttcagtttttttaaatgccctttgatgtttcnnnnnnnnnnnggaactgtaatttgattgactgattttaagatcagccataagtaatcagcaatcttcaaaagcactttcagtggattggtcatctgggttctaaagggaagagtctgtgctactaaccatttcaaatgcagactcaaaccttcccaacatctttatgactctagaataatcatattgatgaaatcgtacttcatggttgagtttcagaacaaaagatattcattgcacattaaccatttaaaggtcatttaaataccaaaatattgtattgtaaaagaactggtacaattttaaaaccaataaagatttgaacctgtaaatgtgtgtgcctttttaaagaagatacatttttaa

SEQ ID NO: 188806 - DNA, 1054 bp, Homo Sapiens
ttggcgagacccaccgcaaagggaggggaagaagacccgttgccatgcagaagcgcccctttccttatgaaattgatgagattctgggtgtccgcgatctcaggaaggtccttgccttgcttcagaaatctgatgatcctttcatccaacaggtagctttgctcactctgagcaacaatgccaattattcatgcaatcaagagacaatccgcaaattgggaggcctcccaattattgcaaacatgatcaacaaaactgatccacacattaaggaaaaagccttaatggccatgaataacctgagtgagaattatgaaaatcagggccggcttcaggtgtacatgaataaagtgatggatgatatcatggcctctaacctgaactcagcagttcaagtagttggactaaaatttctaacaaacatgactattactaatgactaccaacacctgcttgtcaattccattgcaaactttttccgtttgctatctcagggaggtggaaaaatcaaggttgagattttgaaaatcctttcgaattttgctgaaaatccagatatgttgaagaaacttctcagtacccaagtgccagcatcatttagttccctctataattcttacgtggaatcagaaatccttattaatgcccttactctatttgagattatctatgacaatctcagagcagaagtgtttaactatagagaattcaataaaggttcccttttttacttatgcactacatctggagtgtgtgttaagaaaattagagccttagcaaatcaccatgacctcttagtgaaagtgaaagttataaaactagtgaacaaattctgattggttatgtaccgtcaaaagacttgaagaaatttcatgattttgcagtgtggaagcgttgaaaattgaaagttactgcttttccacttgctcatatagtaaagggatcctttcagctgccagtgttgaataatgtatcatccagagtgatgttatctgtgacagtcaccagctttaagctgaaccattttatgaataccaaataaatagacctcttg

SEQ ID NO: 188807 - DNA, 850 bp, Homo Sapiens
ttgggctttgaggcggtgggatgtgtcagcagaatgtctcctgcccccgagagcgaccccgaggccactgagaagagcagcgcggcctggccggcccgaacgcctgcgtctcagtagctgggagccacgggcccacgcccgcccaccggccgcagtgatgttctagccacagaggagccaagacctcaggtttccagagacttgggatttgcacggcagcagagtcaccgtggagaggccagggtatcacaaacttatggattttgacaagaaaggagggaaaggggagacggaggagggccggagaatgtccaaggccggcgggggccggagcagccacggcatccggagctcggggaccagctcgggggtcctgatggtgggccccaacttccgcgtcggcaagaagatcggctgcggcaacttcggggagctccgcctaggaaagaatctctatacaaatgaatacgtggctatcaaattggagccgatcaagtcccgggccccgcagctgcacctggagtaccggttctacaagcagctcagcgccacagagggcgtccctcaggtctactacttcggtccgtgcgggaagtacaacgccatggtgctggagctgctggggcccagcctggaggacctgttcgacctgtgcgaccggaccttcacgctcaagacggtgctgatgatcgccatccagctgatcacgcgcatggagtatgtgcacaccaagagcctaatctaccgggacgtgaagcccgagaacttcctggtgggccgcccggggaccaagcggcagcatgccatccacatcatcgacttcgggctggccaaggagtacatcgacccc

SEQ ID NO: 188808 - DNA, 1171 bp, Homo Sapiens
  misc_feature (418)..(470): n is a, c, g, or t
ttggctaatgtacttcaacctgggctctctcccctggcaggggctgaaggctgccaccaagagacagaaatacgaaaggattagcgagaagaaaatgtccacccccatcgaagtgttgtgtaaaggctacccttccgaatttgccacatacctgaatttctgccgttccttgcgttttgacgacaagcctgactactcgtacctgcggcagcttttccggaatctgttccatcgccagggcttctcctatgactacgtgttcgactggaacatgctcaaatttggtgccagccgggccgccgatgacgccgagcgggagcgcagggaccgagaggagcggctgagacactcgcggaacccggctacccgcggcctcccttccacagcctccggccgcctgcgggggacgcaggaagtnnnnnnnnnnnnnnnnnnnnnnnnnnnnnnnnnnnnnnnnnnnnnnnnnnnnnggcccgtctccggcatggagagagagcggaaagtgagtatgcggctgcaccgcggggcccccgtcaacatctcctcgtccgacctcacaggccgacaagatacctctcgcatgtccacctcacagaatagcattcctttcgaacaccacggcaagtagctgctcgtctcccatcggaaggcagcactggattcctggtcgggtggcttccagtggtcttcagtctgtcgtgcaccgatgagaactctccttattgctgtgaagggcagacaatgcatggctgatctactctgttaccaatggctttactagtgacacgtcccccggtctaggatcgaaatgttaacaccgggagctctccaggccactcacccagcgacgctcgtgggggaaacatactaaacggacagactccaagagctgccaccgctggggctgcactgcggccccccacgtgaactcggttgtaacggggctgggaagaaaagcagagagagaattgcagagaatcagactccttttctagggcctcagctctcctccagtggtggccgccctgtactccctgacgattccactgtaactaccaatcttctacttggttaagacagttttgtatcattttgctaaaaattattggcttaaatctgtgtaaagaaaatctgtctttttattgtttcttgtctgtttttgcagtcttac

SEQ ID NO: 188809 - DNA, 1193 bp, Homo Sapiens
  misc_feature (867)..(911): n is a, c, g, or t
ttggcaggaacaaacgagggaatatgcctcctatggaacatgatggggatgttatagaacagtcaaacataagaatttcatctgctgaaaataaaagtgctccagacaatgaaacatccaaatctgctaatcaagatacctgtagtccttttgcagggatgctctttggaggtgaagatcgagaacttattcagagaaggaaagagaaatacagactagaactgttggaacaaatggctgagcaacagaggaacaagagacgagaaaaagatttagaactcagggttgcagcgtctggagcacaagaccctgagaaatcgcctgatagactaaagcagtttagtgtggcaccaagacactttgaagagatgataccacctgaaagacccagaatagctttccagacacctctccctcctttatctgccccatctgtcccacccatcccatcagttcatcctgttccttctcaaaatgaagatttgcgcagtggactcagcagcgcccttggtgaaatggtgtctcccaggattgcacctctgcctccacctcccctactaccacctttggctactaactatcgaactccttatgatgatgcatactatttttatgggtccaggaatactttcgatcccagtcttgcttattatggttcaggaatgatgggcgtacagcctgcagcttatgttagtgctcctgtcacccaccaactagcacaacctgttgtgaatacggttggacagaatgaactgaagattacaagtgatcaagtgataaattcaggattgatttttgaagataaaccgaaaccttccaaacagtcacttcagtcttaccaagaggctttgcagcagcagattcggnnnnnnnnnnnnnnnnnnnnnnnnnnnnnnnnnnnnnnnnnnnnntatgaagctaaattagaagctgaaatgagaacatataatccctggggaaaaggtggaggtggtgctcctctcaggggatgcaaaaggaaatctgataactgatttgaataggatgcacagacaaaatatagatgcctaccataacccagatgcaagaacatatgaagataaaagggctgttgtatctctagacccaaatttagccacttcaaatgctgagaacctagaagatgctgcaaaataaaaagctcagtcatatgcaaacacagagctctccttttg

SEQ ID NO: 188810 - DNA, 1581 bp, Homo Sapiens
ttgggtccaagttcctcgaacaccaggatgtggaaacaaaaccacccttcaggtccactttattccattttgtacaaagaaccccaagtgtggcaggctctgaaaagagacttagaagcccttccaaagtgattgaaagtttacaagagaaactggcctccccgcctaggagagcagaccctgaccgcctgatgagaatgaaagaggtgagctctgcgtcacggatgaaagtcctgatcttaaggaatgcctactcccaagacgacgccgaggaattgaaggccaccaaagggggccaggccgggctcccgggaggccttgtgtctcctggcagtggggaccgtgcccaggagattgggccactcactctctgtgtccaaggacagcatctccagggaagagaaggagcatccggcagcacaaaaggagaacagcatggatcaagacttctggtgcccagattcctatgaccctagcagagtggagagggtgtgatgaaatgccggtggagcttgcattccgttgcaaattgagtattctcaagtagctggtagatttagtctatcagccccacttccccatgtagaagctggaagctgctgagtttttagcatcctgataacattctttaccactgccactaggaaacttgccatcctctcagaattgctttgtggcgataaagcaatcgtccgttgaaaccatctgtttttatagcatgaagatttaatgcctataattaggaaggagttttcacagaaaccctccctcatgacagatttgactaagctggtaaatagtttggtgttgctctcattctgggtgaagatttcaatgtggaagatctagcaaatgctttggaaaggcctgtgaatggtgtgctcccctctgtgtctccatggcctgcagtccatgctcttgtgaaggagtttgggacactggctgttgcccggtgtttcagcactttcagtttaggggaaatgtgaatcaataggtatgatccatttctaatcaatttggccttctgctgctggaagtaactttacttataagtaacttgccatcagagaataaaagcaatatcttttaagttcctgaaaaattaaaacttgtactgtaatatactaagagtattatttatctggcagtgaaatattttgatcatttgcaaacacgccattgtctgctttgcactcagtattatctatttttattttctgtatgggtatttagaaattctttatatgaaaaataattgctggtttaaaatagaccattttaacaaagtgactatatttctttttacgaaaaatgctatttttctatgatgtaaacaattgttaggcggcagatttttaaggaagtattatttttatttaagagtctgtatccctttgtgtgagaggaaccccaaagagggttcacttttgctttaaagctctgtcccttacccactgacaactctgctacttttattttatcttagaaaatgtcaatatagacatatcacaagggttaataaaagaaacttttcacaaagatttttgtacaagtgtagctatcaggttatatttgaaaata

SEQ ID NO: 188811 - DNA, 859 bp, Homo Sapiens
actttgtacaaaaaagttggcagcatctgaccccaggcccagctcgtcctggctggcctgggtcggcctctggagtatggtctggcgggtgccccctttcttgctccccatcctcttcttggcttctcatgtgggcgcggcggtggacctgacgctgctggccaacctgcggctcacggacccccagcgcttcttcctgacttgcgtgtctggggaggccggggcggggaggggctcggacgcctggggcccgcccctgctgctggagaaggacgaccgtatcgtgcgcaccccgcccgggccacccctgcgcctggcgcgcaacggttcgcaccaggtcacgcttcgcggcttctccaagccctcggacctcgtgggcgtcttctcctgcgtgggcggtgctggggcgcggcgcacgcgcgtcatctacgtgcacaacagccctggagcccacctgcttccagacaaggtcacacacactgtgaacaaaggtgacaccgctgtactttctgcacgtgtgcacaaggagaagcagacagacgtgatctggaagagcaacggatcctacttctacaccctggactggcatgaagcccaggatgggcggttcctgctgcagctcccaaatgtgcagccaccatcgagcggcatctacagtgccacttacctggaagccagccccctgggcagcgccttctttcggctcatcgtgcggggttgtggggctgggcgctgggggccaggctgtaccaaggagtgcccaggttgcctacatggaggtgtctgccaacgaccatgacggccaatgtgtatgcccccctggcttcactggcacccgctgtgaaacaagccctgcaga

SEQ ID NO: 188812 - DNA, 1524 bp, Homo Sapiens
ttggctcccagcaacttcgcggtgtggtgaactctctgaggaaaaacgtaagttcgagccctgattcctccgcttccccgcagggtgaccttgggcttgtgcccccggcaccacccctgtcccgggtccctgttttctctctggaaatgggttgaagaccaaagaaaataatgtgcgccacttgggtcaccccgggccgcctgccccggaaaattggccccagttgaggagttgtggctgtaaggatgccttgaaccgaggcggcggtgctcgtggttggagctctccagggtgggtgcgcatttgtaatgcggtggatgctctgggactcggcccctctgaaggtgcttgggggttggggacggcccaggcagcagtggcgtaggcgtcctaggaaggcgggagcagaggcagaaatgtcgctgcaagaccgtagtcagggtccttgaccacaggggtcacttgtgaccaaccacatggtctgttgttcctcctgccccctggttcagcccaggaaacactggtgctcaggtttggagccagagatttgcactgaaagggcgggattgagtcgccagttgtcagtttcctcagcagtattcgcggaggttttcacaggaggccgttgcttcgtaaatattatacatgtattcttctttttggagcattttgattattactctcagacgtgcgtggcaacaagtgactgagacctagaaatccaagcgttggaggtcctgaggccagcctaagtcgcttcaaaatggaacgaaggcgtttgtggggttccattcagagccgatacatcagcatgagtgtgtggacaagcccacggagacttgtggagctggcagggcagagcctgctgaaggatgaggccctggccattgccgccctggagttgctgcccagggagctcttcccgccactcttcatggcagcctttgacgggagacacagccagaccctgaaggcaatggtgcaggcctggcccttcacctgcctccctctgggagtgctgatgaagggacaacatcttcacctggagaccttcaaagctgtgcttgatggacttgatgtgctccttgcccaggaggttcgccccaggaggtggaaacttcaagtgctggatttacggaagaactctcatcaggacttctggactgtatggtctggaaacagggccagtctgtactcatttccagagccagaagcagctcagcccatgacaaagaagcgaaaagtagatggtttgagcacagaggcagagcagctcttcattccagtagaggtgctcgtagacctgttcctcaaggaaggtgcctgtgatgaattgttctcctacctcattgagaaagtgaagcgaaagaaaaatgtactacgcctgtgctgtaagaagctgaagatttttgcaatgcccatgcaggatatcaagatgatcctgaaaatggtgcagctggactctattgaagatttggaagtgacttgtacctggaagctacccaccttggcgaaattttctcc

SEQ ID NO: 188813 - DNA, 942 bp, Homo Sapiens
  misc_feature (117)..(136): n is a, c, g, or t
ttgggtgaaaaatcctctgtcatggagcctgtcctgccaagtggcaagagtgtggggactgtctggtgatgatgtctttcatggcatctgagtgaagagtgacaggttggctcaacnnnnnnnnnnnnnnnnnnnnaattgccttgtattgtaagtattcttccctgcagtccaagtgacttttcattttttgttttaacttcaggcaaaatctttaaccactctggcctctgtttcccccaccaacggggagcagtgacatttacctccctcacagagtcactgtgaggattctatactgatttgaagtggagctgttcagaactgaaccttgtaggaaattccaagggcctttctactgaatctggtgatggggtggggccgtggcactttctctgccacagctgttcttcacagtgttggtgctaatgaggccagggtgcagggttcgattcacacgtaggccagttaacttagagaaaatctatttccttacctctagccagtcacttcctttttccgcagttgtgatgggttttgctgagccatccactctgactgatttcctctgaagtaaacatatttacaatccaaagcaattctactgacagaagtgttgccttcataatcaaacagcttgtttttccatctcctctgcaaccctaattaaatgagtacaggtctacaaaatgttttcaaggagaaaagcagcatatccttaagtgaagtattatatttttcaataaccctgtagtggcttgatgcagggaaccctgggggactttcagcgaagagctgtgctcttttctgactagattagagcgtttggagtggaagacgtcaaatgtgtagtgagatggaggttttacattgttcttctactggctgtgatgaagtgccagaatgtctctttagaacaagagttagattccccatttctcc

SEQ ID NO: 188814 - DNA, 947 bp, Homo Sapiens
gggagtagagtggcagcacggtggtggtcccaggctgggcacctcaagatacaggttgtggtgaaggaaaccagttgtttcaggcccaacagcatctgtgtctttcctcacttgctggccggggacactgggctgcccagtgatcgaactgctcgttcaggaaacaagactccttggttgtgactgtggcaccaccacccccaaaacactcccctttcttccgccacttctgcttccatgcctgcttgcggaggagcctgctacggagtgcccggccccgcacgtagtgtttctgcttcatgttgagccgtacgtaattgcccctgtcatggcgggccagccgagggaagatgtgcaggggggctgtgccctcagccttcccagccctagcttgactggaggggctgagtccgtggtacctggggttcgatgggctgctgcagggctgaggtggctgtgcctgtacaggttcccctggagggtcttcctcaactgctacagccccagccccctccgatgggggtccagcttggctgctctcctgctggacctgtgcggggctctcccagggctcctcgttccatctccgcttctcgcctccactgctgctgggctgggggctccccacacggatactgacttcttggaaggctgaagcctctgggccctgggagccagcaccaggaccaaggacagccgactcaccagggatcagaagttgtgattcctctgagcctagatcaggcctgcaggctttgggggcccccagaaaatctgggacctcactgtgacatcgctgtaaccagccaggatctagggagcccagccgctggctcagggatgcctgcagatgctggagccggcctggccttggctggggctcagggagctgtggaggctcatcactgactttttctgcaaaggaggggacaggccctgtaccccaa

SEQ ID NO: 188815 - DNA, 857 bp, Homo Sapiens
ttgggtttcttttcggaggcgaattctacagttactacaagtgcaagctggcgctggagcagcagcagctcatctgcaagcagcagaccccggagctggagccagccgccaccatgccacccctgccacagcccccgctggcccccgccgcgcccatcccgccggcccagggcgcgccatccatggacgagctcatccagcagagccagtggaacctccagcagcaggagcagcacttgctggcgctcagacaggagcaagtgacagcggccgtggcccacgcggtggagcagcagatgcagaagcttctggaggagacccagctagacatgaacgagtttgacaacctcctgcagcccatcatcgacacgtgcaccaaggacgccatctcggccgggaagaactggatgttcagcaatgccaagtccccgccgcactgtgagctgatggccggccacctccggaaccgcatcacggctgatggggcacacttcgagctgcggctgcacctcatctacctgatcaatgacgtgctgcaccactgccagcgcaagcaggcccgggagctgctggccgccctgcagaaggtcgtggtgcccatctactgcaccagcttcttggccgtggaggaagacaagcagcagaagatcgcccggctcctgcagctctgggagaaaaacggctacttcgatgactccatcattcagcagctacagagcccagccctggggcttggtcagtaccaggccaccctcatcaacgagtactcctcagtggtccagccggtgcagctggccttccagcagcagatccagaccctcaagacgcagcacgaggagtttgtcaccagcctggcc

SEQ ID NO: 188816 - DNA, 1921 bp, Homo Sapiens
  misc_feature (216)..(246): n is a, c, g, or t
  misc_feature (255)..(266): n is a, c, g, or t
  misc_feature (567)..(575): n is a, c, g, or t
ttggcaattatatgtacatgggaaaaaacactggaaaaattgtagttgaattacctcactctgtcaacagtaagctgtaaaaacagaacaatgacataaatcaagggagaaagaaaatgggcactttatgtctcagaattactcaaatcaatttatttttagttggtaatggatataatatttcttaaaacaaaagtaaggtgttaatgaataggnnnnnnnnnnnnnnnnnnnnnnnnnnnnnnncttgggggnnnnnnnnnnnntgtgctaataaaacttccctccatggctaagagggaaaacgcttacattcaattctttagtcatggatggtctcgttccagatgttattgttccagggaactaaattcattcctgatgccagatctgatcgagtcagtatgtcttcagcttgatcagattttaaaatcagttttgaaagtggttcccgacttctttgctttgggagaatttggtcttatgctcataagcagttcatgagtgacaagtgtagcaaaagccagccatatattttcagaatctatatcctcaggaaatggtccnnnnnnnnnctataaatcaccaaccaactatttaaatggacatttgggggaattccctcccaaatttgattttgttattagaaaaatgattccgtgaacacagatgtgttttgaagaagtagcacgtaatggcttttatctaccatcaacctgataaggcacatgtgaaatggaaatgttctctttcctctgaagcagcaaattaatgttgaaaacttacatagacagaaagtaggttttggaaagggaaaccacagagattagggggacttaaaattaatataggcacaggaaagagaaaagtgtgcgctccattctcagtgggggttcaccacaaaacacgggccccaggagggaagcgctgtctaggcacacggcaaggccttagtaacagcatgctacactgctcgaggtacggtatgtcccatcgccctgtgcaccgtagagacctcagtcatctcaaggaagaatacatttgcttctccttagaggcgttcgaactagaagctatgcgttacctctgattctggaaacagaatagcagccactcattctgcattcccatttttctctccacgtgttctggtggaatgagatgctccttggcactatagcctgatgtcccacattgacccactgaccacacaggaaaagcagcgaaacctgcaccctctcttctgagtcacgcctgtggctcatcggcttccctcttaacctttagtgccctgaagactgctgccgctgtcaccgttgcgctgaaaccccatgggcccgttctgattgaaggtgaagcccaccagattatttttcaaagtcttaggtttcggtgtatctaacctgctcagtaaatatggacgcaattaaagatgctctaggaaatttggggactgtatttaatttttctttccttccatctgaggagcaaggaaatcctactgctgaatagctgttagtatctattttacaagatttactcattttcaggtacctaatgtagctgctagcatgcatgcacaacaatacaatttatatggtaaatggaaccaaataatggcttcactgaatgttatggctgcactgaagggaaatgtcacggtaaatagctgccaaattatggatcatgccgaagtgtcacaactgcactaaagacaaatagcactagaggctattgccactgtgacgcttttgagttatgaagaagggtagcggcctgatgcgaggctctttgtgtcctcattatagcaaagggttactggtgcaggggactaggaaaaacccgtccagtgtggtgcttagttattcatccatccctttcagacctaacagccacagccacacggaaagagactttgcct

SEQ ID NO: 188817 - DNA, 1276 bp, Homo Sapiens
agttcttaacccagtgtccatggactcagaaactccatgatgcccctgagatggtatgcacaattccatgacaatatgccctttctggggagatagtccataatgttctgctaaatttcaaatgggctcgtgacccaaaaaagtcaagaaccacagcacttgagtaaaatactctttttacaatccatataagcccttgattggaagggcttttcaaaatcatttagtctaacaactgcccagtttccagtcgggggaactgaggcagagcaaggtagtgatcacaccagtacaagatctcaggtcccaggctcctatgcaagttttttttccccattatatcacacttatctagcaagggaccttgtggtttgtggctttagtggccatcatttctgggggttggcttttaccctttttcttgaatatttgccaccaagtgaaaaatgttaggacataaacccttgccaggtccctttcatttgctatctctattattggaaaggacctaaaaattggtgtaatggggcagaaatctgaggaatggacatttctaattcctgtttgttgaagggaagttgctggaaagagcatcagtacttgtttctatgcagatgcctgggccgtagcttgtctgtagagtctgtataattataatgttgcccagtgtgagggaaagagctttcctacttgcactcttctaccaaggccctgttagtgcactgattatagtactgacagataaacctagataaagagatagagagtgagtacatgcacactcatgtgcaaacccactcagagatgcatttggaacagtgctactgaaaggcagtagtcattttcaagactgaattccaaacatggtttattggtgagttaggaacatgtaaggccaagtacactgagagcctttttgaaagtaattgagtggaaacttgatgccattctaaatcaaggcatatccaggtggcccggttgaactcactccactgtacccagtctcaaaggccaggttgctaagaaaccaggagtaaaagagtcaagtgaccatcatttcacctgctgcttgcccccaatagtagtctctgtgaggccttactgacctcacctaggaagtgatttttgagcccttgtttcagggctgtggcctccctgctctatcctgaataaagcagacaggtgtgcagattttggccatgaaagcatggctaatagggccacagtccctttaaagaaacatggtttgactctggttttcttgggggaaaatacc

SEQ ID NO: 188818 - DNA, 1725 bp, Homo Sapiens
ttggatccaggatcacgttgctgttacagtctccccccgtgaagttcctcatcagcccagagttcttcaccgtgctgcattctaaccctagtgcctaccgcatgtttacaaacaacacgtgtttgaagcacatgatcaccaaagtccggagggacacccaccactttgaacgctaccagcataaccgcgaccttgtgggattcctcaacatgttcgcgaacaaacagctagagctgccgcggggatgggaaatgaaacatgatcaccagggcaaggtaggagaagattctcgacatgcaggaccaccagttcttcccaggccatccagtacattcaatacagtcagtaggccacagtaccaggacatggttccagtggcttacaatgacaagattgttgcatttctacgtcaacccaatatctttgaaattctacaggagcgtcaacctgatcttaccaggaatcactcactcagggagaagatccaatttatccgaactgaagggactccaggattggtgcgcctttcaagcgatgcagaccttgttatgttgctgagcttatttgaagaagagataatgtcatatgtgcctccacatgccttactccaccccagctactgtcagtccccacgtggctctcccgtgtcatctcctcagaactcgccaggtacccagcgtgccaatgcccgggctccagccccttacaagcgggatttcgaagccaaactgaggaacttttacaggaagttagagactaaaggatatggacaacgcccagggaagttaaagttaattatccgaagagatcacttactagaagatgcttttaatcagattatgggctactccagaaaagacctgcagagaaataagctatatgtcaccttcgttggggaggaagggctggattacagtgggccttctagagagtttttcttcctggtatccagagaactctttaacccatattatggcttatttgaatattcagccaatgacacatacacagtacaaataagtcctatgtctgcttttgtagacaatcaccatgaatggttccgattcagtggtaggatccttggtcttgcactaatacaccagtatttgttggatgccttcttcacacggcccttttataaggctcttctcagaattctatgtgacctgagtgacctagaataccttgatgaagagttccatcagagcctgcagtggatgaaagacaatgatatccatgacatcctagacctcacgttcactgtgaacgaagaagtatttgggcagataactgaacgagaattaaagccagggggtgccaatatcccagttacagagaagaacaagaaggagtacatcgagaggatggtgaagtggaggattgagaggggtgttgtacagcaaacagagagcttagtgcgtggcttctatgaggtggtggatgccaggctggtatctgtttttgatgcaagagaactggaattggtcatcgcaggcacagctgaaatagacctaagtgattggagaaacaacacagaatatagaggaggataccatgacaatcatattgtaattcggtggttctgggctgcagtggaaagattcaacaatgaacaacgactaagttgttacagtttgttacaggcacatccagcattccctatgaaggatttgcttcactccggagggagtaacggcccagaagattctgtgtggagaaatgggg

SEQ ID NO: 188819 - DNA, 925 bp, Homo Sapiens
  misc_feature (739)..(747): n is a, c, g, or t
ttggcaaccccacccacccgggagcccaagaaggtggcagtggtccgtactccacccaagtcgccgtcttccgccaagagccgcctgcagacagcccccgtgcccatgccagacctgaagaatgtcaagtccaagatcggctccactgagaacctgaagcaccagccgggaggcgggaaggtgcagataattaataagaagctggatcttagcaacgtccagtccaagtgtggctcaaaggataatatcaaacacgtcccgggaggcggcagtgtgcaaatagtctacaaaccagttgacctgagcaaggtgacctccaagtgtggctcattaggcaacatccatcataaaccaggaggtggccaggtggaagtaaaatctgagaagcttgacttcaaggacagagtccagtcgaagattgggtccctggacaatatcacccacgtccctggcggaggaaataaaaagattgaaacccacaagctgaccttccgcgagaacgccaaagccaagacagaccacggggcggagatcgtgtacaagtcgccagtggtgtctggggacacgtctccacggcatctcagcaatgtctcctccaccggcagcatcgacatggtagactcgccccagctcgccacgctagctgacgaggtgtctgcctccctggccaagcaaggtttgtgatcaggcccctggggcggtcaataattgtggagaggagagaatgagagagtgtggnnnnnnnnngaataatgacccggcccccgccctctgcccccagctgctcctcgcagttcggttaattggttaatcacttaacctgcttttgtcactcggctttggctcgggacttcaaaatcagtgatgggagtaagagcaaatttcatctttccaaattgatgggtgggctagtataaaaatattt

SEQ ID NO: 188820 - DNA, 1273 bp, Homo Sapiens
ttggcttctaattccctaaacttacctcacagtaatgagctgtgttcatcccttgtgcatcccgaattgagtgaggtcagttctaacgttgcaccaagcatccctccagtaatgtcaagacctgttagctcttcctccatttccactcccttgcccccaaatcaaataactgtatttgtcacttccaatcccatcacaacttcagctaacacatcagcagctttgccaactcacttgcagtctgcattgatgtcaacagttgtcacaatgcccaatgcgggtagcaaggttatggtttctgagggacagtcagctgctcagtctaatgcccggcctcagttcattacacctgtctttatcaattcatcctcaataattcaggttatgaaaggatcacagccaagcacaattcctgcagccccactgacaaccaactctggcctgatgcctccctctgttgcagttgttggccctttacacatacctcagaacataaaattttcttctgctcctgtaccgcctaatgccctctccagtagtcctgctccaaacatccagacaggtcgacctttggtccttagctcacgagccacccctgttcagcttccttcccctccttgtacgtcttctccagttgtcccttctcatccccctgtgcagcaagtgaaagaattgaatccagatgaggctagccctcaggtgaacacctcagcagatcagaacactcttccctcttcacagtcaaccacaatggtttctccccttttgaccaatagtccagggtcctctggcaaccggcgaagcccagtctcgtctagtaagggcaaaggaaaagtggacaaaattggccaaattttgttgaccaaggcatgtaagaaagttacaggctctcttgagaaaggggaagaacaatatggtgcagatggagagactgaaggccaagggctagacaccacagctccggggctcatgggaacagagcagttatccacagagctggacagtaaaaccccaacgcccccagcacccactctgctaaaaatgacctctagccctgtgggcccgggcactgcctcagcaggacccagcttacctggcggtgctctccccaccagtgtacgctcgatagtaaccactctggtaccctccgagctcatctccgccgtaccgaccacaaaagcaatcatggtggcatagcatctgagtcacttgcgggtggcctactggaggagaaggtgggatcccatccagaacttctacccagcatagcccc

SEQ ID NO: 188821 - DNA, 2054 bp, Homo Sapiens
ttggcgctttaaaacatttctcctggattcagactatgaaagattagagcacggaactttatttgatgataaaggagaaaagcatgccaaaaaaggagtctgtatttgggaatgtattgacagaatgcacaagaggagtcccattttctttaattatttatattcaccattggaaatagaggctctaaagcccaatgtaaacgtctctagcctcaagaagtgggattactacatagaagagaccctgtccacaggcccttcctatgactggatgatgctaacccccaagcacttcccctccgaagactctgacctggctggagaagctgggccacggagccagaggagaacagtgtggccatgctatgatgatgtcagctgtactcagcctgatgctctcaccagccttttcagtgaaattgaaaaattggagcacaaattgaaccaagcccctgagaagtggcagcagctgtgggaaagggtaaccgtggaccttaaagaagaaccaagaacagatcgctcccaaagacacctgtcgagatccccaggaattgtgtctaccaacctaccttcctatcagaagaggtctctgctacatctcccagacagcagcatgggggaggaacagaattccagcatctccccatccaatggagtggagcgaagagcagccacgctctatagccagtatacatccaagaatgatgaaaacaggtcctttgagggaacactttataaaagaggggctttgctgaaaggttggaagccccgttggtttggtttggatgtaacaaaacatcagctgcgctactatgactcaggtgaggacacaagctgtaaaggccacattgatctggctgaagtagaaatggtcatccctgctggccccagcatgggagccccaaagcacacaagtgacaaggctttctttgatctcaagaccagcaaacgtgtgtataacttctgcgcccaggatggacagagtgcccagcaatggatggacaagatccagagttgtatctctgatgcctgatgcccatggtcaacccacgcagaagaaacagaagaactcatgctgccagatagatagaaaaagaagcatggatccttgaggagctgacaacaagttatcccagggcctgaggttctcctgcccagtcccctcttgcaggggttgctatatctacttaacctgaataggtgtttcacacaggtctggtcaacagccccatgcactccctgtatcttgcactaaatttttctaacagggtcttagtggttaatgatcagaagatgtctcctgagccaactgtgaacctcacccaggcaaaatggctaccacctacttgggtccttcttcatgaaagctatagatccttttttgttctctgaggtcataatttcctcggagacctgtttaacaagcaaaaatcaaaaccctccaagattgtctcatattctacctggactaggtttcctatgagagacatctacttgtaatgcctgacctttgagatgctcagttctctggtgctgccaaaagatgcttccatggtccgtgctctgccagtggggttcacaacaagagacgtcattgttcagtagcaggcaaagagggagcacacagcattattctgatggaaaaagattatccagggaatggtacaacaatgaccagcccaatgcaggaaaacactacttccaaaacactgaattctctagaccagaggtgctctgaggatccagggccttgtgttcttatgtatcttctgcttcctgacagcttctttttcaaaataacatgcaaaaaaagctgaatgcactaactcacaaaacaaacacttgcactgaattcccaatgaagtgaagatgttggaaagaccacaggccagctatttagaccatacgcacctgtgacaagggctgtgttgaccacagtcacactgtggcatgactggatacccaactacacttctacacatgaaagtaagaactgtctttagattttctttactttgataacttgtgattgtttagcttagacccaagaaatg

SEQ ID NO: 188822 - DNA, 1390 bp, Homo Sapiens
  misc_feature (351)..(386): n is a, c, g, or t
  misc_feature (644)..(673): n is a, c, g, or t
  misc_feature (796)..(1082): n is a, c, g, or t
caaagtaaaattcaggacgcgcatgaaatcagttttgcttccatttgagttcgatttatgctattaatagttctgatcaccaaatttataacatttaaagtactgtctgttacccgatgtctggtatgtttacataaaacgtggttctgcccagtaacagcataaggtaaaaatgtgatttcccctaaaattataacatcatgtcatcctagagtgttacccacctgggagaggtacaaaaaacaaagcattagatttcaggctaagaacagccagttttaggagtaagaattacatcgaatagccttaagagcatttaaaaagtcaaggcatcttaaacttcagaaatgnnnnnnnnnnnnnnnnnnnnnnnnnnnnnnnnnnnnctaacccaaccacaaaactctaggagccaaggcactcagtatctgcctgttggttatgtacaaagccacaaatgggaggtcttttcaaattaatctggaaaatccaagcacaagactcttagcttgaaaagcctgacaactctgcctccaaatccaggcaactgtgcttccactcctcttcttgcttgccttaggaaaacttcactttagtaagataaggcaaaacagaaaataaaagagtcgtttaaccaaactccnnnnnnnnnnnnnnnnnnnnnnnnnnnnnncaacttcctacaagtatacttgtaaaaatatatttttaaagcacccctaagtaaacaccaatcttgcccaagaaaaatcacaggtttggggcctatctgataatgactgtcccggaagtctcnnnnnnnnnnnnnnnnnnnnnnnnnnnnnnnnnnnnnnnnnnnnnnnnnnnnnnnnnnnnnnnnnnnnnnnnnnnnnnnnnnnnnnnnnnnnnnnnnnnnnnnnnnnnnnnnnnnnnnnnnnnnnnnnnnnnnnnnnnnnnnnnnnnnnnnnnnnnnnnnnnnnnnnnnnnnnnnnnnnnnnnnnnnnnnnnnnnnnnnnnnnnnnnnnnnnnnnnnnnnnnnnnnnnnnnnnnnnnnnnnnnnnnnnnnnnnnnnnnnnnnnnnnnnnnnnnnnnnnnnnnnnnnnccagaggtctcttttacaacagcactaaccaacagactttagtccaatatggttaagaacaatgaatctctgaaatttcagagttggcaaacgtttaaaataacgtataagaacttgggtgaggtttttctcccctatctctttacatacacaccataaataagaacacccaagtccatgtccctgggtgctggtaaagtgttctagatagtgtgaatcacagtcacgataaaaccattttctgaaggtttcgaggagatattggatatgcaaatcaaatgtcctaaacacagcagaaaagatgccaa

SEQ ID NO: 188823 - DNA, 984 bp, Homo Sapiens
ttggctaaactgactgaggatgttgatgtttccgatgaagctggcctggactaccttttaagcaaggatattaaggaagtggggctgaaaggcaagtcagccgagcagatgataggagacatcatcaacctcggcctgaaagggagggaggggagagcaaaggtcgtcaacgtggagatcgtggaggagcccgtgagttatgtcagcggggagaagccggaggagttttccgtcccattcaaagtggaggaggtcgaagatgtgtcgccaggcccctgggggttggttaaggaggaggaaggttatggagaaagcgatgtcacattctcagttaatcagcatcgaaggaccaagcagccccaggagaacacgactcacgtggaagaagtgacagaggcaggtgattcagagggcgagcagagttattttgtgtccactccagatgaacaccccggggggcacgacagagatgacggctcggtgtacgggcagatccacatcgaggaggaatccaccatcaggtactcttggcaggatgaaatcgtgcaggggactcgaaggaggacacagaaggacggtgcagtgggcgagaaggttgtgaagcccttggatgtcccagcgccctctctggagggggacctgggttccactcactggaaagaacaagctagaagcggtgaatttcatgccgaacccacagtcattgaaaaagaaattaaaataccccacgaattccacacctccatgaagggcatctcctccaaggagccccggcagcagctggtggaggtcatcgggcagctggaggaaacccttcccgagcgcatgagggaggagctgtccgccctcaccagagaggggcagggtgggccggggagcgtttccgtggatgtcaagaaagtccagggtgctggtggcagtttccgtgaccctggttgctgaagtcaacgtctcacaaactgtggatgccgatcgggtagacct

SEQ ID NO: 188824 - DNA, 932 bp, Homo Sapiens
ttggtttcatttcacccccttaatgaaaactttctaacttatatctcaagtttcttttcaaagcagtgtaagtagtatttaaaatgttatacttcaagaaagaaagactttaacgatattcagcgttggtcttgtaacgctgaaggtaattcattttttaatcggtctgcacagcaagaactgaaacgaatggggattgaactgctttgcctgttctttctatttctaggaaggaatgatcacgtacaaggtggctgtgccctgggaggtgcagaaacctgtgaagactgcctgcttattggacctcagagtgcctggtgtgctcaggagaattttactcatccatctggagttggcgaaaggtgtgataccccagcaaaccttttagctaaaggatgtcaattaaacttcatcgaaaaccctgtctcccaagtagaaatacttaaaaataagcctctcagtgtaggcagacagaaaaatagttctgacattgttcagattgcgcctcaaagcttgatccttaagttgagaccaggtggtgcgcagactctgcaggtgcatgtccgccagactgaggactacccggtggatttgtattacctcatggacctctccgcctccatggatgacgacctcaacacaataaaggagctgggctcccggctttccaaagagatgtctaaattaaccagcaactttagactgggcttcggatcttttgtgggaaaaacctgtatccccttttgtgaaaacaacaccagaagaaattgccaacccttgcagtagtattccatacttctgtttacctacatttggattcaagcacattttgccattgacaaatgatgctgaaagattcaatgaaattgtgaagaatcagaaaatttctgctaatattgacacacccgaaggtggatttgatgcaattatgc

SEQ ID NO: 188825 - DNA, 2424 bp, Homo Sapiens
ttggattttacttatttaatatacattgaatggtaccttgctacagtatttctgacatttagagtagtgttgaaatactcggctagcatcagcaccactatagcactgtccgtgtcatatgagtcactaatattaactccagggacttctggataggctaatagatcattggatacgaagggctcttttgaagcttcagtataccatgtttgcatagtttatctttaaaaacaactttaaaggttcttttgtgagccaggatctcagactgccgtagcatgatgctgtccatctttagcgcatgggctgagaacacctcttccctgaggcttctgaaggttgctgtctgtcatgagtgcatgaaggaggccaagagtttatgctatgggaggaaacagtcactgatttgcctagattctgagagtctggcccatagccaaccacattttcctttgggataatttatttcctgtggcatctagccagaagaaattgaggatgtttcctttcacagctgctccaagcctgttgcccaattcacggtacaagggagcaccccttccctttcctctgaaggtacgccacccacctccgtcgcccacctcagcgcccaggagccttgggacttccttccatattataaatcattcttcttcacgtcaatacacttcatattaatttctagtacagaaaatcttgacagctatcagaatgccttggtcatagtgttgttgcaaaattgaccatacaggtggcccatgtataaaatctgaattttaggggtttgtccccacctcgcatgctggcttttacagggaggtgtctgggattcctcattagcaatcaaaacttaattactgggatgcagagtccttactttatcgccagcccgtaggcatttctgaagtgcacttttttgaaacatcattttgctaactctcagcagtgtctaattaaactgagcaatacttttgtgaattttaattaatctcagcaaaaccatgatgggagagagtcctctgatggaaatgtagtccctggattatgtgtaacctttttattgctcttagatgcagaggatagaaagcattttttggtgcagtggtcttgtggcaaacacaagaccctctatgcgtctccaactgttatcctaatctagaaaatgaggactggcccctgggcaaaagtgacatgaggaatttactctggaagaggaaaatctgggtggctttccaaggctaagataggtttgtatttcaccctgtggccaagctacagaacttctgagattgtggaagaatttttgcaaccagcagggaaagaggcctcttactgcctaaacacaaagttacactgagcttttctactgtcctttgcctattgctccctctatcatgtaaagatctgggaaggatgagaggcagggcctgcttgtcatgagctgcactcttttctttttaactaatcattgacaattggaagaaaattgacgttaaagaagtttctccattggcttactaacaaaaccttttgggtttcattaattgtccttgaaattgagttcctttggcatttttccttgcagtcatcagttaagcatgttgcatcctgaattcacagaagtttagctttgcaggtttgaatctctgtaatttaactcccgtggacttggtcgagttttcagcaggttgggagccacctctcttcatttcagcagtgagtcatcccttgacttttcaaatgacagaattttttccaattgtaaaattagcactgtaaaacaaagaaccaaagtggcatcctaagagttgttaaacctgaagtctagtttatgaggaattgtccaagttggagtttaaatagtatctgcttttgtctcaaagcatctaagttattctgacagaaaatggtaagtcagctttgcaggcagatgcgcctctgggcctcctaccttgctccacagctttctggccatcttgtctcccaggccatgccactgctctgccacatgtcagcaaatttctttccaccagtcttatagcatcttacatgatcaaatcatcacagaataaccccgtgatagattattgatagcaatagagaggggcgctttgtcactgatttttctctcagattccttttccatctctcatccataaaggaaggactgaaatccaaaggcattctccttttgtacctacagtatccagaacccacgtgggcagccttctgcttatgacaataattggcccattgcatgcagagagaatgtcttcatagagagaatgtcattaaatacttgaatctgcatgacagtttgacttgaatgcaacagcaggaaaattttgcaagttacataattgtatatacagtagggttttcttaagtctcttcggttcatcctttgtaatttgtgtgtgtatc

SEQ ID NO: 188826 - DNA, 947 bp, Homo Sapiens
ttgggaaccaaagatggggagcagtgagagcagctgaatcccttacagccattcctgagcctgcctctccccagcttcttgagacaccaattcatgcctcccagatccaaaaggtggaaccagcaggtagatctaggttcaccccggagctccagcctaaggcctctcaaagccgcaagaggtctttagctaccatggattcaccaccacatcaaaaacagccccaaagaggggaagtctcccagaagacagtgattatcaaggaagaggaagaagatactgcagagaagccagggaaggaagaggatgtcgtgactccaaaaccaggcaagagaaagagagaccaggcagaggaggagcccaacagaataccaagccgcagcctccgacggaccaaacttaaccaagaatcaacagcccccaaagtgctcttcacaggagtggtggatgctcggggagagcgggctgtgctggcactggggggaagtctggctggttcagcggcagaggcttcccacctggtcactgatcgcatccgccggacagtcaagttcctgtgtgccctggggcggggaatccccattctgtccctggactggctgcatcagtcccgcaaggctggtttcttcttacccccggatgaatatgtggtgaccgaccctgagcaagagaagaactttggctttagccttcaagacgcactgagcagggctcgggagcgaaggctgctagagggctatgagatctatgtgacccctggagtccagccaccaccacctcagatgggagagattattagctgctgtggaggcacatacctacccagcatgcctcggtcctataagcctcagagagttgtgatcacatgccctcaggacttctctcattgctccattccactacgggttgggctgcccctcctctcgcctgagttcctgctgactgga

SEQ ID NO: 188827 - DNA, 1220 bp, Homo Sapiens
ttggctcagaaccggcaagaaatcaaggaattgatggctgaagcaaagtattacctcatccaggggctggtgaatatgtgccagagtgccctgcaggacaagaaggactcctaccagcctgtgtgcaacatccccatcatcacatccctaaaggaggaggagcggctcatcgaatcctccaccaagcccgtggtgaagctgctgtacaacagaagcaacaacaagtattcctacaccagcaactctgacgaccacctgctgaaaaacatcgagctgtttgacaagctctccctgcgcttcaacggccgcgtgctcttcatcaaggatgtcattgttggcgagatctgctgctggtccttttatggccagggccgtaagctggcagaggtgtgctgtacctccatcgtgtatgccacggagaagaagcagaccaaggtggaattcccagaggcccgaatctatgaggagacactcaacgtcctactctatgagactccccgcgtccccgacaactccttgttggaggccacaagccgtagccgcagccaggcttcccccagtgaagatgaggagacctttgaactgcgggaccgtgtccgccgcatccacgtcaagcgctacagcacttacgatgaccggcagctcggccaccagtctacccatcgcgactgaccagaccctcagggagtcagggcacgggaggccctatctcccatcctgtggaacccgccccattggccaccccatgctgctgctgcctgggtctctgctctagcacccagaggcatgacaggccctgctcagaggtcagagggtctgggcagaggagggaccacattcccctgccttgcccctgagcacttctggagactgcgtcctgtcctatctgctcaccatcacccttcctgcccgacggagctgcttctgctccctggggcatatggactgacccacctcctgctgagaaccttcccctaggccctgtgcagaagggctactgccccttaggcctcagctgggggaaaggcagttctggtgctgtagaggccctggtgcagaaagtgggacgtctttttttcctaaggtgtttaagcacaggcttgataagtttggtttttaaaaaataatctccaaatgaataattctaaatctagtaatgaggaaactgagcatttcttttgctcctccagggtgccaagaccctacatatgacagaaccc

SEQ ID NO: 188828 - DNA, 1303 bp, Homo Sapiens
ccgggtttttggagcttgtgatggaggaaagtggatctcatacaggtagtttccccattggtcctcatgtccccagaggctctgaacagcttaaaataaatatctccgaggctgaagctcctgccatttatagggttggtgatggtcccattcaccatctgcacctcgtgaggcttcacggcgcaggcagcccgggagtcccagctgaagtagtaagtgcagctgtcgatatcaaacctcttgaatgcaggtctgcccaccgtctttgtacaggtcaattctatcacggaggatgcggtcttatttccaccacacggataacctttggagtacgtgacaacaactttgtcacctatgacacccagcttctgcgtgtgaacgagtcccaggacctggacgtcaccagttgtggtccttctgcaaatgctggccctttcagagcagcccaggggccctttatatattttctggcacagatttatatagtacgagactccgttgtggaccagggaccaggacccggtgagagaggagagcagccgcaggtcgtaggttttgtgtttctggacgaatttgcactccaacttctttggagggcagacaacttttgttttccactcaaatgtcacatcacacccacgcacttcactgaagacttgtggcctcccaatgtcctcatcttcatcacacttaaatatgatgctggatgtccggtagctgtttgagtgtctgcagaagccccactcgtggtctctgtcgtagtccgcagttgtgctacaccacagcttcgccctgctctctatgatgcactcctcgtagctcttcccattgaatatgaaggggaagacacaggggacgccgtcatcggtttctggagggcaacgatcaccattcacgtaacttaaaacgaccgcttcatcctggtgcctgtaatccagtttcattgattgcagccgtccaaaggatgcccccttggtgcctgagagcagacagactcctccgtccttacagcctccttgttctggcccgactgcaaaggtgcacaccccaacgctgtaggtgcgcgagtcgcgagtcaccttaaaggtgctcgtggaaaggctggacaagttgaagctgtagaggagctgctcatctgtcagggtacagccatccatcctcacttcatcaggacagacgacaggagtctcccattcgaacacaaagtcgcactcgctggtccttaacagcttaggcgttcccatgctcacacctctcttacagtgaaacgcgatgagcgaggtgtagttgaaatgcttgccaa

SEQ ID NO: 188829 - DNA, 927 bp, Homo Sapiens
ccagcaccccgacagcgagggggtggtcactgtcacacctttcctcacaccgcaaccccgagcggcccaggtggcagcggcaggtgtagcctcgaccgtcaggccggttcacacaggtggcgtcgggcccacaggcctctggatggcagtgcagggcctgcgagtgctcacagcggctcccggtgaagccagctgggcagacgcacacgtagctgctgctctcagagtcatggcactgaccgccattctggcagggccggtcccgacaggtggggcagtgggagatgccgtgcgccgtgaggttgaggtcatggaagacgatctcctcgccctggatgcgcagctcccggacacagcctatgaagccgctgctcagccccgccttggggatggcaccatagtcaggatagccacccaggtagagttcctcgttcagatccaggccctggaacttgccctgggaggtcccattgaccggggccaggtcacccacaatcagggagccctgggtgaggctgcgcagcagggtcacggtgtggaaatggcccagggccagtggtgtgggatggcggatggtggccatgcctgagcctgcatcgaaccggaactcgggccttcccccaacgaggccgaaggagatgaagtcgggctgccggttggccaggttggtggggctccctgggactcgcttctgcccattgtacagcagcatcccatcggctgagtcgggccggaaggtgatcttgatctcgaacttcctgtaggcatccttgatggtgggcagcggtaggaaggagtagggggtctgcgtgaagtagggcaccacccgctctggcacctgcaggtgggcaaaggctttgaccttgccctggcggttagtggcggtgcagacgtaggtacctgcgtcctggggtcggactgagccaa

SEQ ID NO: 188830 - DNA, 1422 bp, Homo Sapiens
  misc_feature (662)..(672): n is a, c, g, or t
  misc_feature (907)..(940): n is a, c, g, or t
  misc_feature (945)..(1078): n is a, c, g, or t
  misc_feature (1108)..(1245): n is a, c, g, or t
acctagtgagatcccatctctatcgtaattttcttaaaaagtggtattcctaagtcaagttactacctgattgatgacagggagagagaccaggaaaccactgtgttgtaatcccttaggaaaccttacacctttacttgctttattatcaggtaatttccaggatgtaagccatacagccagaaggcagggtacaaaggagaggaggcagagatggtacactcatacagaagcttctcctgattgtccactgaatagaaggcaagctttccctcctcaaggttcagccagatgcccaccaccccaggtctgtctgagccaaggacagtttccttgaccatgtgccatgcagagagctggctagtccccttccattccacacaacaagagtccatagtccttcccaggacctggtcgcggctcatctcccaggaagccaccccaactgcccagtggctgcaattcctagtgtccacttcccagtaatgctttccagaagacagggcctgggaacataagacctggctggtagaaaacctctcacagctccagcgatagggttgtgggcggtgagacacagtcactgtacgggaatccttggacacctccaggctgcaggaaaggctcttcaagttaaaggttggatggatggcccctttggnnnnnnnnnnngaacaataagaacatggccggtcatcttttgatggtccatgctaagaagtcttcaaatagcaactttgtatcttttggtgtgatgtttcactcacactagcattaaaattgctacatcacccaacaggaagaaatgataaatgtttcagatgatagatatgctaactaccttgatcggatcactatgcaccatatgtattgaaacatcactatgtatcccataaatatgtacacnnnnnnnnnnnnnnnnnnnnnnnnnnnnnnnnnngaaannnnnnnnnnnnnnnnnnnnnnnnnnnnnnnnnnnnnnnnnnnnnnnnnnnnnnnnnnnnnnnnnnnnnnnnnnnnnnnnnnnnnnnnnnnnnnnnnnnnnnnnnnnnnnnnnnnnnnnnnnnnnnnnnnnnnngtcaattttaaaaatcaggccagctccttnnnnnnnnnnnnnnnnnnnnnnnnnnnnnnnnnnnnnnnnnnnnnnnnnnnnnnnnnnnnnnnnnnnnnnnnnnnnnnnnnnnnnnnnnnnnnnnnnnnnnnnnnnnnnnnnnnnnnnnnnnnnnnnnnnnnnnnnnnctgggcgtaggcaaggtgcggtggctcacgcccgtcttatggtgatttatgaccacagctgtttataccttcccagttaaactgaaacttcctgattgaggaccatgtcttactcactttgtatatttcatttggtttcctattgagtgaataaattgctaacacttatacagcatg

SEQ ID NO: 188831 - DNA, 1892 bp, Homo Sapiens
ttggcacagtttgcacagaagacagaagccttgagcagagaaaagattgaccttgaaaagaaactctctgcttctgaagttgaagtccagctcatcagagagtcgctcaaagtggcgttgcagaagcattctgaggaagtgaagaaacaggaagaaagggtcaaaggtcgtgataaacatatcaataatttgaaaaagaaatgccagaaggaatcagagcagaaccgggagaagcagcagcgtattgagaccttggagcgctacctggctgacctgcccacactggaagaccatcagaagcagagccagcagcttaaggattctgagttgaagagcacagagctgcaggagaaagtgactgagctggagagtttgctggaggagacccaggcaatctgcagagagaaggagattcaactggaaagcctgaggcagagagaagcagaattctcctccgctggacatagcctgcaagataaacagtctgtggaggagaccagtggagaaggtccagaagtggaaatggagtcctggcagaagcgatacgattcgctccaaaagattgtggagaagcagcagcagaagatggatcagttgcgctcacaagtacagagcctagagcaggaagtggctcaagaagaaggaacaagccaggccctgagagaggaggcccagcgaagggattcagccctgcagcagctgcgcacagccgtgaaggagctttcagtgcaaaaccaggacttgattgagaagaatctgacactccaggaacacctgcgccaggcccaaccagggtctccaccttcaccagacacggcccagctggcacttgagctgcaccaggagttggccagttgccttcaagatctgcaggctgtctgtagcattgtgacccagagggcccagggccatgaccccaatctctccctgctcctgggcattcactcacagcacccagagactcagctagatttgcagaagccagatgtgatcaagaggaaactagaagaggttcaacagctgcgtcgtgacattgaggacttaaggaccaccatgtcagacagatatgcccaggacatgggagaaaactgtgtcacacagtgaggaattctgggggattcccccagggaggagctgggctgctgagagcctagtccagcaggtttctgccctgacattctcttgtctgctattcccagagaggtctcagaggggaggggagagcctgcatctgggggccaagggctgattagggaactgtgtcctacccacactggcatgttggattacgtttgtcctgttaattcactctcgacggtgagttactaattaacttttggcaggtacaacagataagtcctcacaaactgttcccagccctaggctgacatgagagacgaacaggctgtccacctttcttctccatccaatgggatggatccatgttcattcccacttcacaccttggtcctgctgattagagagctcatcagaggggcctggaaaggctgagcaagtaccagtgacaatggccatttaagaattctcaggccccatgtgccagccttcttgggaactgagctggctttctgggttttctcatgcctggtcttactgcttcttcctcagggctcttgttctcccagaagcctcagggtaatgtgttggttagcacgtaactactaggattggggccctagggattatagccaggactctaatctgcctaccatgccatttaacaagagatcccactctccagctgccttgtgtccctagggtcctggccatgtgtttagtgtgctaaactttctcctttgttctcagccttccaggtagtccccttcctggacttaagagtgcaaactcttctctgtggttctagccttggg

SEQ ID NO: 188832 - DNA, 1567 bp, Homo Sapiens
ttggcgggacgcgccggcggcggcggagactccggggctgcggcgccgcccgccccgcccgcagagtccggctgccgcgcatcgtccgcagacgccgccaccgccatgggctcctgaggctagcttgtcactttctgcaaaggtttccctcagggagcctcctgctgccaggcaccatgacagtgaggggggatgtgctggccccggatccagcgtcgcccacgaccgcagcagcctcgcccagcgtctccgtgatccccgagggcagccccactgccatggagcagcctgtgttcctgatgacaactgccgctcaggccatctctggcttcttcgtgtggacggccctgctcatcacatgccaccagatctacatgcacctgcgctgctacagctgccccaacgagcagcgctacatcgtgcgcatcctcttcatcgtgcccatctacgcctttgactcctggctcagcctcctcttcttcaccaacgaccagtactacgtgtacttcggcaccgtccgcgactgctatgaggccttggtcatctataatttcctgagcctgtgctatgagtacctaggaggagaaagttccatcatgtcggagatcagaggaaaacccattgagtccagctgtatgtatggcacctgctgcctctggggaaagacttattccatcggatttctgaggttctgcaaacaggccaccctgcagttctgtgtggtgaagccactcatggcggtcagcactgtggtcctccaggccttcggcaagtaccgggatggggactttgacgtcaccagtggctacctctacgtgaccatcatctacaacatctccgtcagcctggccctctacgccctcttcctcttctacttcgccacccgggagctgctcagcccctacagccccgtcctcaagttcttcatggtcaagtccgtcatctttctttccttctggcaaggcatgctcctggccatcctggagaagtgtggggccatccccaaaatccactcggcccgcgtgtcggtgggcgagggcaccgtggctgccggctaccaggacttcatcatctgtgtggagatgttctttgcagccctggccctgcggcacgccttcacctacaaggtctatgctgacaagaggctggacgcacaaggccgctgtgcccccatgaagagcatctccagcagcctcaaggagaccatgaacccgcacgacatcgtgcaggacgccatccacaacttctcacctgcctaccagcagtacacgcagcagtccaccctggagcctgggcccacctggcgtggtggcgcccacggcctctcccgctcccacagcctcagtggcgcccgcgacaacgagaagactctcctgctcagctctgatgatgaattctaggtgcgggctgcagtggcggaagtgctggcgccatagccacggtcaggctgtgccccacctccagcctcaccaccaggccaggaggcagctggcacagtgctcacgccgcctttatttattggaccagaaacactcacatgtcacttccagaggaacgggggacagcc

SEQ ID NO: 188833 - DNA, 1618 bp, Homo Sapiens
ggcctgtccaaagggcttgggcccagcatgcaggatcttgcgagtgccagcagttgaaattaagagccccagggagcgtgtgggacagatggggagccagggaggggcgctttcatatgtgactaaggcacagaagagatgggccaggggccagatggggtagaacaccaggccctgtgtggataggggccccgagaggagtctgggaccattccccccacctcccagctccccactgtgtggccacccctcccggtctccctgccggactgccttcccccagaagctggtctgaaacgtggagactcagacctttcccctgaaacgggagggagaagccccaaagagagagaggacccagcatcagcctgggaaggagggctgggagcccctgagccctgaagcagccaggaagcaagggctctgcccaaagctatcgaggaaggacccaagtgagccggcagtgcgggctgtgggctgtccttggtaggccagggggaaggggcatgaggcaggcagaggtgtggccacgacaggtggggatacccaggggcccagaagcccctgcttcaacagaagcggtgcccaggggccctgaatgcccttcctgggtggggcctgtgactcctggtgtctggctctgatccttgcagcatgccacagaggcctgggtcaggaggggaggaccacagagcgcccacatccccactcctgcccggggtgaggtgaatctagcactggacaaaggtggacaggggagggatgcaggcgggaagagcccaggtcagacagggtattgcacggtgtgtgggggagccacggcttgccgacctcagcatgagagtctcgcggggaggaggggctagaaggctgcagccgctggtccacacacaagcattggggcctgggtgcggctggtcccagcatgcccccagcacaggacgggcagcaggggcataagccttgctcccagtgtcctctgccctcgcccgggcagtgcaggctgggccatgtataaatattcctgaaggcccatgggcgagcctggctgtcccccgttcctctggaagtgacatgtgagtgtttctggtccaataaataaaggcggcgtgagcactgtgccagctgcctcctggcctggtggtgaggctggaggtggggcacagcctgaccgtggctatggcgccagcacttccgccactgcagcccgcacctagaattcatcatcagagctgagcaggagagtcttctcgttgtcgcgggcgccactgaggctgtgggagcgggagaggccgtgggcgccaccacgccaggtgggcccaggctccagggtggactgctgcgtgtactgctggtaggcaggtgagaagttgtggatggcgtcctgcacgatgtcgtgcgggttcatggtctccttgaggctgctggagatgctcttcatgggggcacagcggcctgccgggcagggagcgggaggggcaggtgaggaggctgggacggtgagagggaggtggctcagcccctgcccgtgatcctgggacagacaccccccaacccaaagctatgcccttcaaccatcccttcggggacagagaatggccaacttttttgtacaaag

SEQ ID NO: 188834 - DNA, 1444 bp, Homo Sapiens
  misc_feature (339)..(348): n is a, c, g, or t
  misc_feature (1027)..(1069): n is a, c, g, or t
ttggcgagtcttggccctggagggcagtgctggctgggtggctcatctgagaatgttccttccggtaacttggatgctttcttcccaagattgtccttctgagaagcttcaagcacccattagaagactttcccccagtgatggttaaggcggagcaggggagagctggtgttattttggctcaagtcagctggacagtttctgttgtttgttttggcttcctggtctatgtgaggggttggcagggggagcatgagggagcaggatcgccttgtttttgctttgctgtaattgaggaaaggattaaggagccatctgtggcacattgttgtctccatnnnnnnnnnntctacacttttccaatagcattaagtttgcttttgttcgcatctttcatagggccgatgtgttgtgcccacaagcgattggacctgtgggagttctgttgtgggtggttcccggaactgtgggcgggcggttttacccagggctccctctgctttgtgtcttgtagaatgtcgtactctcaggaggctccaccatgttcagggatttcggacgccgactgcagagggatttgaagagagtggtggatgctaggctgaggctcagcgaggagctcagcggcgggaggatcaagccgaagcctgtggaggtccaggtggtcacgcatcacatgcagcgctacgccgtgtggttcggaggctccatgctggcctcgactcccgagttctttcaggtctgccacaccaagaaggactatgaagagtacgggcccagcatctgccgccacaaccccgtctttggagtcatgtcctagtgtctgcctgaacgcgtcgttcgatggtgtcacgttggggaacaagtgtccttcagaacccagagaaggccgccgttctgtaaatagcgacgtcggtgttgctgcccagcagcgtgcttgcattgccggtgcatgaggcgcggcgcgggcccttcagtaaaagccatttatccgtgtgccgaccgctgtctgccagcctcctccttnnnnnnnnnnnnnnnnnnnnnnnnnnnnnnnnnnnnnnnnnnngagctgctagctgacaaatacaattctgaaggaatccaaatgtgactttgaaaattgttagagaaaacaacattagaacatggcgcataatcgttaggtcccaggagagaatgtgggggcgcaaacccttttcctcccagcctatttttgtaaataaaatgtttaaacttgaaatacaaatcgatgtttatattttcctatcatttttgtattttatggtatttgggtacaactgggctgatactaagcacgaatagatattgatgtttatgggagtgctggtaatccaaagttttttaattgtgaggcatggttctgatatggttttatagggcaaacaattaaaacagcaaactttttttgccacatgtttgc

SEQ ID NO: 188835 - DNA, 1704 bp, Homo Sapiens
ttggatctccgggaacccagcccaggccctgcctcccggacacaccgacgctcacgtagtcgcgcttgccacaaccctgcgggctctccgatgcggcgagcgagctggggagggggcttctccgcggcccaaaagcctgttcatctagccccatgatggctgtggacatcgagtacagatacaactgcatggctccttccttgcgccaagagaggtttgcctttaagatctcaccaaagcccagcaaaccactgaggccttgtattcagctgagcagcaagaatgaagccagtggaatggtggccccggctgtccaggagaagaaggtgaaaaagcgggtgtccttcgcagacaaccaggggctggccctgacaatggtcaaagtgttctcggaattcgatgacccgctagatatgccattcaacatcaccgagctcctagacaacattgtgagcttgacgacagcagagagcgagagctttgttctggatttttcccagccctctgcagattacttagactttagaaatcgacttcaggccgaccacgtctgccttgagaactgtgtgctcaaggacaaggccattgcaggcactgtgaaggttcagaacctcgcatttgagaagaccgtgaaaataaggatgacgttcgacacctggaagagctacacagactttccttgtcagtacgtgaaggacacttatgccggttcagacagggacacgttctccttcgacatcagcttgcccgagaagattcagtcttatgaaagaatggagtttgctgtgtactacgagtgcaatggacagacgtactgggacagcaacagaggcaagaactataggatcatccgggctgagttaaaatctacccagggaatgaccaagccccacagtggaccggatttgggaatatcctttgaccagttcggaagccctcggtgttcctatggtctgtttccagagtggccaagttacttaggatatgaaaagctagggccctactactagtgactgcaggtgacagggcgtggcggagctgccacagacaagcctagctctgctcactgtgcagtggagatggaaggccagggaggagcaacgtggaacttccatgaggccccgtttgggaaaataaaaggatcctcttcacttctttcttaaacagcaaatccagccaggttcagattacacaaccagtgtctcactcaaaggagcagtggtggctggcgcgctttcgcactgtggcagccacgagagtctgtgcacgtctgtgctggaaagggtatggatgggaatcaagcctatgccagtgctgatgaagctggaggagtctctcctctgctctccactcagatgtgggacatcagtcgccaaaagccactcagccccagccacctcgcgtgagaccctcactgttcattgtgttcatctttgggtgctctctgccagccaggcctttcctgcaagctgctgtgcttccccgtccacgtgtatctctgctgtgacacactgagctgacgcacatttccagtgcagctgcagaagagaaatgggattggctcttgttttctgcaagttcatgttttgcattttatgttcttccacaattgatctgatgttcaggaaaagataataaaggcaaattagttagtggttgagacaggcatttcctcctcccgcttcttgaccccacagatgccaa

SEQ ID NO: 188836 - DNA, 1527 bp, Homo Sapiens
  misc_feature (1231)..(1271): n is a, c, g, or t
ttggctttaagctacattgggaagatttagtaaataggcaagtggttggcctaagacgggggctgcttctcctcttcagtatggactctagaaagtctggctacatgaatagatttaagtgtcactttccctccctgccccccgcttcagtctctaccatatctggtcccatcatggacttcctatttcctggcatttttgtccctttggaagaagaaataggactcagaatacagtggcatgagtgattacactggcagcattatctcaggctccctagaatctggagagcttaccaacatgtaaagctgttcatttttccaccgtgggtcaccaatgccagaaaaccagacatcacggggaaagaatgttgcttactttttaccaggagtgcagttcatttttttcaccctgtttttgaagtcgtattattcacttgtaaaaatgattgtaacagataaaaaatgtatctgcagcaactctgcaggtttgtgaaataggatgaaactcaatctttttctattgtgggtttgcatttgaaaagcaggttgaatccttgctctcttctccaaatttggtgtggtataaagacacacaaatcattttaacttggacatttaaagatcagtcttagtgtttgttcagtcctgttacaaaatagataactgagcacctatcgcataacattttgcggtggcttttagccatgctggggttagatgtgtttgagagtcaaatgaaagctatggatcttctcagcaattaaaaaaaatgcatatattcacattcacagaaacattggcagaacccagttttaatggtacagaggagtagtttatagtgttgatttcaccaaaatcagagggctgaaagagacacttctatagactgcatcctgagcctagtgcagggcttgtctagctaatgtgggcagccaccacccactgtgtatgaacaagtctgaagcaagttggccttgcccttgagagtatatggggaccagtcttcatgtcttggagtaatttgtcaaatgttaccctttttgatcagggtgtagggggaggatattgctagtatattttcagtggtttgtatgttctctctgtcactgacttatttgtaagagaaaattagttggacttgtttattttctagtagcttttataagtacactcaagaatttgtcagggagaataattctgatagtgcatcccatactgcaaaagaattnnnnnnnnnnnnnnnnnnnnnnnnnnnnnnnnnnnnnnnnnatgtatacatatatatctctccatataggtatttctttgatacttgtaattttaaatttcagcttcacgatataaaataatataagaacttctggtttacaaaatgtaaaatcttaagccaatggaaccctttgatttcctacctcagtgtacaccaactattggttgtatcagtttgtgtatgtgcaaatgtcaaataatcttttgctttaattgctactgtacttgctttgaaagattacctactattttatga

SEQ ID NO: 188837 - DNA, 1296 bp, Homo Sapiens
actttgtacaaaaaagttggattcctgggactcaaatgtatgcagtactattcagaatgatatacacacatatgtgtatatgtatttacatatattccacatatataacaggatttgcaattatacatagctagctaaaaagttgggtctctgagatttcaacttgtagatttaaaaacaagtgccgtacgttaagagaagagcagatcatgctattgtgacatttgcagagatatacacacactttttgtacagaagaggcttgtgctgtggtgggttcgatttatccctgcccaccccacccccacaacttcccttttgctacttccccaaggctcttgcagagctagggctctgaaggggagggaaggcaacggctctgcccagagccatccctggagcatgtgagcagcggctggtctcttccctccacctggggcagcagcaggaggcctggggaggaggaaaatcaggcagtcggcctggagtctgtgcctggtcctttgcccggtggtgggaggatggagggattgggctgaagctgctccacctcatccttgctgagtgggggagacattttccctgaaagtcagaagtcaccatagagcctgcaaatggatcctcctgtgagagtgacgtcacctcctttccagagccattagtgagcctggcttgggaacaagtgtaatttccttccctcctttaacctggcgatgagcgtcctttaaaccactgtgccttctcaccctttccatcttcagtttgaacgactcccaggaaggcctagagcagaccctttagaaatcagcccaagggggagagcaagagaaaacactctagggagtaaagctccccgggcgtcagagttgagccctgcctgggctgaaggactgtcttcaagaagtcagtcctgaggaaaaatattggggactccaaatgtcctctggcagaggacccagaaaaccacactggctccaacttcctcctcatggggcattacacttcaaaacagtggggagcaacttttccaccaaagctacaaacctaaaatgctgctgccccaaagcacaagagggaagagcaccgccggggccacaggacgtctgtcctccagtcacaggccatccttgctgctccctactgactctagcttacttcccctgtgaagaaacaggtgttctcggctgagcccccaaccctctgcagaaccaggttgatctgccacagaaaaagcatctttgaagacaaagagggtgaggtcttcatgagtctcctgggcccaaagccatcttctga

SEQ ID NO: 188838 - DNA, 967 bp, Homo Sapiens
ctttgtacaaaaaagttggattttggagaagagagacaggaggggtaaaaccagcttaaggttcagcgagcagaaagggacctgagaggatgctcactgtaagactgttggacagtggtgtgtattgaggggatgaatcggaacgatagtctcatgcagaaaatagtgagattaagatcatccttattgtttctaaattatttcaatcagatgaaagtgatacgattgaaatgaaatcacatagttcgtgctcagaaattctattttggtatgtttgtattagcctttagaaaaaacactccgtttcagaattgttcacagttttatttcttaggtttttagagttcaggatttcatttattaatttcttcttgcttttttggtggaaataggctttgttgtaaacattaagaatataaaatctcctctatatagaaacaagaattttgttaaaaagagaatttgaatcccttcctatactataaaatgctctatagggagacaaagtgtttcttttttcttttatgtttactgtttatgtggagtgaaatataaggctcttggatgtataacatactcaaaagctgttacactttctctgatctgctgtgatccactgaaaatgtgctggggtttgttctgctgtcactgtttatgctgctggaacttagcactgtcttgatttgaagcatatgattgagagccatttgaagcaatcttcattaatgcagataaaacaagtttacatgtgcagagttagaaaatgacatgttcaattctgtaagtggtgactttttgagcacctttcagtattatgtatttgtaaaaaccattgtttttggatataaagctaataagcactttaaaaaggaaaaggcagcctttactatttttctggttgagtcattgctctttagacctagcatcagcaatagatttcaagatagtattaagcgctaccctaaag

SEQ ID NO: 188839 - DNA, 1644 bp, Homo Sapiens
ttggcacatttatgcattgatgtggaagatgcaatgaacatcactcgaaaactatggagtcgaactttcaactgttcagtcccttgcagtgacacagtgcctgtaattgctgtttctgtgttcattctctttctacctgttgtcttctaccttagtagctttcttcactcagagcaaaagaaacgcaaactcattctgcccaaacgtctcaagtccagtaccagttttgcaaatattcaggaaaattcaaactgagacctacaaaatggagaattgacatatcacgtgaatgaatggtggaagacacaacttggtttcagaaagaagataaactgtgatttgacaagtcaagctcttaagaaatacaaggacttcagatccatttttaaataagaattttcgatttttctttccttttccacttctttctaacagatttggatatttttaatttccaggcatagcaatgttatctattttaatgtgtatttgtcacaataacagaacatgcaagaacaatcattattttattttataggcatttgattactattctagacttctggtatcttcttactaacataaatatctcaagtagaaaagtttttgaaaactaacatttaaaaattaatcagttacagtaaagactttgaaaaagaaatgtacttgttaggaagtagcttaattaccccccattgcagtattattgttatatatatagttaatatgttgtacatcacaataatatataattcagtctctagtttccctagagtcatttttgaaaccactgattgcaaacctccctgacaatttttaaaagtagtaagccacattacatttatctttgtaaaaagatttatggtaactggtttcttacttgacttttataaatagtattttacatcttatttttgcctttatttcataagtaatttaaaaatcactggattgctttattatattcagggcaatatggattatttttataccaaggatttgcatcgtgaattacattaagttatttggcaatttataatttattactactttaaatcaaatgtagcattatcacactgtatttaaattgtcattttttaaaggaatattttcttcttaagatatatagaggattttggagaagagagacaggaggggtaaaaccagcttaaggttcagcgagcagaaagggacctgagaggatgctcactgtaagactgttggacagtggtgtgtattgaggggatgaatcggaacgatagtctcatgcagaaaatagtgagattaagatcatccttattgtttctaaattatttcaatcagatgaaagtgatacgattgaaatgaaatcacatagttcgtgctcagaaattctattttggtatgtttgtattagcctttagaaaaaacactccgtttcagaattgttcacagttttatttcttaggtttttagagttcaggatttcatttattaatttcttcttgcttttttggtggaaataggctttgttgtaaacattaagaatataaaatctcctctatatagaaacaagaattttgttaaaaagagaatttgaatcccttcctatactataaaatgctctatagggagacaaagtgtttcttttttctttatgtttac

SEQ ID NO: 188840 - DNA, 1601 bp, Homo Sapiens
  misc_feature (317)..(336): n is a, c, g, or t
tcacataccaagtagggagagggatggcgcaagaagaggatgaaataggagttttctaaacacggttcaagttagtacatagtagctgaatacattcttaactatctaagaagtaaacagaatattcccaaatatcatggggatgatgaaactctccccttgcccctgcagctgttaagtgatttgcaaattctttacaaagccaaagcaccagttttacattatcccagacacctatgtagactatttgtacaatatataccacattattctatagtgtatctaaacacacaactgtacacttttaaattctcccnnnnnnnnnnnnnnnnnnnnggtgactccttagcttgctctctcctgagtcccactggccaccccagcacacagcagaggcctagcaagtctcaagtgaggcaatcctggactagggcaaacatggcttgttccaaaagccgggggttaaggaatcaaagtcaggtgaaactatcactttcacaaaagcttttcttgactcctgggcctagtatcttttgcccctggcagaatgtaacagcaaaatgtctccttctgaaacggaaggcacagccctctttcagaagcaaaacaccttaacactcggcttctatttgcttaagaatttacaaatagaaatgagaatcaaaggttttaactcatctgatagcactgggcacccaatgttcacagcctgcttctttgaagggttagtgtctccccaataaataaatacagaaccttggatacccttcgaattttaaaataccttaaagtcttccattaatcttattttttaaaaatgctaggtttgtttcagttacctgcagcaatcaaaaagctttggcaccttcttttagagaattgcacaaaacaggatgcatcaaggtggaaggcaaacatctttttgccaacctaggcaaagaagacaacaaaaaacaccaccaagtccatctgcaaaaagttagctaatttttgaggttaaaataactctttagggagttgtgtaaaaagcataataccctcccatgccttttgaggtgtctttactatactcttcagcattaatgtcctcacactttatggagggtgaattttcattactggagttgctaggagacagccgccttcgcttacaagcactggtgtatactcctgaatcattggaatctagagatttgatggaagggggtgtctctatccaagaagagccaatttcctctttcactttctccttggagagctgatcttcagagaacacagtggggcttgttctggaggtccatggtagtccagctgccatcttcctctggtaagaacctcgacctccccaccctgccattgcaggaaaggttgggtctgggtaataccccagggcatgggatgtctgaaggggcaaggatttaatgccatatgggagcaatgtgctagaagtatattcagattcataggaactgatgtctagtttgttggtcccaggttgctggacaggcgtgacaagccaccgctggggagggttggccacctcttcgctctccagggacaatctgatgggatctaggagaatccgtgggagatggagccaa

SEQ ID NO: 188841 - DNA, 1259 bp, Homo Sapiens
ttgggaacaataatctaaacaatatattccttaaattaagaggaaagacaagtgtcgtatttcgatcctgtttattcaaattgtgattttgctgaaatgaaagggataaaatgaatacttagagaataatacttcatttttgcagtactttttaattttgataaaaaagatacaaagttcataatatcaaaatatgtgttcaaaattggtattttaattttaatatttttgtaagttgatttaaattttgctcttttttcaggtgtgcttggtttattatatttagtcaagttaatttagtcgaatgtggtaacatttttctgatttatctttagttggagcacacccttgaactgaacagtggccaaaggaaagctttctgggctttggaaagtagttgtttaactttgttttaagccgttttcttagtgattctgtatcaagtagaggataagtgtagtttaacttagtttttaatataacccataatcaagaacatgagcgaaaagcagacataaatcgatatggatggtttgtggtgtgtgtgggatgtgggggaattaagaaaatgccatttacctaagcacagtttgcctgaatttctgcttggttgtgttgtttaccgtaagtactgagggtagtttccctaagtctgtcctgagaaaaagcatacttagtactcctgtatttgttcttatgaaatgactatctgccttcttgtatctagtaagattggctggctcaattttcttctgtcaaattatatggttattttttatattaccacatcagcattatattaaaagtgtttttaatagttgattgtattttgccaactactagtatagactcaaatttgctatttaatttttaaaatacaatttattttgtaaatcctttaaaaaatatttggttagttttggattagaaatgatttatgttagccatgtgttgaagatgaaattggcatcagtgtagacggtgctgattgggaaaagttcatgattaggaaattcatgtaagactttttaagagtattttttaggttttcactcaatctttcctgtcacagtaacgtgaaaactgattattctttactccaagagaatgttttaacccaagcaagtatctaatactagagcattggttctgacattcattgtaaatcagtgaactgtaagatactgtctaaaaaaatgtacatttgtaattagtgcctttattcatattttgaaataagttcttagttttatattata

SEQ ID NO: 188842 - DNA, 1106 bp, Homo Sapiens
gctgctgccagggagtcagaattctggctgcctctactttgggaatctcctcccatgtggggatctgcagaacatccagatggggccatcccacctcatgatccattcactcccagtgggatacactggaattcaacccggagactggagcccaacagattaaggcagaattctccttgctctggaggcaggtctgcgggaagggggtgaagtctagctgcccctcatgtcccatgccggtgagggtacttggcttcccacagctaagcccaggagcttcctatatcccatctgctgagacagcaaggggtgcggcctggccaggctcctgacatggctccactgaccccctgaaagcccctgcagctcagcctttaagcctccattcatctcggaggtcagatcagccatacgccttcggatgagtgagactgcaggtcactctcacctgtgaaggtgagatccttgaagggaggggcttctggcccatagcacttctgtgctcccaacaaggaggcctgtccctttgacaccctggccaagtacagctccagggtcttgagcagccgccgtgggctcttcttggccaatacttccaactctgcaacagagagaattggggagcagaaggcttgagggggctctgggtgacacaacagtcaaggcctcaagcctagcagctctagggagtacccccaacccctatcccatggagagaaagtgaaggagcctcagatggagagatcaccagagaggtaggctagggagccagctacagccacagggaccacacactctaccttgtctgcacaattgcaactttgaatagtccaactattggaccctggctcccaatttttgatcagaatatatgcttgtcataagtataagaccagaaaagggcgacagtcagggcagagaaaggagaactagcagactccagggggtgggtgatggagattttggtaagctggaatttgagaaagtgtggatggggaagaactgcagccaaaaccagtctagcaaccaccttgggctctctggacctgggacactgtgcattcagcctaggcctccccagaagaaagagcacacctttgagccaa

SEQ ID NO: 188843 - DNA, 1908 bp, Homo Sapiens
  misc_feature (1676)..(1684): n is a, c, g, or t
  misc_feature (1790)..(1819): n is a, c, g, or t
tggcgccctaccccccttacatactataccaagtttcccactcacttgaggaggaaaaatggcaaaagaaagctgtctagggttttaccattgaagggtggaagaacagagacaaagaggagctctttttctgtgagctgggttgcacaggaagaatgtcacagggaaccaaaaagcacagaaaaaggaagtgctggtgcatatttttgagttaaaatatttccctattttatcatgattactaagtgagtagtatagacagaagtatataactaatggttgaaaatacatatattcatttctttataaaaaacaaaaaccttaccggtagtaatataatttcccccttggtggtttttcagacacctgcagcaagaagaaatactgactgactaggcattattttctatacatccctctcaccagtgaaaagattcctcttgctgcgagaaagctttacccaccatgagttattgctgtcgacgggggtggggcaaggacccgcgctccgtagagctacacgctgcttcacaagcacacggctagcgctctgctctcacctggttcgcttacagatttctctagccattaatttgcctctctgtgtttaaagagcaccaggaccgaatggattttcacttcaggctttccttcaccaagaataaggttctttctggagcctgcaagaagacagttgcccaacactttgacacttgctagtaggtcctttgatcaagagtgtctgaggctgtcaaatgtgtgccaccctttataatacagctatgaaaagttacttctccattaatttctccattctgtttatatcttacagttggacccaaattccaaattatcagttaatcgaaactacattgcaagtcaacattattttctcttcttcctcagcttctccatgtttaggaactgagaaagaacctgcctaagcagcacttccccatgtcctttcaccttcatgttaacgtcccttctgatggtctcactcttcacaggtagttcacactctgagacttgaagtaagctcatggttcagtactctgggggcgcagggctgcgcaggacccttggaaatgttgcaagtgttactagtaccagtttcactttttgttgtcacaatttactgtattttttactttttctgttacagttttgctaatttatcagaaggtccaaaagtctgacataactatttcattttgcattatttatttatgatgcttttttcattgtcttttatacatttgggattataaattatgtaaatgttaaaatgagcatctcaaagaagtctgttaaatcatgactgaaaaaaatcaatcagatgtatcttcaaaaagtggagtcccagttttatgaatcagagatataaaccagaaattctataactgatcatagaagaagaatccagtaattgaacaaatcctatttaatgacatccttgtagcatagatggtctataatgctgaccacagatttcttagaaatgctgctctctctatttaactaacattttgttcagttttgcctccagtggaagcagaaagggttttttcagctgttaaatcctaaaaatcaatataatttatttatgtaagaaaaataactcaatcatatatttttgaaccttttaagtactaattttctttttatcaagtagnnnnnnnnntgtatttgccctaaatccttaaaatacaaatgctataaaaattcctgtatcttgaaagccttactgcaaatgagtattatagacatccagcagagtctggttttcnnnnnnnnnnnnnnnnnnnnnnnnnnnnnnatggaaaagctgctttccccgggttccacttataacctccggtaggtcacagggttcaatgtggatctgacttaaaacccaccagcatg

SEQ ID NO: 188844 - DNA, 815 bp, Homo Sapiens
ttggttcataattatcactaataagcatcagtttgttgtttttaaaaggatatttaagtgagcattttctagttcatatgaaaataaccatagtacaggatgatttctgtccacacaaaggttaaattagattgcacagttaattttcacttatatttatggtactattatgtgggtgatgcctttttcttttaagcccagtacatatattatgcctgcctaagttctgaactggggctgtatttcagtagttgtagaattattgatatttagttttgatagctaatgtttaattgtttggatctgcacagtttggtttttgcacaaaagtcatttaaaaaaatctgagtaattgtcaaatattaaaagaaagatattcttcctgtaaggaatacagtttttagtcaaagtggccattacatcctctttttaatttacataatacagatacttgagaaagttgttgtggtgttgtatgccaagaaaattctttttattggtgcctatattgtaacaattatttttaatgcattgtattttgaagtaacggttcagttaaatttttcacctgctgtgtaactgaaacacaattacagtttataatcatctgtagaagtctggagataattttgcaactcatgttatgggttaaatgaatatttttgtaaaagtaaaagcaacaaatttataaattgattatttgaaactttacaacacaattgcatcccaaatacaaattgtattgcttattcattatagctattcgtcctgtaatctgtttctaggtgaagcatactccagtgttttaggggttt

SEQ ID NO: 188845 - DNA, 981 bp, Homo Sapiens
actttgtacaaaaaagttggcttaattcaaagatcatattttagctggccacaaaaccaagaacatatctagcaagaaaacttgaaaaagtataagcatttgttaaaaatgtgaatttcttgaatgaatttcacatttgtaactatgattttggcagaatagaagattggctcatcagtgaagcgcagtatcttagctctagattctattttcatgcatcacagaagtgctatacggttaggtctgtttgtgctcagtcaagaactaagaaatagtatgaattgtaagtcaagatgggcaactcagatggagcagcttagtctcacagtttgcttgtctatttattttatttagtgccaaatgtattccattttaaaagtaagccagagtgagtcaaggcatatacacactttctcacaaaacttcctaaacagatttgggggtttaatatgtccaactcctcatgaaatatattcaatccacttaaatatattccatctttttaacataaaatgtaaagcttagcacccatcattaatttatgtctctgttttatccagtggttaaaaaaggattctgcctctttagtcctcactgttaaataaaacccaatcatagtaagtgattaactagcaaaaagtaaagctatttatagcaaatttctagatcattagaaaagcactggtagttgtacaatatcagtgttgactttgaacttctttaacgagatcatgaattcttttcccttagccaaaacatgaaatatttaacctagttgtctctaaaagttttgtaatcatgagttagatatatgtcatctcctattcattgcttttatgtgatcaataaatcttttacaaacccaactactcatttccttcctagtaatactttgcctttttcactgtgtatggaatgaaacatgtaaagctgtcacaatcaatgtttttatctgataatattatatattttttaacttaa

SEQ ID NO: 188846 - DNA, 1450 bp, Homo Sapiens
ttggatcctttgtctgtctgtcagaatacgaacgggccatttctggggccctgtcacctagtaagtatccatgtcgctcatgactgcctcccttgacttccatgcctgatcagagcgggattcttgtgggccattatattgccattgttgtgctaagtggggtgtggagccccctgctctttctcctgggggcagaggcacctcgtgtggtttctgggcatccgaatgcctgcccttggctcactgggaggtggggggatgcagctggcggatgggcatgtgggcacgtgggcagcctcgcctctgtcttgcagcatggataaaaacggcacgatgaccatcgactggaacgagtggagagactaccacctcctccaccccgtggaaaacatccccgagatcatcctctactggaagcattccacgatctttgatgtgggtgagaatctaacggtcccggatgagttcacagtggaggagaggcagacggggatgtggtggagacacctggtggcaggaggtggggcaggggccgtatccagaacctgcacggcccccctggacaggctcaaggtgctcatgcaggtccatgcctcccgcagcaacaacatgggcatcgttggtggcttcactcagatgattcgagaaggaggggccaggtcactctggcggggcaatggcatcaacgtcctcaaaattgcccccgaatcagccatcaaattcatggcctatgagcagatcaagcgccttgttggtagtgaccaggagactctgaggattcacgagaggcttgtggcagggtccttggcaggggccatcgcccagagcagcatctacccaatggaggtcctgaagacccggatggcgctgcggaagacaggccagtactcaggaatgctggactgcgccaggaggatcctggccagagagggggtggccgccttctacaaaggctatgtccccaacatgctgggcatcatcccctatgccggcatcgaccttgcagtctacgagacgctcaagaatgcctggctgcagcactatgcagtgaacagcgcggaccccggcgtgtttgtgctcctggcctgtggcaccatgtccagtacctgtggccagctggccagctaccccctggccctagtcaggacccggatgcaggcgcaagcctctattgagggcgctccggaggtgaccatgagcagcctcttcaaacatatcctgcggaccgagggggccttcgggctgtacagggggctggcccccaacttcatgaaggtcatcccagctgtgagcatcagctacgtggtctacgagaacctgaagatcaccctgggcgtgcagtcgcggtgacggggggagggccgcccggcagtggactcgctgatcctgggccgcagcctggggtgtgcagccatctcattctgtgaatgtgccaacactaagctgtctc

SEQ ID NO: 188847 - DNA, 1318 bp, Homo Sapiens
  misc_feature (186)..(199): n is a, c, g, or t
  misc_feature (237)..(270): n is a, c, g, or t
  misc_feature (1122)..(1136): n is a, c, g, or t
ttggcaactccgaagaaaagaaagagtacttcatctagatcagcctttttgtttcaatgaggtgtccaactggccctatttagatgataaagagacagtgatattggaacttgcgagaaattcgtgtgtttttttatgaatgggtggaaaggtgtgagactgggaaggcttgggatttgctgtgtnnnnnnnnnnnnnntgttctttggaaagtacactctgctgtttgacacctcnnnnnnnnnnnnnnnnnnnnnnnnnnnnnnnnnncttcctaccaagtcaaacttggatacttggatttagtttcagtagattgcagaaaattctgtgccttgttttttgtttgtttgttgcgttcctttcttttccccctttgtgcacatttatttcctccctctaccccaatttcggattttttccaaaatctcccattttggaatttgcctgctgggattccttagactcttttccttcccttttctgttctagttttttacttttgtttatttttatggtaactgctttctgttccaaattcagtttcataaaaggagaaccagcacagcttagatttcatagttcagaatttagtgtatccataatgcattcttctctgttgtcgtaaagatttgggtgaacaaacaatgaaaactctttgctgctgcccatgtttcaaatacttagagcagtgaagactagaaaattagactgtgattcagaaaatgttctgtttgctgtggaactacattactgtacagggttatctgcaagtgaggtgtgtcacaatgagattgaatttcactgtctttaattctgtatctgtagacggctcagtatagataccctacgctgtccagaaaggtttggggcagaaaggactcctcctttttccatgccctaaacagacctgacaggtgaggtctgttccttttatataagtggacaaattttgagttgccacaggaggggaagtagggaggggggaaatacagttctgctctggttgtttctgttccaaatgattccatccacctttcccaatcggccttacttctcactaatttgtaggaaaaagcaagttcgtctgttgtgcgaatgactgaatgggacagagttgannnnnnnnnnnnnnncctttgtgcttagttaggaaggcagtaggatgtggcctgcatgtactgtatattacagatatttgtcatgctgggatttccaactcgaatctgtgtgaaactttcattccttcagatttggcttgacaaaggcaggaggtacaaaagaagggctggtattgttctcacactgggtctgctgt

SEQ ID NO: 188848 - DNA, 1045 bp, Homo Sapiens
  misc_feature (607)..(649): n is a, c, g, or t
gtggatatcacatcagagaagctcctggccaggtggccttgaggaacagggatgagttcagcacttagagatggagttggctttccccgttggagggaaaggcatgagaagggacataggtaagaggaagtagagtagtgcaggggccattgagtagtagtccttccaagacaggacttcatcatagaaccactttctctgaggaagctctgcttgggggaggttttaattcatgaggaaggcaaattcaatggctctcaggtgaggtgggaaacagacacctaccaacactccaaagagaacatgtacctctataaaagggcacagtctagtgaacaaagtccacagctctgggtttgatttctagcactgtcacttaatactgtgtgaccttagacattcacttaactctctcagcctcaggatacaatctgtaaaaacaggagaatgcttgttccctgtgccttataggattgatatgagcatcaggagagacagtgggcacaaaatagcactgtcaactacttctttctagtcagttatctggtcatgtttgtgaagctccccaggactgggaacatagcatatgatttttttaaagttactnnnnnnnnnnnnnnnnnnnnnnnnnnnnnnnnnnnnnnnnnnnatctaaaggcctccaactaaataataatcaacttcctaaccgtactgaaagcctttaattgactttggggctgtttggcctggaggaggctctgagttagtggtgatcagttggtgtcatggtagagaagaaagcctgtgaaggtggagtcattgtcattatcagcatagagtccattacgctctccttccccatacacctggagccagacttggtcgcccacctccagatgcaggagcacagagccggaggcctggtccacattattttcctggtactgatcataggtgaagagcatagccttgtccttcttgaagaggctgaccttcacatccttcatatagactgtgatgtggtaggcaaagtagtacagcccaggaatgttgcagtggccaa

SEQ ID NO: 188849 - DNA, 1576 bp, Homo Sapiens
ctttgtacaaaaaagttggaacacatcacatgtatacatgttgccaaatggaactctttccatcccaaaggtccaagtcagtgacagtggttactacagatgtgtggctgtcaaccagcaaggggcagaccattttacggtgggaatcacagtgaccaagaaagggtctggcttgccatccaaaagaggcagacgcccaggtgcaaaggctctttccagagtcagagaagacatcgtggaggatgaagggggctcgggcatgggagatgaagagaacacttcaaggagacttctgcatccaaaggaccaagaggtgttcctcaaaacaaaggatgatgccatcaatggagacaagaaagccaagaaagggagaagaaagctgaaactctggaagcattcggaaaaagaaccagagaccaatgttgcagaaggtcgcagagtgtttgaatctagacgaaggataaacatggcaaacaaacagattaatccggagcgctgggctgatattttagccaaagtccgtgggaaaaatctccctaagggcacagaagtacccccattgattaaaaccacaagtcctccatccttgagtctagaagtcacaccaccttttcctgctatttctcccccctcagcatctcctgtgcagacagtaaccagtgctgaagaatcctcagcagatgtacctctacttggtgaagaagagcacgttttgggtaccatttcctcagccagcatggggctagaacacaaccacaatggagttattcttgttgaacctgaagtaacaagcacacctctggaggaagttgttgatgacctttccgagaagactgaggagataacttccactgaaggagacctgaaggggacagcagcccctacacttatatctgagccttatgaaccatctcctactctgcacacattagacacagtctatgaaaagcccacccatgaagagacggcaacagagggttggtctgcagcagatgttggatcgtcaccagagcccacatccagtgagtatgagcctccattggatgctgtctccttggctgagtctgagcccatgcaatactttgacccagatttggagactaagtcacaaccagatgaggataagatgaaagaagacacctttgcacaccttactccaacccccaccatctgggttaatgactccagtacatcacagttatttgaggattctactataggggaaccaggtgtcccaggccaatcacatctacaaggactgacagacaacatccaccttgtgaaaagtagtctaagcactcaagacaccttactgattaaaaagggtatgaaagagatgtctcagacactacagggaggaaatatgctagagggagaccccacacactccagaagttctgagagtgagggccaagagagcaaatccatcactttgcctgactccacactgggtataatgagcagtatgtctccagttaagaagcctgcggaaaccacagttggtaccctcctagacaaagacaccacaacagcaacaacaacaccaagcaaaaagttgctccgtcatccaccatga

SEQ ID NO: 188850 - DNA, 943 bp, Homo Sapiens
ttggcagccttctgcactcacagccgaagggaaagcagcaggttggggcttcttgtggccaacttcagagcctgtcaccaggaaaggtaagcatgggaggaaggaagatggcgacagatgaagaaaatgtctatggtttagaagagaacgctcagtcccggcaggagtccacgcggaggctcatccttgttgggagaacaggggccgggaagagcgccactgggaacagcatcctgggccagagacggttcttctccaggctgggggccacgtctgtgaccagggcctgcaccacgggcagccgcaggtgggacaagtgccacgtggaagtcgtggacactccggacattttcagctcccaagtgtccaagacagatcctggctgtgaggagagaggtcactgctacctgctctcggcccccggaccccacgcgctgctcctggtgacccagttgggtcggttcaccgcccaggaccagcaggcggtgaggcaggtgagggacatgttcggggaggacgtcctaaaatggatggtcatcgtcttcaccaggaaggaggacctggccgggggctccctgcacgattacgtgagcaacacagagaaccgggccttgcgcgagctggtggccgagtgcgggggccgggtctgtgcctttgataaccgggccaccggccgggagcaggaagcccaggtggagcagctgctggggatggtcgagggcttggtgctggagcacaagggcgcccattactccaacgaggtgtatgagctggcgcaggtgctgcgctgggcaggccctgaggagcggctccggcgggtggcggagcgcgtggcagccagggtgcagaggaggccatggggcgcctggctgtcggcccggctgtggaagtggctgaagtcccccagagctggagctgggcctggtcctgctgctggggggcg

SEQ ID NO: 188851 - DNA, 752 bp, Homo Sapiens
ttgggacccggcggtggggaagtcacttcctcccgaagacgctgtttcctagcaaccgccctccgcctctgttattagcccctcctcctcgctcggtccaggaccggctctgcgggcgccgccaggcccagaccaagctactatcagaagttgaattctaataattagctattttataaaggtaacgagaaaaaatacactatgtctgatgaagtttttagcaccactttggcatatacaaagagtccaaaagttaccaaaagaactactttccaggatgagctaataagagcaattacagctcgctcagccagacaaaggagttctgaatactcagatgactttgacagtgatgagattgtttctttaggtgatttttctgacacttcagcagatgaaaattcagttaataaaaaaatgaatgactttcatatatcagatgatgaagaaaagaatccttcaaaactattgtttttgaaaaccaataaatcaaacggtaacataaccaaagatgagccagtgtgtgccatcaaaaatgaagaggaaatggcacctgatgggtgtgaagacattgttgtaaaatctttctctgaatctcaaaataaggatgaggaatttgaaaaagacaaaataaaaatgaaacctaaacccagaattctttcaattaaaagcacatcttcagaaaacaacagccttgacacagatgatcactttaaaccatcacctcggccaagagtatgttaaaaagaaaa

SEQ ID NO: 188852 - DNA, 1190 bp, Homo Sapiens
gcagcgggggcttgtgcagcgccaggcggtggtggcggccaccgtaggagtcactcttcagcaggaacatggtgacgtggccctcggcactcatgatgaccacataggggtcggccacggcgcactgcacgatgggggcgcccaggtccacggggatgaagtgcagctgattcactccttccagcaggcggatgcccagtggtgacacttggacaatgtagcggttgtccccgatgttcccagcaaagaccgtggggccctgagtggcgaagccactggtgtccagctccatgatctcctgccccgtctgcaggatcatggtggagtcttcccggctcagaatcaggaatccgtgtctgcggccatcgtcgtctgcttcaggggtggtgctgggttcctgctctgtgccctcccccttgggattgtcctcctcctccttacgcaccggggcgatgactgtccacatgtcatagcagccgggaagctcaaaggttgtcaccacctggggccggatgctcttctgcagcaccgacaaagccccgttcttcccgtggccggagcaaaccacaatctccaggtccggctcggggctgttctgaaactcttcagagaggaaggcaggctcgcccacggcggcattggcacagggtccaatgttcaggatgctgtcacacacctcaaaggagtaggtggccagctgtgttcccgactgggcctcgctgccgtacacttcaatctcgtccacctcatcctgcggcaccgacttacccgcagctgaccagccggccgtcgcatccactcgcttcttctttgagggaggctcttccttgtcggcagcctcacggacagcactggccgggggctcctgcagcttctccgtgtacttgaggaggagggaattgcccaggcgagaacccaggaacaggtacccgggctccatggtgaccatgctggtggtgaggacgctggcggccgccttgtcaaagtggaacgctcggacactgcgcatgccgtcggtgatgagggtcagcacgtagatctcgccgcccttgagggagatgaccatcttgtcgtaggagatgaaggtggcctgggcgcagtccagggtgatccgcacaccctcctgggtgcgaagcgggaaagccgtggttcctgtggggaggctgttgagccaacttttttgtacaaag

SEQ ID NO: 188853 - DNA, 950 bp, Homo Sapiens
ttggctcctaatcatggcccaggaactggaattagaagatcatcaaagcagactggagcagaaactgagagagaaaatgctcaaggaggagagccagaaagatgagaaggatctaaacgaagagcaagaagtattcaccgagctgatgcaagtgattgagcaaagggacaaactcgtcgattccttagaggaacaacgcatcagagaaaaagccgaggaccagcactttgaaagcttcgtattctccagaggctgtcagctgagcaggacttgaggaggcccgtagtccctctccctggctgcacgttgggaccggatcaggccaagtgcaccacacaccctcatgggtctttctgcaggatttatcatccctggaacttaagttataccttactgcattttttaaaattaaaattctcttgcacgcatggcagcttcccaaggttcttccagagattcaaatgaagaaaacccaaagactctttggcaattggcagtcaacttcagccaggctctcagactggaggtgttgttggcagatgaccagcattgttttccctagaaagtgacacaaagacttgactttcctgctacttttatcattttccttcccaattcattgagttacatactttaagatttttgagaagctgccttttcattaatatatccatatttgccttttttgtatggatgaccagtttccaaatgtcagaaagaagcagccgcagtttaaagattaggttaatatttaaattgtgtttccagagaaagaggagaaaccttgagattactgattacataaagcaaataactcatatagcagtgttaattcaatccagggtgaatttaatttaccagtgcatttataagccttaatataatatacataagcaatgagagcttatagaacatttgagccttaattttattttaagaaaaaagaaaaa

SEQ ID NO: 188854 - DNA, 2080 bp, Homo Sapiens
ttggcaagatggcggcggcggcggcagcgacagcagcagcagcagccagtattcgggaaaggcagacaggtactcatttatgacagatttggccaagatataatctctcctctgctatctgtgaaggagctaagagacatgggaatcactctgcatctgcttttacactctgatcgagatcctattccagatgttcctgcagtatactttgtaatgccaactgaagaaaatattgacagaatgtgccaggatcttcgaaatcaactatatgaatcatattatttaaattttatttctgctatttcaagaagtaaactggaagatattgcaaatgcagcgttagcagctagtgcagtaacacaagtagccaaggtttttgaccaatatctcaattttattactttggaagatgatatgtttgtattatgtaatcaaaataaggagcttgtttcatatcgtgccattaacaggccagatatcacagacacggaaatggaaactgttatggacactatagttgacagcctcttctgcttttttgttactctgggtgctgttcctataatcagatgttcaagaggaacagcagcagaaatggtagcagtgaaactagacaagaaacttcgagaaaatctaagagatgcaagaaacagtctttttacaggtgatacacttggagctggccaattcagcttccagaggcccttattagtccttgttgacagaaacatagatttggcaactcctttacatcatacttggacatatcaagcattggtgcacgatgtactggatttccatttaaacagggttaatttggaagaatcttcaggagtggaaaactctccagctggtgctagaccaaagagaaaaaacaagaagtcttatgatttaactccggttgataaattttggcaaaaacataaaggaagtccattcccagaagttgcagaatcagttcagcaagaactagaatcttacagagcacaggaagatgaggtcaaacgacttaaaagcattatgggactagaaggggaagatgaaggagccataagtatgctttctgacaataccgctaagctaacatcagctgttagttctttgccagaactccttgagaaaaaaagacttattgatctccatacaaatgttgccactgctgttttagaacatataaaggcaagaaaattggatgtatattttgaatatgaagaaaaaataatgagcaaaactactctggataaatctcttctagatataatatcagaccctgatgcaggaactccagaagataaaatgaggttgtttcttatctattatataagcacacagcaagcaccttctgaggctgatttggagcaatataaaaaagctttaactgatgcaggatgcaaccttaatcctttacaatatatcaaacagtggaggcttttaccaagatggcctcagctccggccagctatggcagcactaccactaaaccaatgggtcttttatcacgagtcatgaatacaggatcacagtttgtgatggaaggagtgaagaacctggttttgaaacagcaaaatctacctgttactcgtattttggacaatcttatggagatgaagtcaaaccccgaaactgatgactatagatattttgatcccaaaatgctgcggggcaatgacagctcagttcccagaaataaaaatccattccaagaggccattgtttttgtggtgggaggaggcaactacattgaatatcagaatcttgttgactacataaaggggaaacaaggcaaacacattttatatggctgcagtgagctttttaatgctacacagttcataaaacagttgtcacaacttggacaaaagtaacacagaagaaccttactatgataatctacttggaatgtggataaatgtaaaaagaagaaaagttagaagagcaatatgtttccttctctgtaacagtgtcctaacagtgaaaatcagagttatttgttaatttttaaggaaattatatacttaatatgtattgattaaaagaaacatttcagaaataaaatttcaacattgttcattttctctga

SEQ ID NO: 188855 - DNA, 1670 bp, Homo Sapiens
ttggcctgcttctaattttcggcagccaattttttcacaatatgcttctcatcagccattaccacaagctacatacccttaccttcctaatcgatttgtgcctccagaagtttccttgggtttatgctccatggcaccaagaatcctttcatccaggacactgaaaatagtcttctgtctattgaaataagacataacaagtttttccaaatattttttacttatatattttttaacatttagcgatttttaatgtttgtaaatgtggtaggaaatataaatcatatggtcctttgtaaaatatacaaataatctaacacatatcatataggacatcaatttctaacatctgatataccagaattatttccatgcaattataaggggagggtaatatgatcaaagttaagcaatagtggtaaaatctttaaaactagattcttgcttctgatatgtttcaatacattgttgatggcattgtgccatttgagctgaaagcaggattttttttcattagtcatcaaaccaagaattttataattcttgacactttattatataatttacaattctatgccagatatggcaaatttcttcaatttcagtattttatagtttctacttgtaaaatatttttaataagaaaaattggtttgcataatctcagtgtttccttgagtagagatgtgtttaaatgtttatgttggaagcaattgtagttaattatattggcaatgaagcactttcaatgcctttttctacaagagccatttccagaagattattttgtttttggatttcacaatttaaatagttattttaatgattttctagcaaataatagagaataatgtttatgcttatgcagttagtctttattacagtaatttaaacaatgtggcacaaacatagttttttcatgctcttgtcatagacttttctttttaaccttctgcaaaagtaaaaactctcttagtaataatcatcatagggcaacaggatatagtatgtaactgcagtcttgagctgtctcttttcatgtattacctttcttgctcaacagctattcctgttttctgtaagatcctagtcagacagagccctcacaactggatagacctttctcaagggttagccctaaaatgtgacaagagaattggtttggctgaatcacaacaaataactagcaaagcttcagtgcttttgcaaactttttatgtaagcaaactttttgtgttatctggcacaggcctttgaaaagactataattctactttgtttaatgtagagtaactaatttttcaatttagaaagacagtgagaatccccaggataagcctctttatactcacttaaaccaactgggatggaattcagaatacctaagctgcttctttaacatagagatctttaaaaagggaaggtcaagcaaagaactgtaaccgaaagaagtaagagatttgaaaagacgatagagttaaaacaatatttaaaaaacatttctatttggtccatgcagttttatttgaaaatagtctgtcaaaatcagaactcctgaacaactttgaaagcagtaatattaactggtattcaaaaatgaataacagccaaaaatgataacagccatttgatttatgtttccctcagtcatttggtttatgtttgggtta

SEQ ID NO: 188856 - DNA, 1255 bp, Homo Sapiens
ttggctggagtcgtacctcatcaagcccatccagaggatcctcaagtacccacttctgctcagggagctgttcgccctgaccgatgcggagagcgaggagcactaccacctggacgtggccatcaagaccatgaacaaggttgccagtcacatcaatgagatgcagaaaatccatgaagagtttggggctgtgtttgaccagctgattgctgaacagactggtgagaaaaaagaggttgcagatctgagcatgggagacctgcttttgcacactaccgtgatctggctgaacccgccggcctcgctgggcaagtggaaaaaggaaccagagttggcagcattcgtcttcaaaactgctgtggtccttgtgtataaagatggttccaaacagaagaagaaacttgtaggatctcacaggctttccatttatgaggactgggaccccttcagatttcgacacatgatccccacggaagcgctgcaggttcgagctttggcgagtgcagatgcagaggcaaatgccgtgtgtgaaattgtccatgtaaaatccgagtctgaagggaggccggagagggtctttcacttgtgctgcagctccccagagagccgaaaggatttcctaaaggctgtgcattcaatcctgcgtgataagcacagaagacagctcctcaaaaccgagagccttccctcatcccagcaatatgtcccttttggaggcaaaagattgtgtgcactgaagggggccaggccggccatgagcagggcagtgtctgccccaagcaagtctcttgggaggaggaggcggcggctggctcgaaacaggtttaccattgattctgatgccgtctccgcaagcagcccggagaaagagtcccagcagccccccggtggcggggacactgaccgatgggtagaggagcagtttgatcttgctcagtatgaggagcaagatgacatcaaggagacagacatcctcagtgacgatgatgagttctgtgagtccgtgaagggtgcctcagtggacagagacctgcaggagcggcttcaggccacctccatcagtcagcgggaaagaggccggaaaaccctggatagtcacgcgtcccgcatggcacagctcaagaagcaagctgccctgtcggggatcaatggaggcctggagagcgcaagcgaggaagtcatttgggttagcgtgaagactttgccccctccaggaaactgaacactgagatctgactgcgtcacctgccccgta

SEQ ID NO: 188857 - DNA, 1817 bp, Homo Sapiens
taaaagccaactttgtacaaaaaagttggctgggcgcgcgcgacgtcagtttgagttctgtgttctccccgcccgtgtcccgcccgacccgcgcccgcgatgctggcgctgcgctgcggctcccgctggctcggcctgctctccgtcccgcgctccgtgccgctgcgcctccccgcggcccgcgcctgcagcaagggctccggcgacccgtcctcttcctcctcctccgggaacccgctcgtgtacctggacgtggacgccaacgggaagccgctcggccgcgtggtgctggagctgaaggcagatgtcgtcccaaagacagctgagaacttcagagccctgtgcactggtgagaagggcttcggctacaaaggctccaccttccacagggtgatcccttccttcatgtgccaggcgggcgacttcaccaaccacaatggcacaggcgggaagtccatctacggaagccgctttcctgacgagaactttacactgaagcacgtggggccaggtgtcctgtccatggctaatgctggtcctaacaccaacggctcccagttcttcatctgcaccataaagacagactggttggatggcaagcatgttgtgttcggtcacgtcaaagagggcatggacgtcgtgaagaaaatagaatcttttggctctaagagtgggaggacatccaagaagattgtcatcacagactgtggccagttgagctaatctgtggccagggtgctggcatggtggcagctgcaaatgtccatgcacccaggtggccgcgttgggctgtcagccaaggtgcctgaaacgatacgtgtgcccactccactgtcacagtgtgcctgaggaaggctgctagggatgttagacctcggccaggacccaccacattgcttcctaatacccacccttcctcacgacctcatttctgggcatctttgtggacatgatgtcacccaccccttgtcaagcattgcctgtgattgcccagcccagattcatctgtgccttggacatggtgatggtgatgggttgccatccaagtgaaagtcttttccttgaccaagggggacagtcagttttgcaaaaggactctaatacctgtttaatattgtcttcctaattgggataatttaattaacaagattgactagaagtgaaactgcaacactaacttccccgtgctgtggtgtgacctgagttggtgacacaggccacagaccccagagcttggcttttgaaacacaactcagggcttttgtgaaggttcccccgctgagatctttcctcctggttactgtgaagcctgttggtttgctgctgtcgtttttgaggagggcccatgggggtaggagcagttgaacctgggaacaaacctcacttgagctgtgcctagacaatgtgaattcctgtgttgctaacagaagtggcctgtaagctcctgtgctccggagggaagcatttcctggtaggctttgatttttctgtgtgttaaagaaattcaatctactcatgatgtgttatgcataaaacatttctggaacatggatttgtgttcaccttaaatgtgaaaataaatcctattttctatggaagactggtacctggtttctggaagaggggtctgtgacttggagctgatctttactgagctcgccgtggcagatgccatgctcagacgttcatgtggatggtttcatgtctccttgctggcaacttgtcctcccttgccttagaatgaggctcagacaacgaccttagcacccatagcctatgcatgagactggctccaccctgaatcccagctcctcccc

SEQ ID NO: 188858 - DNA, 1635 bp, Homo Sapiens
  misc_feature (360)..(368): n is a, c, g, or t
  misc_feature (409)..(465): n is a, c, g, or t
tccaaattatctattcccagtcttctgaactcagttgctagcaaattcaactttcaagtagctcaggctgaaaccccagaaccaacgttgtctccactatttctcaatctatatccaatagatcagcaaactcagttagctttacttcccaaacactgctaaaattcaaatttattgccacctccactgccatcaccctggtccaagccacccagcatcatctcttgcttgacttattgcaataacttcctatttttctcccttactctatctttgctccttccaatctaagttagtcaacattatttactgaatactggaaactactataccaggtaaaggagggctataaggaaattnnnnnnnnntagctaacactttcagagtacctactacactctaggaaccnnnnnnnnnnnnnnnnnnnnnnnnnnnnnnnnnnnnnnnnnnnnnnnnnnnnnnnnngttcatttgattctcacaattacactaacaggtaggcacaatttattttccccatcttaatcactaggaaactgaagttaagcaacttgtccaagggctcactacaaataatcagtatggcagaaagtctaacctagagagttcttattcaaccactgtattacgctgcccatttaaagaaaaatagcgtaacagtaaagatgctttagatttattttaaatattacgactgtagtcaaaaaaatacactattttaagtacttcaacatacataagtacagaggcacagcaaagattaaagcaaaagttaaagaatacctggtattccaatggctcttacatatgagaatataatatttgcttttcctttcagagcattttctatgttctgaaggtcttccaggttggtaatatatttcacttcactaaaaagaagagcaaagagaacatgggcgacaatggcattcacatcaaacaaggtgtcagtagggaattctctgagcaatatgttgcccttgaataaatatgctttcatcaaatccttttcttttccacagtatcttgatatttcttctttgacacaattaaccttggcaactgaaattccatagtcctgcagaggtctaacagcctcattcagttcttcaagaaatacagatgttcttggggaatcagcttgacaaaaataagctaaagaggcttttcctggttgcaatgtactaaaatatttctgaggactcagttctggtaaagagtttactgttggcatgtaaaaaatgcacattatgacaaaagagatcccaactctaaagacattgaagccggaaaacattatcagctgcagttgtatctgagcggattttgtctgttttttcactgctgtgttctgtttcctaagacaacacttccatgctgtcctctgtatctgctgttaattctttattttctattttgctactttcaaatttttcttgaacaacttcaagaagttttctactgatgatctatgttatctgcccgggacctgcgggcggggacctgggccgttcccgaggccgcgcggccaacagttcccgccgccacgcgacggaggaggaggcagaagacggggccgtgccagactagccgggtagcctggaaccacttcgccaacctgcaaaggcgtaccaa

SEQ ID NO: 188859 - DNA, 1396 bp, Homo Sapiens
ttggcgggacaccatgaaggaggacggcggcgcggagttctcggctcgctccaggaagaggaaggcaaacgtgaccgtttttttgcaggatccagatgaagaaatggccaaaatcgacaggacggcgagggaccagtgtgggagccagccttgggacaataatgcagtctgtgcagacccctgctccctgatccccacacctgacaaagaagatgatgaccgggtttacccaaactcaacgtgcaagcctcggattattgcaccatccagaggctccccgctgcctgtactgagctgggcaaatagagaggaagtctggaaaatcatgttaaacaaggaaaagacatacttaagggatcagcactttcttgagcaacaccctcttctgcagccaaaaatgcgagcaattcttctggattggttaatggaggtgtgtgaagtctataaacttcacagggagaccttttacttggcacaagatttctttgaccggtatatggcgacacaagaaaatgttgtaaaaactcttttacagcttattgggatttcatctttatttattgcagccaaacttgaggaaatctatcctccaaagttgcaccagtttgcgtatgtgacagatggagcttgttcaggagatgaaattctcaccatggaattaatgattatgaaggcccttaagtggcgtttaagtcccctgactattgtgtcctggctgaatgtatacatgcaggttgcatatctaaatgacttacatgaagtgctactgccgcagtatccccagcaaatctttatacagattgcagagctgttggatctctgtgtcctggatgttgactgccttgaatttccttatggtatacttgctgcttcggccttgtatcatttctcgtcatctgaattgatgcaaaaggtttcagggtatcagtggtgcgacatagagaactgtgtcaagtggatggttccatttgccatggttataagggagacggggagctcaaaactgaagcacttcaggggcgtcgctgatgaagatgcacacaacatacagacccacagagacagcttggatttgctggacaaagcccgagcaaagaaagccatgttgtctgaacaaaatagggcttctcctctccccagtgggctcctcaccccgccacagagcggtaagaagcagagcagcgggccggaaatggcgtgaccacaccatccttctccaccaaaagacagttgcgcgcctgctccacgttctcttctgtctgttgcagcgggaggcgtgcgtttgcttttacagatatctgattggagagtgtttcttcacaacagaagtatttctgtggatggcatcaaccagggcaaatgtttttaatggatgcttataggttttttttaaata

SEQ ID NO: 188860 - DNA, 1296 bp, Homo Sapiens
ttggccccaatgcacccctgaaccggaagggtctggttagtccacagagcccccagaaatctgactgccagcccaactcgcccacagagtcctgcagcagtaagaatgcctgcatcctccaggcttctggctcccctccagccaagagccccactgaccccaaagcctgcaactggaagaaatacaagttcatcgtgctcaacagcctcaatcagaatgccaaaccagaggggcctgagcaggctgagctgggccgcctttccccacgagcctacacggccccacctgcctgccagccacccatggagcctgagaaccttgacctccagtccccaaccaagctgagtgccagcggggaggactccaccatcccacaagccagccggctcaataacatcgttaacaggtccatgacgggctctccccgcagcagcagcgagagccactcaccactctacatgcaccccccgaagtgcacgtcctgcggctctcagtccccacagcatgcagagatgtgcctccacaccgctggccccacgttccctgaggagatgggagagacccagtctgagtactcagattctagctgtgagaacggggccttcttctgcaatgagtgtgactgccgcttctctgaggaggcctcactcaagaggcacacgctgcagacccacagtgacaaaccctacaagtgtgaccgctgccaggcctccttccgctacaagggcaacctcgccagccacaagaccgtccataccggtgagaaaccctatcgttgcaacatctgtggggcccagttcaaccggccagccaacctgaaaacccacactcgaattcactctggagagaagccctacaaatgcgaaacctgcggagccagatttgtacaggtggcccacctccgtgcccatgtgcttatccacactggtgagaagccctatccctgtgaaatctgtggcacccgtttccggcaccttcagactctgaagagccacctgcgaatccacacaggagagaaaccttaccattgtgagaagtgtaacctgcatttccgtcacaaaagccagctgcgacttcacttgcgccagaagcatggcgccatcaccaacaccaaggtgcaataccgcgtgtcagccactgacctgcctccggagctccccaaagcctgctgaagcatggagtgttgatgctttcgtctccagccccttctcagatctacccaaaggatactgtaacactttacaatgttcatcccatgatgtagtgcctctttcatccactagtgcaaatcatagc

SEQ ID NO: 188861 - DNA, 1064 bp, Homo Sapiens
gaaggacagggagcaggtgaggatgaccaccacgtcaaacaggagccggaagctgtgtctccgtgctggaagacactggggtgcttacactcctggatgtgggcctgggtctccaggctgatggggatccgcccactgtgtgctttgttgtcaaacgtgatcaggacgctgaaggtatagcagtccgggatctcattattgatgaggctctggaggttaatggtcttcagccggaagtggatggtgacattgaccagcttgtggaatttgagcgtgaggttcttgtaactggagctgctttccaagagggtgagatcgtcgctggggggcggagggggccgctcggggggatccacctggatgcagtcagtaaccaccatcggatcaatgtcaaatgtgtcgttggccgggtccacgtggcctcggtggtagtaccgctggcagagagcaagccctgagccattggtccaagggtcacccccaccacggacatacgcataccggcccagtgacacgtcaggcaacgccaggtactggtccacagcatggaagatggcctggtacagctgctcccgcgtgtaggctgcgaaggtgtcatccgctccgtccgagtagcccagcaggaagaggtgtcggaaggcgatggtgttctcttcccggaatgtcacagccagctgattactgagcccaaacaggatgagctgcaccgtgaccaccaggatcttgaccacttgcagcatcagcttgcagggcttgcggcccttggctcgaaacttgtcgcagggactcatgaaaaagtatttgagacgacggcgaaggtcttcctcttctgggggtgtcggaggggccggtgaaggccccgcctgggtcccatacccggggttgggggtcagaagccgctcggtctctgagccgcgcggacccgccggggctgtcatgctggggcgggagcgcgggacgcaggcgggtacggcggggcagcctgggtccgatcgcccgccgctgtcactgcgacctcgctccctcgcggcgcggcttcaaacccaacttttttgtacaaagtt

SEQ ID NO: 188862 - DNA, 686 bp, Homo Sapiens
ttggggatgagccccaccgataacctccgcgagcaagccacatcgtcctccttctgggctttcaggcgcttggggctgctgggccctccagaacgcgacgcagacctctgagctggccggctggagggggccacatcacagggctcccggaggcagctgcgcttgcggggacacccttccgacgtgctgctccagttgtgcttgaccttgccccgctcggacgccatgggcacctgcaagttctcaaggtttcagagatgccaaaccgtgttggagaagtcaaagcgatccaaaattgactaaaggctgccgtccgtttccaagcccacaacgtgcttctgagatcaggaagccttcactttgcccagcgctacttcggagatgcctaagcgcttccggggctacgaagcgctttgatcagtttgcaatataaagccctttagaactgtcaaagcgcttcagaagaccacatggcgcttcaagatccacacatggctgccggatccgcggccccggggccgggcgcttagcccgtaggccagggccagacccgggcgccgcaacccgccctgctcctgcggcccaaccagacccgggccggaaggggcccgagcggcccctcgggagctggcagcgccctcgaccgccaactcaagacgccccccgccggctgccgcagctgtccc

SEQ ID NO: 188863 - DNA, 1275 bp, Homo Sapiens
ggggaccacgtgtgggagtgtccgcggagcttcacatttcagggccgtttcagccagtgcctctgaagtggccgcagcctggggccaggttcccctcctgagtccacctgggcccacattgctcccacggtgcacactccagcacaagaatggctcagccttgatcccccaaactgggcaccgtccctgcatgtaggtgtgtgggggggcctcagcagcagacggggccatgggcctctggtggggcactcggctcctgctcctgggacgagctccggggggccctggtggcattggcccggacagagatatggtcccagcctcccccgatgccgtagtcccagccgtggcccttgggctcgtgaggctgcacgccggtgcgatgacacactgtcccccggctcaggctgtggctgccctgcactttgttggcgatcacccagacctggtccaggggccccacggacactcggcacacgttgttggacacgtgctcccagctggagccctgcgggtagctgggcgtgatcccttggcgataccacaggtttccattctcatccagggcatacaccgacgtctgccccgcggacacctgcttcagcctctgtctcggtggggacgggatgtggtaccagcagtcaccggctggctgcgaggggtacacggatccccggtagaaggcggagccgtcccttgccacggcccacacctggtagcaggccccgatggagatggaggcgaagggctggtcggtgccaacgtgcagccaggaggagcccgcagggttgagctccgacacgcccaggcggcacagcacatcccccttgtcgctgacggcccagagggcgatgctgtgcccactcccctcggcacccaggctctccgggatgatggacacgtccctgagggcgatggggggcacctccagccagggcccactggtcaccagcttgcattttctggcccagcacctcctcctcacaaaatccttcatcgttttggacccatggtatgaggcagggaagtcgctggcatactgccacccctcctggtccgtgccccccggaacgctgaaatccacgaaccagtcggaaacccaggcccactgcagggacgggggcttcgtgccagccttcgtgcactcctgcagccccgaggcatcgctccacatgtaccggtccgtgggcagacccctgctggtgtagcctgtgacggggttccagcgctggttctctatagagggtgaacacacccaacttttttgtacaaagt

SEQ ID NO: 188864 - DNA, 1538 bp, Homo Sapiens
  misc_feature (383)..(395): n is a, c, g, or t
ttgggacgaattgaagttcccttgcccatgttaggaggtgtacgcctcctgaactaaagatagaaacagctggcccttccaggcagctaaaagcctccagactaagaggtgttccccattcggcagccagactccttgaaataccctttcagtaatcattcaaccaacgcttccatgtctctactctgtcgtaacaaaggctgtgggcagcactttgaccctaataccaaccttcctggtgagtaaagaatcctgacctggccaggggctctgtgtgggtgttggggactggtcagctggggggcagtgtgtttgaggagcggggaaagaaactacctgccctagtttaattggtctgagtgatcttacagcctttgctggcnnnnnnnnnnnnncttcacattatatgggaagaaaccataaatagaaacccggggaagaggtgaaaaatgatacttggtatagttatcttcccttccttgataacttctactgatgtccacagattcctgttgccatcaccctggggtcccaatcttccatgatgcacttaagggttggtcctgctgccgaaagcgaactgtagatttctctgagttcttaaacatcaagggctgtactatgggaccacactgtgctgagaagcttcctgaggcccctcaacctgaaggccctgctacaagcagttcacttcaggagcaaaaacctctgaatgtgattccaaagtcagcagagaccttgcgccgggagaggcccaagtcagagttgcctctgaagctgctgccgctaaatatatcccaagccctggaaatggcattggaacagaaggaattagaccaggaacctggggcaggacttgacagtctgatccggactggttccagctgccagaacccaggatgtgatgctgtttaccaaggccctgagagtgatgctactccatgtacctaccacccaggagcaccccgattccatgaggggatgaagtcttggagctgttgtggcatccagaccctggattttggggcattcttggcacaaccagggtgcagagtcggtagacatgactgggggaagcagctcccagcatcttgccgccatgattggcaccagacagattccttagtagtggtgactgtatatggccagattccacttcctgcgtttaactgggtgaaggccagtcaaactgagcttcatgtccacattgtctttgatggtaaccgtgtgttccaagcacagatgaagctctggggggtcataaacgtggagcagagctctgtcttcttgatgccatctcgggttgaaatctccctggtcaaggctgacccaggatcctgggcccagctggagcaccctgatgcactagctaagaaggctagggcaggggttgtgttagagatggatgaggaagaatctgacgattcagatgatgatctgagctggacagaggaggaggaagaggaggaagcaatgggggatagtgacacagacagttgatgtctagataggacctcaatgattctcttagaatctta

SEQ ID NO: 188865 - DNA, 963 bp, Homo Sapiens
aaagctcccgcaggttgggcatgggcccgaagatccctggagagagctcttcagggaattcccaaagagagtaagacggttgagctggggcagctgcatgaagacgctgggtggcagctgggagatgtggttgttggacaggtagagtctctggaggttgtggttgttgtggaagagaccaggggagagcagtccaatctggttctgctgcagagccagttcctgcaggttaacaagcccatcaaaagtgcccatggggatatccgtgagcctgttctcatacagccggaggacctggaggttgcccaggtgctggaagaccctgggtgagatgtgggtgaggctattcttgcccagattgagcttcgtgagtcctaccaggtggtcgaaggctccgtcagggatgtattccaggtggttgccgtgcaactgcagctccttgaggttgctgcactgggagaagtgggccggctggatctgcaacagctggttactggacagaaggagagactcgaggctgtccaggccctggaagaggccgatgggcagaacctgcagcttgttgttggcgaggctgagatagcgcagcgagcccaggtttcggaaggccccaggcgtgatgcgcgacagctcattcttctcaatcctcagggcgatgagggctgagatattgaggaacggggactcattgagttcagtgatgtgcgtgttgaggatctgcaggctcatggcgttccagggcagaggggtgggcactgccacaatgcgtgccccggtgcactccacctgggaggccctggagcaggtacactcactagggcagccatggtaggccaaccctgcaccccaggcttggcagcccaccagcaaaaggagataatgcttcagtggcatagccagcagctcggcgcccgcccgccgtggacaagagggagcctgagaggaggacgccaacttttttgt

SEQ ID NO: 188866 - DNA, 1588 bp, Homo Sapiens
ttggcgctgggctggtcccgcaggcgctcggggttggagccagcgaccgtcggtagcagcatggctctcctctttctcctaccccttgtcatgcagggtgtgagcagggctgagatgggcaccgcggatctggggccgtcctcagtgcctacaccaactaatgttacaattgaatcctataacatgaaccctatcgtatattgggagtaccagatcatgccacaggtccctgtttttaccgtagaggtaaagaactatggtgttaagaattcagaatggattgatgcctgcatcaatatttctcatcattattgtaatatttctgatcatgttggtgatccatcaaattctctttgggtcagagttaaagccagggttggacaaaaagaatctgcctatgcaaagtcagaagaatttgctgtatgccgagatggaaaaattggaccacctaaactggatatcagaaaggaggagaagcaaatcatgattgacatatttcacccttcagtttttgtaaatggagacgagcaggaagtcgattatgatcccgaaactacctgttacattagggtgtacaatgtgtatgtgagaatgaacggaagtgagatccagtataaaatactcacgcagaaggaagatgattgtgacgagattcagtgccagttagcgattccagtatcctcactgaattctcagtactgtgtttcagcagaaggagtcttacatgtgtggggtgttacaactgaaaagtcaaaagaagtttgtattaccattttcaatagcagtataaaaggttctctttggattccagttgttgctgctttactactctttctagtgcttagcctggtattcatctgtttttatattaagaaaattaatccattgaaggaaaaaagcataatattacccaagtccttgatctctgtggtaagaagtgctactttagagacaaaacctgaatcaaaatatgtatcactcatcacgtcataccagccattttccttagaaaaggaggtggtctgtgaagagccgttgtctccagcaacagttccaggcatgcataccgaagacaatccaggaaaagtggaacatacagaagaactttctagtataacagaagtggtgactactgaagaaaatattcctgacgtggtcccgggcagccatctgactccaatagagagagagagttcttcacctttaagtagtaaccagtctgaacctggcagcatcgctttaaactcgtatcactccagaaattgttctgagagtgatcactccagaaatggttttgatactgattccagctgtctggaatcacatagctccttatctgactcagaatttcccccaaataataaaggtgaaataaaaacagaaggacaagagctcataaccgtaataaaagcccccacctcctttggttatgataaaccacatgtgctagtggatctacttgtggatgatagcggtaaagagtccttgattggttatagaccaacagaagattccaaagaattttcatgagatcagctaagttgcaccaactttgaagtctgattttcctgggacagttttctgcttt

SEQ ID NO: 188867 - DNA, 1009 bp, Homo Sapiens
  misc_feature (652)..(664): n is a, c, g, or t
ctttgtacaaaaaagttgggtggaacatacccgttgaactttcgagtataacagaagtggtgactactgaagaaaatattcctgacgtggtcccgggcagccatctgactccaatagagagagagagttcttcacctttaagtagtaaccagtctgaacctggcagcatcgctttaaactcgtatcactccagaaattgttctgagagtgatcactccagaaatggttttgatactgattccagctgtctggaatcacatagctccttatctgactcagaatttcccccaaataataaaggtgaaataaaaacagaaggacaagagctcataaccgtaataaaagcccccacctcctttggttatgataaaccacatgtgctagtggatctacttgtggatgatagcggtaaagagtccttgattggttatagaccaacagaagattccaaagaattttcatgagatcagctaagttgcaccaactttgaagtctgattttcctggacagttttctgctttaatttcatgaaaagattatgatctcagaaattgtatcttagttggtatcaaccaaatggagtgacttagtgtacatgaaagcgtaaagaggatgtgtggcattttcacttttggcttgtaaagtacagacnnnnnnnnnnnnnaaacaaaaaaagcattgtaacttatgaacctttacatccagataggttaccagtaacggaacagtatccagtactcctggttcctaggtgagcaggtgatgccccagggacctttgtagccacttcactttttttcttttctctgccttggtatagcatatgtttttgtaagtttatgcatacagtaattttaagtaatttcagaagaaattctgcaagcttttcaaaattggacttaaaatctaattcaaactaatagaattaatggaatatgtaaatagaaacgtgtatattttttatgaaacattacagttagagatttttaaataaagaattttcaaactc

SEQ ID NO: 188868 - DNA, 1512 bp, Homo Sapiens
ttggcctcaattctctgcaaggcctgagctccatccatgtctatggaaaaactgaagacttcatcagccagtttaagaggctgactgatgcgcagaataactacctgctgttgtttctatcttccacacgatggatggcattgaggctggagatcatgaccaaccttgtgaccttggctgttgccctgttcgtggcttttggcatttcctccaccccctactcctttaaagtcatggctgtcaacatcgtgctgcagctggcgtccagcttccaggccactgcccggattggcttggagacagaggcacagttcacggctgtagagaggatactgcagtacatgaagatgtgtgtctcggaagctcctttacacatggaaggcacaagttgtccccaggggtggccacagcatggggaaatcatatttcaggattatcacatgaaatacagagacaacacacccaccgtgcttcacggcatcaacctgaccatccgcggccacgaagtggtgggcatcgtgggaaggacgggctctgggaagtcctccttgggcatggctctcttccgcctggtggagcccatggcaggccggattctcattgacggcgtggacatttgcagcatcggcctggaggacttgcggtccaagctctcagtgatccctcaagatccagtgctgctctcacgaaccatcagattcaacctagatccctttgaccgtcacactgaccagcagatctgggatgccttggagaggacattcctgaccaaggccatctcaaagttctccaaaaagctgcatacagatgtggtggaaaacggtggaaacttctctgtgggggagaggcagctgctctgcattgccagggctgtgcttcgcaactccaagatcatccttatcgatgaagccacagcctccattgacatggagacagacaccctgatccagcgcacaatccgtgaagccttccagggctgcaccgtgctcgtcattgcccaccgtgtcaccactgtgctgaactgtgaccacatcctggttatgggcaatgggaaggtggtagaatttgatcggccggaggtactgcggaagaagcctgggtcattgttcgcagccctcatggccacagccacttcttcactgagataaggagatgtggagacttcatggaggctggcagctgagctcagaggttcacacaggtgcagcttcgaggcccacagtctgcgaccttcttgtttggagatgagaacttctcctggaagcaggggtaaatgtagggggggtggggattgctggatggaaaccctggaataggctacttgatggctctcaagaccttagaaccccagaaccatctaagacatgggattcagtgatcatgtggttctccttttaacttacatgctgaataattttataataaggtaaaagcttatagttttctgatctgtgttagaagtgttgcaaatgctgtactgactttgtaaaaatataaaactaaggaaaactc

SEQ ID NO: 188869 - DNA, 1403 bp, Homo Sapiens
ttggatcattttgttggaaaatgggaaaatctgtgaaaatggaactcacagtgagttaatgcagaaaaaggggaaatatgcccaacttatccagaagatgcacaaggaagccacttcggacatgttgcaggacacagcaaagatagcagagaagccaaaggtagaaagtcaggctctggccacctccctggaagagtctctcaacggaaatgctgtgccggagcatcagctcacacaggaggaggagatggaagaaggctccttgagttggagggtctaccaccactacatccaggcagctggaggttacatggtctcttgcataattttcttcttcgtggtgctgatcgtcttcttaacgatcttcagcttctggtggctgagctactggttggagcagggctcggggaccaatagcagccgagagagcaatggaaccatggcagacctgggcaacattgcagacaatcctcaactgtccttctaccagctggtgtacgggctcaacgccctgctcctcatctgtgtgggggtctgctcctcagggattttcaccaaggtcacgaggaaggcatccacggccctgcacaacaagctcttcaacaaggttttccgctgccccatgagtttctttgacaccatcccaataggccggcttttgaactgcttcgcaggggacttggaacagctggaccagctcttgcccatcttttcagagcagttcctggtcctgtccttaatggtgatcgccgtcctgttgattgtcagtgtgctgtctccatatatcctgttaatgggagccataatcatggttatttgcttcatttattatatgatgttcaagaaggccatcggtgtgttcaagagactggagaactatagccggtctcctttattctcccacatcctcaattctctgcaaggcctgagctccatccatgtctatggaaaaactgaagacttcatcagccagtttaagaggctgactgatgcgcagaataactacctgctgttgtttctatcttccacacgatggatggcattgaggctggagatcatgaccaaccttgtgaccttggctgttgccctgttcgtggcttttggcatttcctccaccccctactcctttaaagtcatggctgtcaacatcgtgctgcagggaagtcctccttgggcatggctctcttccgcctggtggagcccatggcaaccggattctcattgacagcgtggacatttgcagcatcggcctggaggacttgcggtccaagctctcagtgatccctcaagatccagtgctgctctcagaaccatcagattcaacctagatccctttgaccgtcacactgaccagcagatctgggatgccttgtagaggacattcctgaccaaagccatctcaa

SEQ ID NO: 188870 - DNA, 1557 bp, Homo Sapiens
  misc_feature (1245)..(1278): n is a, c, g, or t
caatatataaagaacgttggccagattatgtaagggaactgcgaagaaggtattctgcaagtactgtagatgttatagaaatgatggaggatgataaagttgatctgaatttgattgttgccctcatccgatacattgttttggaagaagaggatggtgcgatactggtctttctgccaggctgggacaatatcagcactttacatgatctcttgatgtcacaagtaatgtttaaatcagataaatttttaattatacctttacattcactgatgcctacagttaaccagacacaggtgtttaaaagaacccctcctggtgttcggaaaatagtaattgctaccaacattgcggagactagcattaccatagatgatgtcgtttatgtgatagatggaggaaaaataaaagagacgcattttgatactcagaacaatatcagtacaatgtccgctgagtgggttagtaaagctaatgccaaacagagaaaaggtcgagctggaagagttcaacctggtcattgctatcatctgtataatggtcttagagcaagtcttctagatgactatcaactgccagaaattttgagaactcctttggaagaactttgtttacaaataaagattttaaggctaggtggaattgcttattttctgagtagattaatggacccaccatcaaatgaggcagtgttactctccataagacacctgatggagctgaacgctttggataaacaagaagaattgacacctcttggagtccacttggcacgattacccgttgagccacatattggaaaaatgattctttttggagcactgttctgctgcttagacccagtactcactattgctgctagtctcagtttcaaagatccatttgtcattccactgggaaaagaaaagattgcagatgcaagaagaaaggaattggcaaaggatactagaagtgatcacttaacagttgtgaatgcgtttgagggctgggaagaggctaggcgacgtggtttcagatacgaaaaggactattgctgggaatattttctgtcttcaaacacactgcagatgctgcataacatgaaaggacagtttgctgagcatcttcttggagctggatttgtaagcagtagaaatcctaaagatccagaatctaatataaattcagataatgagaagataattaaagctgtcatctgtgctggtttatatcccaaagttgctaaaattcgactaaatttgggtnnnnnnnnnnnnnnnnnnnnnnnnnnnnnnnnnnccgatggcctggttgctgttcatcctaaatctgttaatgtggagcaaacagactttcactacaactggcttatctatcacctaaagatgagaacaagcagtatatacttgtatgactgcacagaggtttccccatactgtctcttgttttttggaggtgacatttccatccagaagataacgatcagaaactattgctgtagatgagtggattgtatttcagtctccagcaagaattgcccatcttgttaagaattaagaaaggaactagatattcttc

SEQ ID NO: 188871 - DNA, 1045 bp, Homo Sapiens
ttggctttagatggaaacaaatgactggatctttaactcctacctttctctcctctcttcctgtaatgttgttactgaaggcaggaagggagactccttggctaaagagcagagcaagagcctcaaagtggtctttgtgagccaccctggactactggttcagtagagggttgagtcaagcaatatttgaggacgggatataaacagtatttcttaaagttgtcaccaatttttcccccgatgaggccattccagacccaaattagtcataacagagccaggacaataatcacatctcctgattctgagcctgaatgcttcccacaggactgcgtcgctcccactgctctgaggtccattgtgggggagagttgccactgggattccacctcaaggcctggggaccaagcctccaggattcctcttgagactcctccactatttcattaccatcccgccacatcttctagtgctatgccctggttccctttggaatcctctcaatcccaaagaaggcctcctaccacctctaaggcatcaaaggtgttagaaagtgccccaagactcaacagggcatccatctcatcatagaagacactggtgcctggtgtgtaggtgctcctggctttgcagtagtcggtcaggaggtttttgaaccgatagcaacattgctccagggtccacaggaagccatgttctcacagctgctcagccataatccggtacacctggtggtttcgatggcaggtgcggagtttttcgtggatccaggcctctgagaattcccagaaaaatcttggtttctttgtatccccagtgcactcctgccaccttctcatcctccagggcctgccactccagctcgctccaggtcttggcttttctccagattagcacctggccagacttgactctcaccccagccactgagcagtctttcacactctctttttctccagaatttgaagatctagatgctgtgggttttcatcctactccacgtggggagttcactttgggcctatggattggaaaatctgtttgc

SEQ ID NO: 188872 - DNA, 1502 bp, Homo Sapiens
ttactattcccaatgactggataaattatctggcacaaagaggatctgaagaaagtatcaagtccaagaatatcttactgaagccctttctggtagtaaactggccattgtgggctctgtataatactttaggcatcagaaaacggccacaaccctattacgggtcaagtaataattcctttccaattaataatactacagatgcggttttaattgcatagtcttttagaatcatgaaaaataatgagagccacctcttttcccgaaggcccaggtttattctaacggagtgccgggctaaggacccagccagcatgagctgtagcgtgacacaaatccagggatcagctgtcccaatctcccacattcctctttcacaatcactcaacaaacaggtcacacatcccctaggtccacgaactcatcttctcgtttggccaaatcgtcttcatctcccaaagctttccagccactggtgggtaagacgggcttagaggaatgtcgctggagcagagcgaaaggaaacaaagacgagaggcgggcagagttcctcagcaggcagggggcctcagcctggggggcctgctggctgtggtgtctctcgtcgatcttctcttgtaaactctggacttcctccatcatttccaagagtttgctcagagtggccacttggccaccacctaggatttgggcttctggaatccaacgtaggtagcgctgggcccagactttgatttcgggcccctcgatatgcggtaacaacaaaccatggtagtcagtggacttgctatgccagctgtcatagaactctcgaaagttgtcttggagctcatcagaagaattaataagtttgctaattctcttgcccagaaggtttttaattaaatgatctgtttcttccctgaaaaatcctcttttgggagatgacttagattgtgtaagtggcaaagaaagttgtcgttgatgtttgaagcgcattcctttccgttggcctttgtccagttttggcttttccacataaagagggtttttgagcaatgtctgggctttgggttcaaactgcaccgaccaatcccacacggtgagcagattcaaaggcttgctttgtgtatcctggccttctctacccatgttagtatctttttgatgaggtgaattgaagaagaaggtgctaaaaataggtatatacaggctatctgacaaaacagtcaggtaagtctctgtgaattcaaatgccgggggatgctggtgcaccagctgccagacacaatctaggaaaagcaggaacacaggaacctcctctttgtcgttctggcggagatggttgcagcgatccaagaaacagtggccacccatgacccactccttttggatgaggctctggaaaccaattctggttctgcagtgggggtccatcatcagttgcaccagagaggaaatgagacagcagaggtcggatgcattctcctctaggagaggccccagcagcagtgcaaagccaa

SEQ ID NO: 188873 - DNA, 1108 bp, Homo Sapiens
ttggtaagaagatcatgatgcacttagataaaagaatgattaggtatagtggagacttatttgccagcagataaatcatgcccgttcccctctgcctggcagaatcacagtctcacatactgtcttgtactgacacatccaaagcatgagtgtgtcagaaatcccttgtctattcctgtctgtataaagtgtttcattatgaccagatctctgattgtatggtcactaggtatgcaatcacgcattcaaagaggctctttacaccatcactgtgattgctctgagagttgagggactattgggctttatttggactaaccaaacttttagcctgaaaccaactttatgccactaagtcatagcctcagttgtcccagttatttgtcctcctgaaaatgcctgaaacatcagacagacattgcttgctttacccaaactgatcaaaatctttaggagcacaaatgaattttttagtctgaaataccaaataatgaattggtataccatatccggaatcacacatgttatcttaaacccagccatcatacctaagtcttttgccaaaacctctcataggtatatctagctgaacttattttggcattttcaatgtgatcagttctagacctagaagggggtcaggctgctttacagaattctatttccttaagtccctggcacttctcataccacatcactgaacctgttcagtaacaatcagtttggccgtcccccatgatggtaggaaatatagagagcaagttcttctgccagggtcacactgtggtctctgaactgaccagtatatccctaactcctctttgatagagaaagagtctcaaatggacaactgtcctgtgttgctttccctaggccttcagcagcctattggctctccctgcctctgagctctggactctgtttgaatattccaagtagtatatggacagtccagggcttatgcccagcagcccactggaggcattcttcaagctcctttaaggcaggtgcattgatagttcccttagtgtgacccttgcattgggcacccctccagcctggaggccaggctttcagcaacttccttctgccctagagcaagccatga

SEQ ID NO: 188874 - DNA, 930 bp, Homo Sapiens
ttggagaagacctggcggcaggtgtgggccgcagccgagttccagtccgcccaccccagcagtactcagatgatgaggatgactatgaggatgacgaggaggatgacgtgcagaacaccaactctgcccttaggtataaggggaagggaacagggaagccaggggcattgagcggttctgctgatgggcaactgtcagtgctgcagcccaacaccatcaacgtcttggctgagaagctcaaagagtcccagaaggacctctcaattcctctgtccatcaagactagcagcggggctgggagtccggctgtggcagtgcccacacactcgcagccctcacccacccccagcaatgagagtacagacacggcctctgagatcggcagtgctttcaactcgccactgcgctcgcctatccgctcagccaacccgacgcggccctccagccctgtcacctcccacatctccaaggtgctttttggagaggatgacagcctgctgcgtgttgactgcatacgctacaaccgtgctgtccgtgatctgggtcctgtcatcagcacaggcctgctgcacctggctgaggatggggtgctgagtcccctggcgctgacagagggtgggaagggttcctcgccctccatcagaccaatccaaggcagccaggggtccagcagcccagtggagaaggaggtcgtggaagccacggacagcagagagaagacggggatggtgaggcctggcgagcccttgagtggggagaaatactcacccaaggagctgctggcactgctgaagtgtgtggaggctgagattgcaaactatgaggcgtgcctctaggaggaggtagagaaaaggaagaagttcaagattgatgaccagagaaggacccacaactacgatgagttcatctgcacctttatctccatgctgg

SEQ ID NO: 188875 - DNA, 757 bp, Homo Sapiens
  misc_feature (42)..(51): n is a, c, g, or t
  misc_feature (97)..(145): n is a, c, g, or t
  misc_feature (262)..(284): n is a, c, g, or t
ttggattttttttaaggaaaataaaaacattagttacaagannnnnnnnnncttaatgtagatgaaaattagcaaggatgctgcctttggtctctgnnnnnnnnnnnnnnnnnnnnnnnnnnnnnnnnnnnnnnnnnnnnnnnnngtataaaagtcccgtgtctctcgctatttctgctgctgttcctagactgagcattgcatttcttgatcaaccagatgattaaacgttgtattaaaaagaccccgtgtaaacctgagnnnnnnnnnnnnnnnnnnnnnnnggaagccactgcacacagacagaacggggacaggcggcgggtcttttgtttttttgatgttgggggttctcttggttttgtcatgtggaaagtgatgcgtgggcgttccctgatgaaggcaccttggggcttccctgccgcatcctctcccctcacgaaggggactgacctgggcttgggggaagggacgtcagcaaggtggctctgaccctcccaggtgactctgccaagcagctgtggcccccaaggctaccctacacaacgccctccccaagcccccctaaactgctctcccttggaacctgcacagctctcttaaatggggcattttgttgggaccattgacccctggcatggggaccacaccctggagcccggtgctggggacctcctggacaccctgtccttcactcctttgccccagggacccatgctcatgctctaaactctggctgatatgatgctgctcaaga

SEQ ID NO: 188876 - DNA, 1707 bp, Homo Sapiens
ttgggccatggctacccgcagccggcgcgacctactttcagcgaggcagtctgttctggttcacagtcatcaccctcagctttggctactacacatgggttgtcttctggcctcagagtatcccttatcagaaccttgggcccctgggccccttcactcagtacttggtggaccaccatcacaccctcctgtgcaatgggtattggcttgcctggctgattcatgtgggagagtccttgtatgccatagtattgtgcaagcataaaggcatcacaagtggtcgggctcagctactctggttcctacagactttcttctttgggatagcgtctctcaccatcttgattgcttacaaacggaagcgccaaaaacaaacttgaagttgtctgaaagcttgctctacacttttacattcatcctcacccttttttttgtggggtagaggaggtgcagtaatttactcagtgatctttctactttctagaaactgtccttcaaagctctttaagaccccctcgttagtcagttttttctcttatatgctctggttgagcttgaatagaccagttgttacttaagaaagaaacagagaaagattttagcttttcaatcctatttggcagaggacttcagctaccttcttacagtctttggctgtgttggtaccctcgtgtgctctgagctaagccacatactaaactgactttttggtttgtatacccttgctcccgccttctgatgaaaacaccttaccctcacaaccaccatctttcctctcctttccaaagctctttccaccttgctgcactaagataaagtgacacttccactatatgtcaattccacacacatttattaggtacctgtgaggtaggatcctatcctctcaaacttccatttctcatgctacagagaaagataaggaagatgagcaagtgcctggaatggggcaggctgagcagtcacacaggcatagaggcacgctgagaacctggaggggagactgcagagtgccttccctgatgctgcagccggaagtgatccttccctccacctggcccctgggacactgtgctctgcagtgtgcagggcctgatggcactgctagattgctccttcagctcagggccacagcttaaacagctttacctttcccctcagcacctgtcccactatcttgcacacaggtgctctaaccatgtttattgaacaaaggagggaaactgatttcactttcacttgttcattatcattccaatttttatgtgaaaatggcacaacccatttggggtaccctcaccccaaaataaaagcccaagtctacctttgactggtaccaccttttttgtggtttcgttggtgagaaacctttatctttttcatacctttctattctcaatcacttctccaaaagtgtgtctttccagctctgatttattcaaaacacaagcatttctgtttagagattctagcccatgggttatctggctagttattacctctcctgttcacttagttatactttattattgctcacaggctggggaggcagaatgactctgtcaccactaagagccattaagggcttcttccctggaggactgcctgcttgctttctgggggacactagccctcatttcccttctgtggtacagtggggcaaattatttgtattaagcaaacatttatgggaaacaacccgctccc

SEQ ID NO: 188877 - DNA, 829 bp, Homo Sapiens
ttggctctgcgaggacagctggggagaaggggagctgtgactgcgccatggggctcagcgacggggaatggcagttggtgctgaacgtctgggggaaggtggaggctgacatcccaggccatgggcaggaagtcctcatcaggctctttaagggtcacccagagactctggagaagtttgacaagttcaagcacctgaagtcagaggacgagatgaaggcgtctgaggacttaaagaagcatggtgccaccgtgctcaccgccctgggtggcatccttaagaagaaggggcatcatgaggcagagattaagcccctggcacagtcgcatgccaccaagcacaagatccccgtgaagtacctggagttcatctcggaatgcatcatccaggttctgcagagcaagcatcccggggactttggtgctgatgcccagggggccatgaacaaggccctggagctgttccggaaggacatggcctccaactacaaggagctgggcttccagggctaggcccctgccgctcccacccccacccatctgggccccgggttcaagagagagcggggtctgatctcgtgtagccatatagagtttgcttctgagtgtctgctttgtttagtagaggtgggcaggaggagctgaggggctggggctggggtgttgaagttggctttgcatgcccagcgatgcgcctccctgtgggatgtcatcaccctgggaaccgggagtggcccttggctcactgtgttctgcatggtttggatctgaattaattgtcctttcttctaaatccccaccgaacttcttcccacctccaaactgggctg

SEQ ID NO: 188878 - DNA, 1403 bp, Homo Sapiens
gaaagttttttcattgataattgtatttcaacattatttgagataaacaaaaacattcccaaaccacattgactcgttccttcccccaccctctgccccctcccacgatccaatgtacaagagagctattgtaaccaaagccatgaaccgaggttgcaacggcagacatgtgagatggctgttccaagttcaagcactgctgtctccagtcctggccttccgggcctcgatcatcggcttggttgcccgtttgcggtcagtggccagccccagccagcacatgaaatcaatgaaccaggtggttgggttaaaatttaagccaaattcactcgcagagtagtcaaagggaaaggtgtgatggtaattatggaagccttcaccaatggcacccagagcgacgagtgggttctgccgagggctgatgtgcttgtcatagggccggtttccatacatgtgggcggcgctgttgaccagccagctgatgttgagtgagatggtatagcggagaatagaggccaagaagtaggaattccacagactctctccccagatgtaccagggcaccagcgtggggaccacaaagcacatgagcaccacggagatcttatagtactttctctggatccggaccacaggatcagcaagcaggtcagtgacgtcaagctttctccccttctcaataacatctcgatgcttgcgaacaaacagccacccaatatgggagaagaagaagccccggcgggcattgtgggggtcagcatccgtctctgagtacttgtggtgggctcggtggtccctggaccactcgaagatgtcattctggaaagccatggagttggcgacagccagaaatatcctcagaggcagcttggcccggtaggacctgtggctccacaagcgatgggcaccagctgtcacacccagagcggccaggaggaagcagaagtaggcccagagcagagtgagtggcttggctttggggatgagcaccagggagtacacggcccccaagtggagcaagctcatcaggacgacattcctccagacgatgttctgccgctgcccgcgcgcgcctggcctctccgggccgccgccgccctcagagctttcgagcccggcacggatttcttccttggcgtcgcagaaagggatcttccccgcgtcggtggccgggcctggcatggctgggcgaggtgggcgcccgcagcagcggcaggcaggcaggcgctctgcccgagcggagctcgagggtgggggcgggggcttctgccttttaggggggaattctccgcacgtccagtcccctccttccagcccttctcccgggctcctgcgctcttccccagggtcttagcgtggcctagggatgcagatcttggcggccggcgtctgttgctggccaa

SEQ ID NO: 188879 - DNA, 882 bp, Homo Sapiens
ttggctagcgttaaccggcggggcggccggggttatgaatgaagctatggctacagattccccaagaagacccagtcgttgtactggtggagttgtggttcgcccccaggctgtcacagagcagtcctacatggaaagtgttgtgacttttctgcaggatgttgtgccacaggcttatagtggaacacctctaacagaagaaaaggagaaaatagtctgggtcagatttgaaaatgcagatttaaatgatacatcaagaaatctggaatttcatgaaatacatagtactgggagtgaaccgcctttgttgattatgattggctacagtgatggaatgcaggtctggagcatccctatcagtggcgaagcacaagagctcttctctgttcgacatggcccaattcgagcggctagaatcttgcctgctccacagtttggtgctcaaaaatgtgataactttgctgaaaaaagacccctccttggtgtttgtaagagcattggatcttctggcacaagcccaccgtactgttgtgtggatctgtattcacttcgtactggggagatggtcaagtccattcaatttaagacacctatttatgatctccattgcaataaacggatccttgtcgtagtcttgcaggagaaaattgctgcctttgatagctgtactttcacgaagaaattctttgttacaagctgctatccatgtccagggccaaacatgaatcctattgctcttgggagccgctggcttgcttatgcagaaaacaagttgattcgatgtcatcagtcccgtggtggagcctgtggagacaacattcagtcttatactgccacagtcattagtgctgctaaaacattgaaaagtggcctgacaatggt

SEQ ID NO: 188880 - DNA, 1185 bp, Homo Sapiens
ttggcgagcagttccagacagagaatggtgtgctgctgccatctcttcagtcagccctccccttcttggacctgcacgggacgccgcggctggagttccaccagtcggtattcgatgagctgcgggacaagctgctggagcgagtgtcagccatcgcttcggaggggaaggctgaggaaaggtacaagaagctggaagaccttctggagaagagcttttctctggtgaagatgccgtccctgcagcccgtggtgatgtgcgtcatgaagcacctgcccaaggttccggagaaaaaactgaagctggttatggctgacaaggagctgtatcgagcctgcgccgtggaggtgaagcggcagatctggcaagacaaccaggccctcttcggggacgaggtttccccactcctgaagcagtacatcctggagaaggagagcgctctcttcagtacagagctctctgtcctgcacaactttttcagtccttcccccaagaccaggcgccagggcgaggtggtgcagcggctgacgcggatggtggggaagaacgtgaagctgtacgacatggtgctgcagtttctgcgcacgctcttcctgcgcacgcggaatgtgcactactgcacgctgcgggctgagctgctcatgtccctgcacgacctggacgtgggtgaaatctgcaccgtggacccgtgccacaagttcacctggtgcctggacgcctgcatccgagagcggttcgtggacagcaagagggcgcgggagctgcaggggtttctcgatggcgtcaagaagggccaggagcaggtgctgggggacctgtccatgatcctgtgtgaccccttcgccatcaacacgctggcactgagcacagtcaggcacctgcaggagctggtcggccaggagacactgcccagggacagccccgacctcctgctgctgctccggctgctggcgctgggccagggagcctgggacatgatcgacagccaggtcttcaaaggagcccaagatggaggtagagctcatcaccaggttcctcccgatgctcatgtccttcctggtggatgactacactttcaatgtggatcagaaacttccggctgaggagaaagccccagtctcatatccaaacacacttcccgaaagcttcactaagtttctgcaggagcagcgcatggcctgcgag

SEQ ID NO: 188881 - DNA, 2308 bp, Homo Sapiens
  misc_feature (940)..(952): n is a, c, g, or t
  misc_feature (1218)..(1233): n is a, c, g, or t
  misc_feature (1754)..(1785): n is a, c, g, or t
ttgggtgtgctctattgatgcaagacaagtcatccttcctactgtcatggtttgttatagagaagctgcttcaaatcactcttgactacatggaccttggtttcaaagtgagctgctatatattattctagcatcaaagtttttctctttccccaaaagtgatgatctcaagtcctttttttaaagaatgacaaattttaggagacttcattaacttcataacagcatgaatttatttgaattaattaacatttgagtttgtttaaggtataagcagaagataagctaatatagcttgttttgttgaaattctgcatgcctttaaatcactagcaaagcaaatattataaagttatatctgaaaataattgtgggaagtatgtgattgcctggtgtgtctgataacccaaagcagcgggcagattccaggaatgaagaattaggcttggtttcaggttacataaataatagagcagatggttgcctttgggtcttgaaccaaaataagacttactaaaggaagagtgagtttttagaagagaactttacgagcgtgacattatgcattactccacatccaccctttaagaattgatttattacaaaattatgttctattttaaagtccactcccccaaaatactgatttcttccatggattatttttatatgatttgtacaaattttttctgaaatttaaattgacaagcaatgttataaaaatattgctaatcttctgcttatttttcagcctttaaagtctgaaatactataaaacactgagagtatctatgtctttctgaatttaaaatgaaaattcatgtccatatggagacttacatattccccaatctttccatgaattgcatttttttctaatacttatctctgttaagactccattgaaagttaaacaaaaagccgatataatagtttgggnnnnnnnnnnnnngcttattttagtattttgaatcagagaatacttggccaagctcgtatttgtaaactaaaaccccttgttatttgtatcttctgcatttcagttttactgtaagaacatacattttgaaattatgaacatttttttcataaaaattaaatgctttaagaaatggagaaggaaaaatagcttttatcaatttttttctcctcaagattctgtaataaacctcaaagtctggtgtagaatggtattttcccgtttgaggtcttggtagnnnnnnnnnnnnnnnnaaacatggtgccacttttaattaactaaatgttacaaaattctcagcatttgtttttgtctggtagtattattgagtcttttcatacacttcttaaaatgtgaaaatctatgttttcagtattatgacagtatctgcagatactataataatatgctttggccaaatttgctgtttatagagtgaaccaagatgtcagttttgtattggggatatgttttacataaatagaactcatttaaaagtatggttcaagtactgctcttctttttatggggaaattgatttttaaggagcgattcttttcctatataaaagctattgaggcttagctttattcatacatgagtgatttggttataactcaatcaaaatttttatctttaaatctgagacaagtattatatttaaaactagatctattaatacattcatcactgcctgaaaatttgctgttctaatgtttgtgaattttcactcattacctagagtaaacttattgcatattttcataatcagtcnnnnnnnnnnnnnnnnnnnnnnnnnnnnnnnnttagttcccaagtaaatatatcagtgtttcctgtgtttgggcagaagtgcaaagtagttttaatttctcacgttgtagaaaaagaggccaaaaaggtcaccttagtttatttttccaaaacataactttaggtattctaatgtattttgttagttgcttagaaatggaaataaaatatatgtgcttattaaataatgcacagtacactagattatagagtttatttttgcttttatgctttaaagaatgcatgcccaaaacactactaccaacaagaggattttttaaaatcacagaattgatatttatctcaagactatcttaagctaatgtacttctgttacataattaaactatttctgctattatttttaaagcagtattattttataaccaattctaaaattcagctttaaaaatattgaacataccttcctaccacttacgcttcaagtttcatttattgaataccagggtcatatcttaaattgtatataaaacacatgtaacccattcatgaaaa

SEQ ID NO: 188882 - DNA, 891 bp, Homo Sapiens
actttgtacaaaaaagttggagatttaatatctaggggctgggtatccccacatcactcatttggggggtcaagggacccgggcaatatagtattctgctcagtgtctggagatcatctacccaggctggggcttctgggacaggcgaggacccacggaccctggaagagctggtccaggggactgaactcccggcatctttacagagcagagcatgatcacattcctgccgctgctgctggggctcagcctgggctgcacaggagcaggtggcttcgtggcccatgtggaaagcacctgtctgttggatgatgctgggactccaaaggatttcacatactgcatctccttcaacaaggatctgctgacctgctgggatccagaggagaataagatggccccttgcgaatttggggtgctgaatagcttggcgaatgtcctctcacagcacctcaaccaaaaagacaccctgatgcagcgcttgcgcaatgggcttcagaattgtgccacacacacccagcccttctggggatcactgaccaacaggacacggccaccatctgtgcaagtagccaaaaccactccttttaacacgagggagcctgtgatgctggcctgctatgtgtggggcttctatccagcagaagtgactatcacgtggaggaagaacgggaagcttgtcatgcctcacagcagtgcgcacaagactgcccagcccaatggagactggacataccagaccctctcccatttagccttaaccccctcttacggggacacttacacctgtgtggtagagcacattggggctcctgagcccatccttcgggactggagtaagtgtatggcagatggatggaattagggtcaagcagagaaaatgagatgtgg

SEQ ID NO: 188883 - DNA, 1806 bp, Homo Sapiens
ttgggtcaccactttcccctctccgtctcctgcgggcgcaatggaggaggaggatgaggaagcgcgggcgctcctggcaggcggccctgacgaggccgacagaggtgccccggccgcccctggagccctgccggccctctgcgaccccagtcgcctggcgcaccggcttttggtgctgttactgatgtgcttccttggctttggcagctatttttgctatgataatcctgctgcccttcagactcaagttaaacgagatatgcaagtgaataccacgaaattcatgctgctgtatgcctggtattcttggcccaatgtagttttgtgtttctttggtggctttttgatagaccgagtatttggaatacgatggggcacaatcatttttagctgctttgtttgcattggacaggttgtttttgccctgggtggaatatttaatgctttttggctgatggaatttggaagatttgtatttgggattggtggcgagtccttagcagttgcccagaatacatatgctgtgagctggtttaaaggcaaagaattaaacctggtgtttggacttcaacttagcatggctagaattggaagtacagtaaacatgaacctcatgggatggctgtattctaagattgaagctttgttaggttctgctggtcacacaaccctcgggatcacacttatgattgggggtataacgtgtattctttcactaatctgtgccttggctcttgcctacttggatcagagagcagagagaatccttcataaagaacaaggaaaaacaggtgaagttattaaattaactgatgtaaaggacttctccttacccctgtggcttatatttatcatctgtgtctgctattatgttgctgtgttcccttttattggacttgggaaagttttctttacagagaaatttggattttcttcccaggcagcaagtgcaattaacagtgttgtatatgtcatatcagctcccatgtccccggtgtttgggctcctggtggataaaacagggaagaacatcatctgggttctttgcgcagtagcagccactcttgtgtcccacatgatgctggcctttacgatgtggaacccttggattgctatgtgtcttctgggactctcctactcattgcttgcctgtgcattgtggccaatggtggcatttgtagttcctgaacatcagctgggaactgcatatggcttcatgcagtccattcagaatcttgggttggccatcatttccatcattgctggtatgatactggattctcgggggtatttgtttttggaagtgttcttcattgcctgtgtttctttgtcacttttatctgtggtcttactctatttggtgaatcgtgcccagggtgggaacctaaattattctgcaagacaaagggaagaaataaaattttcccatactgaatgagaagttaaaatgaatgtgtcatgagaatgggcttaacacatcgttggtttgaaaacttccatttttaaaaatttagagttttagtcattagaaaaaataatggactggaaagttatatttatatccaaatatacctatttcaagtgtatttgtgaggcctgttttagcctgtgtcttttgtattgtgtgttgctaaagaattctacttttaggagctaatcaacaatgaaagggttagaaaattgctgtggaacatccaggtgacttcagaaagacagtgaaaatggaaaacgttggagcttctgttgagataatcttcataaggtatatatcttaggatacagccttttctttatcctaatagcagg

SEQ ID NO: 188884 - DNA, 1040 bp, Homo Sapiens
ttggataaaaatatgcaagaatcacaggaaacccacatatccaaccacctagatgaagttgttgctgctgttagcatcactcatagaaagaagttccaaaacaagctgcttcagacagcactattccagcctcctcgagagaaactccacctctgtgaagagaaagcaaagtcctattccaacagtcatgagtacaaacaggccgtccatgagcttgtgcgttgcgtagcactgacaagaatttgctatggagactcacattggaaactagcagaggcacatgttaatctggctcaaggctacctccagctgaaaggactgtcactgcaagcaaaacaacatgcagaaaaagccagacaaatcctcgccaactccattgtgcctccctatagtgagaatacagatgttttcaagttttccattgagcttttccataccatgggcagagctttactctcccttcaaaaatttaaggaagctgcagagaatttgacaaaagcagagagactttcaaaggagctgctacaatgtggaagaattataaaggaagaatggatagaaattgaagcacggatcagattatcatttgcacaggtgtatcaaggtcagaagaagtcaaaagaagctttgtcccactatcaagcagctttggaatatgttgagatcagtaaaggtgaaacaagtcgtgagtgtgtacccatattgagagaattagcaggtgtagagcaagccctgggactccacgatgtatccatcaaccacttcctccaggcacatctcatcatcctgagtagaagcccctctcaagtggaggcagcagactcggcacacatcgtcgcccatgctgctgtcgcttcagggagacacgagcaccatgatgtagctgagcagtattttcaagagagcatggctcatcttaaggattctgaagggatgggaagaaccaaatttctttcaattcaagatgaattttgccattttctacaaatgactggacaaaaagagagagcaacctcgatcctgagagagtccctggaagc

SEQ ID NO: 188885 - DNA, 1280 bp, Homo Sapiens
ttggctttgaaggagacaaagacaccagcagcttccaggaagggacagtgtttgaagtccgggagaagaacagcagtggctggtggttctgccaggtcctgagcggagccccttcctgggaagggtggattccttccaactatctcagaaagaagccgtagccgactccctttctgcctagagggcccgctggtccttgctggctttacccacgtatttaatacgcctcttaatttatcattctccacgcagcttccaaggcagacagactctggggtactgtgacttcttgcctcccatgggtggagagtgagtttcggacacctcgggcgcccctgggcctgatccctcctatcacagcatcactggaggctcagaacccacagcctttgctttctgtccatgtcagcatccctgccttaagagaactcctcctggccaatggcattgccacccagcagtgggaccaagactctccaagacctccaggactggatcccattgcctggagaaactccagcaagggtctctcatggcttggacatggcacagtaaggggcagccaacccagtccatgatgacttttgctccaacttcttcatgtttctaaaagcccagtggctttattcactcctcctaaattgcctgctaccagaaggaacttcatcctgaagaaatgcattccattaccagttccagggaaagtgtccccttccccaaagcctcaggcccgtgggcctctgaggttccactggatgcggctcccccaggagtgggcctggagatccgctcagccgccctgcctcccaccttctatcttgggaccgtggtcagccctgaagggtggttccagccccgcgtatgctgcactttgctgctgcaggctccggtccctccagggcttttcaatgagagttcccaccccaacttggagcatttcatttttgcctacctaaagcaagaatctcaaagtttgtttgaataagaggcccattcacaagtcgtgcccttgtgagcacccctttgctgagtgcctcgtgggtgccaaacactgtacttggcgctttgcattcatgctttgaccctcacaacctccctttatagatgaggaaattcacgctccatgtgcccaaggacacaccagccaggaggaagagggaagaggatttgagtccaggcctgcctgacttcagtgcctgtgccctcccctctgtaaaagacaaaccaggcagggaagagatagaagctggctaagtggtggccaagtggcttcattgtga

SEQ ID NO: 188886 - DNA, 1558 bp, Homo Sapiens
  misc_feature (299)..(336): n is a, c, g, or t
ttggcaaagactcagatgaagaggaagagaaaagccaagagagggaagaaactgaaagcaaatgtgactctgaaggagaggaagatgaggaagacatggaaccctgcctaacaggaaccaaagtgaaagtaaaatatggacgagggaagactcagaaaatttatgaagccagtattaaaagcactgaaattgatgacggagaagttttatatttggtacattactatggatggaatgtcaggtatgatgagtgggtgaaggctgacaggataatctggcctttggacaaaggtggaccnnnnnnnnnnnnnnnnnnnnnnnnnnnnnnnnnnnnnnatagtgaaaaggacgaaaagagagatgaggagaggcagaagtcaaaacggggacgacctcctttaaaatcaaccctctcatcaaacatgccgtatggcttatctaagacagcaaacagtgaaggaaaatcagactcttgttcatctgatagtgaaacagaagatgctttagaaaagaatttaataaatgaagaactttctcttaaagatgaactagaaaaaaatgaaaatttgaatgatgataagctagatgaagaaaatccaaagatttctgcacatatattaaaagaaaatgataggactcaaatgcagcctttagaaaccctgaagttagaagttggagagaatgaacaaatagtacagatttttgggaacaaaatggaaaaaacagaagaagttaagaaagaagccgaaaaatctccaaaaggaaagggaagacgaagcaagacaaaagatctttctttagaaattataaagatttcatcatttggccagaatgaagcaggaagtgaacctcatatagaagctcatagtcttgaattgtcttcattagacaataaaaacttttcttctgctacagaagatgaaattgaccaatgtgtgaaagaaaagaagttgaaacggaaaatactaggacaatcatcgccagagaaaaaaataagaattgagaatggaatggaaatgacaaatactgtatctcaagaaaggaccagtgattgtattggatctgagggaatgaaaaacttaaattttgaacagcactttgaaagagaaaatgaaggaatgccatcattgatagcagagtcaaaccaatgcatccaacaactgactagtgaaagatttgatagtccagctgaagaaactgtaaatattccactaaaagaagatgaggatgcaatgcctctgatcgggcctgaaaccttggtttgccatgaagtagatttggatgatttggatgaaaaggataagaccagcattgaggatgtagcagttgaaagctctgagtctaactctcttgtttctattccacctgccctacctcctgtagtccaacataacttttcagtagcttcaccacttactcttagtcaagatgagtctcgaagcgtaaaaagtgagagtgatataacgattgaagttgatagtattgctgaagaatctcaagaatgtctctgtgagagggaatcggcaaatggatttgaaactaatgttgcctctggtac

SEQ ID NO: 188887 - DNA, 1867 bp, Homo Sapiens
ttggcgcgcgggcggcctgctgggcgggctgaagggttagcggagcacgggcaaggcggagagtgacggagtcggcgagcccccgcggcgacaggttctctacttaaaagacaatgactactgatgaaggtgccaagaacaatgaagaaagccccacagccactgttgctgagcagggagaggatattacctccaaaaaagacaggggagtattaaagattgtcaaaagagtggggaatggtgaggaaacgccgatgattggagacaaagtttatgtccattacaaaggaaaattgtcaaatggaaagaagtttgattccagtcatgatagaaatgaaccatttgtctttagtcttggcaaaggccaagtcatcaaggcatgggacattggggtggctaccatgaagaaaggagagatatgccatttactgtgcaaaccagaatatgcatatggctcggctggcagtctccctaaaattccctcgaatgcaactctcttttttgagattgagctccttgatttcaaaggagaggatttatttgaagatggaggcattatccggagaaccaaacggaaaggagagggatattcaaatccaaacgaaggagcaacagtagaaatccacctggaaggccgctgtggtggaaggatgtttgactgcagagatgtggcattcactgtgggcgaaggagaagaccacgacattccaattggaattgacaaagctctggagaaaatgcagcgggaagaacaatgtattttatatcttggaccaagatatggttttggagaggcagggaagcctaaatttggcattgaacctaatgctgagcttatatatgaagttacacttaagagcttcgaaaaggccaaagaatcctgggagatggataccaaagaaaaattggagcaggctgccattgtcaaagagaagggaaccgtatacttcaagggaggcaaatacatgcaggcggtgattcagtatgggaagatagtgtcctggttagagatggaatatggtttatcagaaaaggaatcgaaagcttctgaatcatttctccttgctgcctttctgaacctggccatgtgctacctgaagcttagagaatacaccaaagctgttgaatgctgtgacaaggcccttggactggacagtgccaatgagaaaggcttgtataggaggggtgaagcccagctgctcatgaacgagtttgagtcagccaagggtgactttgagaaagtgctggaagtaaacccccagaataaggctgcaagactgcagatctccatgtgccagaaaaaggccaaggagcacaacgagcgggaccgcaggatatacgccaacatgttcaagaagtttgcagagcaggatgccaaggaagaggccaataaagcaatgggcaagaagacttcagaaggggtcactaatgaaaaaggaacagacagtcaagcaatggaagaagagaaacctgagggccacgtatgacgccacgccaaggagggaagagtcccagtgaactcggcccctcctcaatgggctttcccccaactcaggacagaacagtgtttaatgtaaagtttgttatagtctatgtgattctggaagcaaatggcaaaaccagtagcttcccaaaaacagcccccctgctgctgcccggagggttcactgaggggtggcacgggaccactccaggtggaacaaacagaaatgactgtggtgtggagggagtgagccagcagcttaagtccagctcatttcagtttctatcaaccttcaagtatccaattcaagtccctggagatcatcctaacaatgtggggctgttaattttacctttgaactttcatagcactgcagaaaccttt

SEQ ID NO: 188888 - DNA, 1386 bp, Homo Sapiens
  misc_feature (555)..(637): n is a, c, g, or t
ttggcaaatctctggggtctcctctgaagtgctctgagggattcaccagaaacctgtccctgagactaactgcctgtctgcttgtcggattcaggcacactatccttcacttggttagggtggtatctcaggaaagcctggaattactcagcacacgtgatgaacacctccttatgggccagaaattttgagatacagttgtacttgttctcacaccacctaaggtcttctagaggagatcagacattgacctgtggaaaattaaggagaaattcaagtaatggaagataagttcagagaattgatacgggtgatactttggttggtcttctatgccttatcttattctaggaaagatcaccagaagccttagagcatgatggcctcataggagttttatagccttcatgctgcctttcctacctgtggccctgaatgttcctgtctcccctcctgtgttcaagcgattttcctgtctcagccacctgagtagtggggattacaggtgtacaccaccacacctggctgatttttgtatttttagtagagacaggnnnnnnnnnnnnnnnnnnnnnnnnnnnnnnnnnnnnnnnnnnnnnnnnnnnnnnnnnnnnnnnnnnnnnnnnnnnnnnnnnnntgagccactgtgcctggctgagttttcttaaagtgagcttaatttctgaactcttagtgattcatatatgtacataaatctgtgatcccatttcttattgcaccattcaggaacactttatataaatgagtggctttttatttcatattattagtagtatcatggttccattacaggcctattaacatcatacattgtcattagtctttgaagaaaaaatatgtaaatatatatgtgtaacatgagaatttctctctaaagcagggcttaaaattttttggaaaagtttgacaaagcataccacatgaattcagatttacctcaatgctaagaattatgtttagttaggaaaaaggaaagtcattttgacctcaggtagaaaaatagattgctttgagttttatgtagctttagactttaaaaagttagaatttattctgtaactaaaaattatttgaaaaaattatgcctctggtttaattattggtgattacacactctttctcttacccttgtgtattgaactatgtccataatcaagttgatgtggatcctgaaaagtgttatgaacatctgattggtatttgtcacatttattttaaaattagcatctgaacacttcaaagctgtcagtgtgtattggtttcaccaataaccactgcttgatcccttacaattaaattttttaactaactaatggtattgttctttcaaataggtaacatgtttctatgactgttatttggggg

SEQ ID NO: 188889 - DNA, 1052 bp, Homo Sapiens
  misc_feature (931)..(970): n is a, c, g, or t
ttggctaatggctggattttgccctcttcttgtggagtataccatggtgaaaatatatcaaaacagttacacctgggaactttctcctcatttgtatttccttgctcctggacaacaaccacatgaccctctcactcaactactgatcatcaataaaacaggggcaagcattgatgactttatacagtctgtggagcaccagaacatagctttagaagtggatgcatttggaactagaaatggcacagatgacccatcttataatggagccatcacagtgtgttgtaatgaaaagaattacagcttttcgttagcatgcaatgccaaaagattgaattgcttcccagttcttatggacattgttagtaatgggctacttggaatggttaaaccatcagtacatatccgaactgaaagaagtacatttttggagaatggacaggacaatccaatcggattcctggcatatatcatgttctggctggttttaacatcgagttgcccaccttacattgccatgagcagcatcgatgattataagaacagagctcggtcccagctacggatttccggactctccccttctgcttactggtttgggcaggcgctggtggatgtttccctgtacttcttggtcttcgtttttatatatttaatgagctacatttcaaacttcgaagacatgctacttacaataattcatattattcaaatcccatgtgctgttggttattccttttccctcatcttcatgacatacgtgatttccttcatctttcgcaaggggagaaaaaatagtggcatttggtcattttgtttctatgttgtcactgtattctctgtggctggatttgcgttcagtatcttcgaaagtgatattccatttatcttcacttttttaataccacctgccacaatgattggctgtttnnnnnnnnnnnnnnnnnnnnnnnnnnnnnnnnnnnnnnnngaagaacgaatggatgtacagccatttctggtattcctaattcctttccttcattttatcatttttcttttactcttcgatg

SEQ ID NO: 188890 - DNA, 1211 bp, Homo Sapiens
  misc_feature (113)..(122): n is a, c, g, or t
ttggctgaaaacttaactgtggcctttatgaggccagaaaagtgaactgagttttcgtagttaagacctcaaatgaggggagtcagcagtgatcatgggggaaatgtttacannnnnnnnnncttcagaagtaacgctttctgatgattttatctgatatttaaaacagggagctatggtgcactctagtttatacttgcgctctgaaatgtgtaaacatagggtgcctacctatttcacctgacccatactcgtttctgattcagaatcagtgtgggctcctgcagtgggcgcgggtcacggctgactccaacttccaatacaacagccatcactagcacagtgtttttttgtttaaccaacgtagttgtattagtagttctataaagagaactgcttttaacattagggactgggagcagtccatgggataaaaaggaaagtgttttctcacgagaaaacatgtcaggaaaaataaagaacactttctacctctgtttcagatttttgaaacacttattttaaaccaaattttaatttctgtgtccaaaataagttttaaggacatctgttcttccatacgaaataggttaggctgcctatttctcactgagctcatggaatggttctgcttatgatactctgcacgctgccttttagtgagtgaggagtttggggttgcctagcaacttgctaacttgtaaaaagtcatctttccctcacagaaagaaacgaaagaaagcaaagcaaagtcagtgaaagacaatctttatagtttcaggagtaaatctaaatgtggcttttgtcaagcacttagatggatataaatgcagcaacttgttttaaaaaaatgcacaatttacttcccaaaaagttgttacttgccttttcaagttgttgacaaacacacatttgatattctcttatatgttatagtaatgtaacgtataaactcaagcctttttattctttgtgattaaatcctgttttaaaatgtcacaaaacaggaaccagcattctaattagatttactatatcaagatatggttcaaataggactactagagttcattgaacactaaaactatgaaacaattactttttatattaaaagaccatggatttaacttatggaaatccaaatgcaggatagtatttttgtttactttttaaccaactgaatttttgaaagactattgcagtgtttaaaa

SEQ ID NO: 188891 - DNA, 1059 bp, Homo Sapiens
tccattatacataggagcgcacatgagtggaacccgtacctgctacagaacccgctgtctggcacgctgttcagcaggcatgcactctctctgactgtattaataccataaaccaaagatttcaaagcaaactggagattcatcccaaaagttaccagctttaggaaaggagggtggtcctgtgagacactgagccgtcttctctccgatctgatgctgggtggatcttcatcagtttgggcgttgcctcttctctgtgctctgggtatttgtgaatgcagtttcctagtcttgaaagccttggaagtaatgtcaggtcctcgccaaaatcatccctgtgtctccaaagcacatgtatcgccagggctgttcctcagcctcctcctctcacagagctatagctgctcactctttcttgtattttccccctaggtgccctggcctccaagagcaagaagccatgtgttcagtacctgccccccgagaagccctgtgacagccctgcctcctcccacgggagcatgctggactccccggccactccctctgcagctttggcctcaccagctgcccctgctgccacccattcggagcaagcccagcccctctccctcaccaccaaaccagaaacccgggcccagctggctctccactctgccgccttcctgtcggctaaggctgcagcctcctcctctgggcagatgggcagccagcctcccctcctgtcccggcccctcccccttgggtccatgcccacagctctgctggcctctcccccgtccttccccgccacgctccatgcccaccaggccctcccggtgctacaggcccagcctctttccctggtcaccaagtctgcccactaaagctccccccgacccctgcaggctgtcacatgactcattgagtagtaatgattcagaagaaaaagaaaaaggagactttatttggtcaatatttgaccactctggactgtttctgtaaagtggctggtacaaacagcactttacagtttgtagatgtaaccagtagctgatcttaaaggcttttttaaaaaac

SEQ ID NO: 188892 - DNA, 1718 bp, Homo Sapiens
ttggaaagtttttaggaatcgctcagcccttacgaaacatgaacggactcacactggaataaaaccctatgaatgtaataaatgtggaaaagccttcagctggaattctcatcttattgtacataagagaattcatacaggagaaaaaccttatgtttgtaatgagtgtgggaaatctttcaactggaactctcatcttattggacatcagaggactcatacaggagagaaaccttttgaatgtactgaatgtgggaaatcattcagctggagctcccatcttattgcccatatgagaatgcatactggagagaaaccctttaaatgtgatgaatgtgaaaaagcttttagggactactcagcccttagtaaacatgaaagaactcattctggagcaaaaccatataaatgtactgaatgtggaaaatccttcagctggagctcccatcttattgcccatcagagaactcacacgggagagaaaccatataactgtcaggaatgtggcaaagcattcagagaacgctcagccctcactaaacatgagataattcattctggaattaagccctatgaatggaataaatgtggaaaatcctgtagccagatggctcaccttgttagacatcaaaggactcatactggagaaaaaccctatgaatgcaataaatgtggaaaatccttcagtcagagctgtcaccttgttgctcatcggagaattcacactggtgagaaaccctataaatgtaatcagtgtgaaagatcctttaactgtagttctcacctcattgcacaccggagaactcatactggagagaaaccatacaggtgtaatgaatgtgggaaagcatttaatgagagttcatcccttattgtacacctaagaaaccatactggagaaaagccctacaaatgtaatcattgtgaaaaagcattttgtaagaattcttcccttattattcatcagagaatgcatagtggagagaaacgctttatatgcagtgaatgtggaaaagcctttagtggtcactcagccctacttcaacaccagagaaatcacagtgaagagaaactgaattgaatttatgcgagtttttcgtttcttgtacatttgacaacacattgaggaaaaccctataaacataatcaagaggggacatttttcattaagagttcagtaagacttctcccacattatttactagaaaatatcatcttagaagaaaccccatgaaggaaaagaatagggaaaagctttcagcagttatttagcccttactcaaaatcagataattaacaatgaaggaaactctaaactccccttatggtctaccagtaattcatacttgaggaccatgactgtggggaatgaggcatcttttagcaagagctctcaccaattgtagattggtgtgaattgctaagggaaaaaccttatgcagagaaaagtttttgactggaaatacactgttttgcatcaagctggagtactggatggaaaactctacaataacattttgtgcataattgtagaaatacagattttgttgttataaggggaggggtctgggtgcccaggagtagaatatgaagtgctaaatctgaatgtaagaaaaataatagtattgaatggggtatttactgttgattaacctccttagagaaaattaatgaatgagatgactaaccggtagaaaagttattgcctacgagtgtga

SEQ ID NO: 188893 - DNA, 1047 bp, Homo Sapiens
  misc_feature (479)..(769): n is a, c, g, or t
  misc_feature (773)..(801): n is a, c, g, or t
ttgggcaagttattccagaggaagaagcagcccttgaaatgttaaggcttaggcttgaaaggtgaagagcaggaattctctctttcaaatcctagagcataaacccatgtgtggccaagtgagatcagccctcaagggcacatgccaagggcagagcagcccatgtagacagcttcggagggcatgggggtgtagggagttcggggtagctcctcattaactatttgttgggtgagtaaaggggtgaggctcagtggcaggtacctctgcaatgacaagctgcctcccctctatgtgtttagcatatgttattagaacatgtccgacacccctaccgctgccatttgggccctttaataaagccaagtagagaaatctggcaataaaaggcaaatgtaagcatgctttctttaagacgcatcataaatggttttctttaagtgaatggaagagtttgacagagatacacctttgtaagnnnnnnnnnnnnnnnnnnnnnnnnnnnnnnnnnnnnnnnnnnnnnnnnnnnnnnnnnnnnnnnnnnnnnnnnnnnnnnnnnnnnnnnnnnnnnnnnnnnnnnnnnnnnnnnnnnnnnnnnnnnnnnnnnnnnnnnnnnnnnnnnnnnnnnnnnnnnnnnnnnnnnnnnnnnnnnnnnnnnnnnnnnnnnnnnnnnnnnnnnnnnnnnnnnnnnnnnnnnnnnnnnnnnnnnnnnnnnnnnnnnnnnnnnnnnnnnnnnnnnnnnnnnnnnnnnnnnnnnnnnnnnnnnnnnctcnnnnnnnnnnnnnnnnnnnnnnnnnnnnngagaatgctaatcatttctgggttcactgcgactcactgtagtgctggggatcccccttgtaacactggaactgaaagacagtgatgaaagctatgtcaagcattcattattctgaagaggaggagaaatgccacatacctttcccatgggacctgtggtggaatgaatccatacttctgcctcacttcgagcagacttttgttctcggcgctcctcacgatggagtttcatgcttcattttcaca

SEQ ID NO: 188894 - DNA, 2068 bp, Homo Sapiens
ttgggtgatcaatttttttaagtggctgtcagagtggcttagtatgtgtttggcgcattcctcaagatactacacagaccaatgtgactagtgcagaaggatggtgggaccaggaatcaaattgccaggatggatataggaaatcatcaggagccaagtgtgtttatcagctgcggggacacatcactcctgttcggactgttgcctttagttctgatgggttggccctggtgtctggtggactaggtgggctcatgaacatttggtctttaagggatggctctgtcttgcaaactgttgtgataggctctggagctattcagaccacagtatggattccagaagttggagtagctgcttgctcaaatagatcaaaggatgttttggtcgtgaattgtacagcagaatgggcagctgccaatcatgttttggcaacctgtaggacagcattgaaacagcagggtgttctgggattgaacatggctccctgcatgagagcatttttggagcggctccccatgatgcttcaggagcagtatgcctatgaaaagcctcatgtggtttgtggtgaccaacttgttcatagcccctatatgcaatgcttggcttcccttgctgtgggacttcatctggatcagctgttgtgtaaccctccagtgccaccacaccaccagaactgtctgcctgaccctgcatcctggaatccaaatgaatgggcctggttagaatgtttctcaaccactataaaagctgccgaagccctgaccaatggagcccagtttccagaatcttttaccgttccagatctagaacctgttccagaggatgaacttgtatttctaatggataacagtaaatggattaacggcatggatgaacaaattatgtcttgggcaacttccagacctgaggactggcacctgggaggtaaatgtgatgtctacttatggggtgctggtaggcatggacagctggcagaagctggaagaaatgtaatggtacctgcagcagctccctcattctcacaggcccaacaggtcatttgtggtcagaattgtacctttgtcatccaggccaatggcacagtgttggcttgtggggaaggaagttatggcagattaggacaaggaaattcagatgaccttcatgtgctgacagttatttcagccttacaaggctttgtggtgacccagctggtgacttcctgtggttctgatgggcactctatggccctaactgaaagtggtgaggtctttagctggggagatggtgactatggtaaacttggccatgggaacagcgacaggcagcggcggcccaggcagatcgaggccttacaaggagaagaagtggtgcagatgtcttgtggcttcaagcactcagcagtggtcacttcagatggcaaactgttcacctttgggaatggtgactatggtcgtctgggtcttggaaatacctctaacaaaaaacttccagagagagtgactgcactggagggatatcagattggacaggtggcctgtggattaaaccacactttggcagtgtcagcagatggttccatggtgtgggcttttggagatggagactatggaaaactaggcttaggaaattccactgcaaaatcttcacctcagaaaattgacgtcctttgtggaattggaataaaaaaggttgcttgtggaactcagttttctgttgctttgaccaaagatggtcatgtgtatacctttggtcaagatcgcctgataggcttgccagaggggcgtgctcgcaatcacaatcgaccgcaacaaatccctgtcctggctggagtaatcattgaagatgtggcagttggagctgaacacacacttgctttggcatcaaatggagatgtgtatgcctgggggagcaattcagaaaggcagctcggcttaggccataccaaccatgttcgagaaccaaccctggtaacaggtctgcaagggaaaaatgttcggcagatctcggctggccgctgccacagtgctgcatggacagcaccacctgtcccatcaagagcaccaggtgtgtcagtacctctgca

SEQ ID NO: 188895 - DNA, 945 bp, Homo Sapiens
ttggcaaagatggcggcggctgcgggtagctgcgcgcgggtggcggcctggggcggaaaactgcgacgggggctcgctgtcagccgacaggctgtgcggagtcccggccccttggcagcggcagtggccggcgcggccctggcaggagcaggagcggcctggcaccacagccgcgtcagtgttgcggcgcgggatggcagttttacagtctccgcacagaaaaatgttgaacatggaataatatatattgggaaaccgtctcttcgtaagcagcgcttcatgcagttttcttcactcgaacatgaaggagaatattatatgacaccacgagacttcctcttctcagtgatgtttgagcaaatggaacgtaaaacttcagtcaagaagctgacaaaaaaggacatcgaggatacactgtcagggatccaaacagctggctgtggatcaacttttttcagagaccttggcgataaagggctaatttcatataccgagtatcttttcttgcttacaatcctcactaaaccccattctggatttcatgttgcttttaaaatgctggatacagatggtaatgagatgattgaaaaaagggaattttttaagctgcagaagatcataagtaaacaagatgacttgatgacagtgaaaactaatgaaactggatatcaggaagcaatagtgaaagaacctgaaattaacacaactcttcagatgcgtttctttggaaaaagaggacaaagaaaacttcattataaagaatttcgaagatttatggaaaatttacaaacagagattcaagaaatggaattccttcagttttctaaagggtttgagtttcatgagaaaagaagactttgcagagtggctactttttttcactaacactgaaaataaagatatttattgtaaaatgtgagagagagttgtcagcagagagagcat

SEQ ID NO: 188896 - DNA, 1062 bp, Homo Sapiens
  misc_feature (417)..(439): n is a, c, g, or t
  misc_feature (737)..(754): n is a, c, g, or t
  misc_feature (922)..(941): n is a, c, g, or t
cttagttcgaatccacttcctttattgcagtaacctctgtacaaagcagcaactgcaatactcaaggttaaaacattagaaaagcatttgtgtgacaggtatattacagtattatcaaaatattacattttcagacttacttagcagataatcatccaccagagcttaaatctttaaattatttccatagtcttaaaaaatatgtaatgtcagaatgcatataaaaagaatgtaaaaggaaacctaaaatacaaatggaataatgtaacaaataaatatttgatttcagtaactgttaataatcagctcaacaccaccattctctctaaactcaatttaattcttataggaataatgaactgtcaaatgccatggcataattatttatttccaagctatcatcaatgattagaactnnnnnnnnnnnnnnnnnnnnnnntcacaattcagcataaataaagctatttttagcttcaacactagctagcatctctaagaattgttgaaataagtactataaccttgaaaattttcgacctggtgtctagtgttaagtgaaagtaatgcattttttttaagtgaaaagcttcttacattatttcacagacagtattacccaccccacattatgaatagttagatatattttatgtactttatacccacatgtatgacgcatgacatttggttcctgtagtacagatcacaatgttgttttcctgaatgggaaaaacttnnnnnnnnnnnnnnnnnnggtaagtgtacctgtgcacatttcaagatagcagcactcagtccatgccctattatccatcttaaaagttcacacattattgtttactgaataatatttctactgtctttacccccaaacattgcaaaacctgcaatggaacaatgctgtgagttataatgtagaaannnnnnnnnnnnnnnnnnnnagaaaatcagttacttcattttcttaatattctgaattcaagttatcagatctctatacctaggtcatactcatgaagcaaaaatgctgcacaccactgaaaataataacgttatagatgt

SEQ ID NO: 188897 - DNA, 1403 bp, Homo Sapiens
  misc_feature (41)..(50): n is a, c, g, or t
ttgggtggatcagaataaaggttattctaactgtggggagnnnnnnnnnnttgtatcaagttccacaggtagcagacacttcacttccaagtaaaagatgagaaatcaattattcccacaggattttaggtcagggagcaaaaatctcagaacttgaccatgaagatacacaacagactcgcaaaaataaagtgggaaatgaagttcagattcccttctgtagatttccttaaaactattatttttttcttcttcgtaaaattttgataatctgttctcttaaaaaagttaatgacacaattaagatactgacatcaaattgttgccttttaccaaaatgcaaattttatgaagtgcctacctttatatgtataaagcatttaataaataattctaatgtgccatattttgctgtgagtgaccttaacatttatatttttatatgaattgtttcatgtatttataaaaattgtatattgaacattggaaatagatgattagatttttgtgtcattttacaattaaatctaaaatgcttaatccaatatcatcatcaaaattcagtgaaatcccaaaacagtgccaagaattttgctgaatgaaacaatcaaacaaagcattttaaggtgtaagttatagtacctgtacttgcagataagaagcttactatatcattattataagtagcatatattactttcaaatacctatattagaaagatattgatctgactgaaatataacctacctgccagtaaggtccaaaggctgaatttgttttgaatgagttccttgatctttaagcactgatgattttcttatatatgaggatgcaaagcattcaagagtttcagcctgttctggtgaggggctccctgacttacataaagttttcagtgcaattttaatagtacatatgctttaatttatttttcttctgcgtgtggtcagacccaattacactgtggctaagactctcaaagtgccagggtttctgtgatgattctgagaatgctgaatacaaatataccttatattctttaaggaaaacggaaaggaaagatcagcagaaatagggttttctcatcttcaccatcaataaacatttattgcgtacctcctatattctgcaaattttccccaaatagaagccagttcagtccacaccatctcttctttgagttgtttatggcctcccttaaggcattttacaaacccataagcctacaatagatgaatatatttactatttgtattaagtgtcataatagcatcaatgtgcacattaccaatatagactgttggagttccactgattgtttttcatacatgatgcttcttggggaaaaatagtataggatgtgaaagttttgaaattacggttattaaaaactaacattttg

SEQ ID NO: 188898 - DNA, 2499 bp, Homo Sapiens
  misc_feature (1889)..(1920): n is a, c, g, or t
ttggctcacattgatcagggagggagggaaagagctaaagagggtcacacaagtggctattttccctgcagtgtttctgtgtggtgaaaataacccagtccactaaggggcgggagtgaatggatggctggattttccccaagctccttatagcctaatgttgtcaggatgtgagtatgaggaatttagcctcttatagtgaaatgagtccaactctgggctttgcttagaggagagctcctgtcaggcttcctataatatgaaaagaagtcaccattggggaactagagaccccagaccttttcatatggatatttgagaatgtaatgcatctcaggcctcgtgctggaactctagggcactctaggcaggctcagaacacttgatattcctgacagctacacacctgacatgcaggtacatacctgatcggtgtcatctcctaacaaggattttcagttcctcgggagagcaataatctttgtaggaaagacatccctgcaataggtgatatgtggtccttagaagttttattcctttactacttggaagaaaagttctttggtgattcttctctgcttttgaagatgatcaaaagcatcttcattgattttctgaaacgaaagccttgtctgaaaccaattaatacttgggaaacagctgggcttggaggagtagaatgccagagataaatccatggctcctgctctggctctcttctgcagaaatgagggcaacagtgaggccacttccctggcaaatgtgcagctcaggatagggaagcataagaccctctgtttaaaagagagtcaagtaggtaaccaaagccaagctctgtgcaaggtgctttggagttgtaaattgaggagtgcatccttgctgtcttgaaccattctgtttgcaatggtgagaccttacataacctagccttgcagggccgccacacaaccctggagtcctagagttggaggaacctttgtatccatctgacttctcattttgcagaatatgatgagaaagtagaggatcgctctgttcaccactcttgctattccattagtggggagatgcctgctagcatgtgtgaggggaacactctgatacactgggaagtatcggaaattcccagaaacacaaacataaaataactctcctagacccaggtactggggactgtctcagtccgtgtggcatgataaataaaaggttaggatcaagtctttgtatttttcaagatgtggtagctgattattcctgttttaagtactctgaaattgatctgtgatcaataatactaatatgttatcttttaccgtattctgcctctcactattgattttaattagttaggagtatttgagctgttatttcttgagcttaatatttttttagagttaactctttaaggagataatcatggctgtagacaaggccagggctggctgacgtgccttagaaggtttgaatgcaataaagcggtgtttggcgttctcctgcattgtagtgcgggtacaaaatgctatttgttcgtcatactgttgtcagcagatgagccgcccactacagacggctactgcccagggacctgcccaggccccacccaagggctcccaagggttgagatttctgcagacctatagccagcacacttagtcctgccctatatagagttcctcttcgggaagcttttgataaggaattctcagaccgataggatgtctgtctgggctttgctgcgggacagtctaactgtgggggctaggggaaagcatgagagtatcgatcaaagagtaagccacacacggataatcagttactagggatggaggtgtgagggttcattatattattcattttactgttgtatatgtttgaaaatgtctataatnnnnnnnnnnnnnnnnnnnnnnnnnnnnnnnntagttcaggccagcaatgggccctccatgttcagtggattttatccttgtttcaattggggtaggagttccaggaggtgtggattggaggttgtctaaagaattgaactggcctttgtccctgcttcctgggagggagactttcagtccttgacatttccagggtaataggagtgtctttgttatttgtgaggccatgggatcacacctgagcttatgctaaaaggtgggatgactcagagctggggctggtcaccagacagactgaccatgtgattagaggtttgaggctttgagtcagcctgacctatggggcgggggactggaggctgagtttaatcatctggccagtgctttaatcagtacatcatgaaaccctaataaaaactctggacactaaagctcagcatagcttcctgggtggtgaagctgtggctatgccggcagggcagtgtgccctaattccacgaagagggggcatgggagcactgtgctcaagacccttccagacctttccctgtgtcttccttggcttgtggagctgatttgtatcctttataataaaactaatcataagtat

SEQ ID NO: 188899 - DNA, 1868 bp, Homo Sapiens
  misc_feature (246)..(289): n is a, c, g, or t
aattgatgagcaatgctttaacattaagacaactttgtacaaaaaagttggctcagacccgcgggcgcagccgccgggggtgaggcgcttggggaccgcgggccgagcggcggggatccccgagcaccatgctggacccgtcttccagcgaagaggagtcggacgaggggctggaagaggaaagccgcgatgtgctggtggcagccggcagctcgcagcgagctcctccagccccgactcgggaannnnnnnnnnnnnnnnnnnnnnnnnnnnnnnnnnnnnnnnnnnncagatctgtgagcccgagcccctctgtgctcagcgaggggcgagacgagccccagcggcagctggacgatgagcaggagcggaggatccgcctgcagctctacgtcttcgtcgtgaggtgcatcgcgtaccccttcaacgccaagcagcccaccgacatggcccggaggcagcagaagcttaacaaacaacagttgcagttactgaaagaacggttccaggccttcctcaatggggaaacccaaattgtagctgacgaagcattttgcaacgcagttcggagttattatgaggtttttctaaagagtgaccgagtggccagaatggtacagagtggagggtgttctgctaatgacttcagagaagtatttaagaaaaacatagaaaaacgtgtgcggagtttgccagaaatagatggcttgagcaaagagacagtgttgagctcatggatagccaaatatgatgccatttacagaggtgaagaggacttgtgcaaacagccaaatagaatggccctaagtgcagtgtctgaacttattctgagcaaggaacaactctatgaaatgtttcagcagattctgggtattaaaaaactagaacaccagctcctttataatgcatgtcagctggataacgcagatgaacaagcagcccagatcagaagggaacttgatggccggctgcaattggcagataaaatggcaaaggaaagaaaattccccaaatttatagcaaaagatatggagaatatgtatatagaagagttgcggtcttcagtgaatttgctaatggccaatttggaaagtcttccagtttcgaaaggtggtccggaatttaaattacaaaaattaaaacgttcacagaactctgcatttttggacataggagatgagaatgagattcagctgtcaaagtccgacgtggtactgtcattcaccttagagattgtcataatggaagtgcaaggcctgaagtcagttgctcccaatcgaattgtttactgtacaatggaagtggaaggagaaaaacttcagacagaccaggccgaagcctcaaggccacaatgggggactcaaggagatttcaccaccacccatcctcggcctgtggtcaaagtgaaactcttcacagaaagcactggagttctggccctggaagataaagaactgggaagggtgatattatacccaacttctaatagctccaaatcagctgaattacaccgaatggtagttccaaaaaatagccaggattctgacttaaaaatcaaactggcagtgcgaatggataaaccagcacatatgaagcatagtggatatctgtatgcccttggacagaaagtttggaaaagatggaaaaacgttactttgttctagttcaggttagccaatatacctttgctatgtgcagttatagagaaaagaagtctgaaccacaagaattaatgcagcttgaaactatactgtggattataccgatccccacccaggccttcaggtggttgtatgttctttaatgctgttaaagaagagatactgtaatctttgccagtgatgatgaacaggacagaatattatggg

SEQ ID NO: 188900 - DNA, 1356 bp, Homo Sapiens
  misc_feature (91)..(111): n is a, c, g, or t
aaagccaactttgtacaaaaaagttggaaaagccgttattaatactagcctcatttttcaaatcctgagcccatcttctatctccccaatnnnnnnnnnnnnnnnnnnnnntcccttgttctgctattcctgtttcagaagcttgttatttccttattattatccaattggtgattcattttagtgtatgactgaaagtttatagattgtgtgtatgttttgttgatataaacccttttatatgtcagaaaaataagtctactcaagtataattggacatgcgttaattttttaatcccaggtgcacagggaagtcatccctacacatactgtctatgctcttaacattgaaaggatcatcacgaaactctggcatccaaatcatgaagagctgcagcaagacaaagttcaccgccagcgcttggcagccaaggaggggcttttgctgtgctaaattaggatttgagggtgtgggaccctcaccgaattcattgattactgaaaattgaatgttttttgggtccacatttcaaggctgaagtgtatagtgtatatataacctttcctatggaaatgtgacattgagtacattttgtgttgctattgtgaagccattaatataaatctttggtaatgacccatatctctatatgtatgtgttcccagttgtgggagcaggcactaatgaaatcctgtgcctggaatggagatatttaggtacctgaggcttagtgtcctgtggtctgcatgtaagatagatgacatcctagaacaaagaagctgttttaacttaatccccctgatcagcaggatatctgtgtgttcagtgacatcatacattctgtatctagaagtctaaaatttctgcctttctcctaaagaatgtgttcttgcattttggttgaaataacctacacagtgttaaaaatcagatacctcctttagtgaccagttcaaattttaatagcgataggtagcccctgagaaatttatcactataactccacaggaaatatgacttggaagtgctctgtgtactaaacaaaataaagcccctctttgcatttaaaaccaaagtcaaaacaaaactcttgtaatgcaattaattaactttatgtcttcccatgactcaagttttgttaaatatgcccaaaaactttgattggcagtttcttcggttaattattcctatagaatgtattttaagaaatctatacaaattggatatatgcttggtaattctccagtttctaggaggtacctatttctaccgtttcaagtgatgaagtgaaaataatttacattcgatagtgttactgataacaaaccctacttaagagatatgttgctttttac

SEQ ID NO: 188901 - DNA, 992 bp, Homo Sapiens
atgagccactgcgcccagcctacattcacttctaaagtctatgtaatggtggtcattttttcccttttagaatacattaaatggttgatttggggaggaaaacttattctgaatattaacggtggtgaaaaggggacagtttttaccctaaagtgcaaaagtgaaacatacaaaataagactaatttttaagagtaactcagtaatttcaaaatacagatttgaatagcagcattagtggtttgagtgtctagcaaaggaaaaattgatgaataaaatgaaggtctggtgtatatgttttaaaatactctcatatagtcacactttaaattaagccttatattaggcccctctattttcaggatataattcttaactatcattatttacctgattttaatcatcagattcgaaattctgtgccatggcgtatatgttcaaattcaaaccatttttaaaatgtgaagatggacttcatgcaagttggcagtggttctggtactaaaaattgtggttgttttttctgtttacgtaacctgcttagtattgacactctctaccaagagggtcttcctaagaagagtgctgtcattatttcctcttatcaacaacttgtgacatgagattttttaagggctttatgtgaactatgatattgtaatttttctaagcatattcaaaagggtgacaaaattacgtttatgtactaaatctaatcaggaaagtaaggcaggaaaagttgatggtattcattaggttttaactgaatggagcagttccttatataataacaattgtatagtagggataaaacactaacttaatgtgtattcattttaaattgttctgtatttttaaattgccaagaaaaacaactttgtaaatttggagatattttccaacagcttttcgtcttccgtgtcttaatgtggaagttaacccttaccaaaaaaggaagttggcgaaaacagccttctaacacacctttttaaa

SEQ ID NO: 188902 - DNA, 764 bp, Homo Sapiens
atgagccactgtgtccttccctgccttttttgcagcagggatagtactcaggaccagagttaagctgataccttaggcacacaggttggacttacatagaggaaagaaagcaagaaatgccctatgtacatgaggttttacctcctccattcctgaccaataaccacccataactacggcattctctgtgacttccttaaacagcagtgatgggaagggatccaatagtatcttcaaggccttggggaaacttgcagtgggtcagtggtctgtgccaaccaaacgatagccccatccaagccagctgagaacctaggaaggagtagtaggaatatggttgattagattggatctcccaagttttaattgaaaggagactgaacgaaaacctttctgctttctgtccgttaaagagctcctcatctgatcttgcagctagaccctttgagacttaagagctgcatcccaggatcagaagccagggctaattggggtaggacaatattcccagcccctaagctctgtagataatgcataagaagcaccaagtcaggctcagatgcaactaaaacacatctttgagccttttctttttcccttctcccctttctaaacaaaaaccttcctaggatggcatcttttgctctaactgggagacagtcataattggttgtagtcaattctactaagcagtgttggggtgggtggaaagtctcttttttgtaatttgtttttgcaaatcattgtgaggccactttttcttt

SEQ ID NO: 188903 - DNA, 1465 bp, Homo Sapiens
  misc_feature (176)..(189): n is a, c, g, or t
ttggccccttagcatcctttaaaaggttttctgatgaatgtgtgaaagagttgattatttcaacagtattggttaagtcacaacgacgaagtgctgagaaggttatgggtaccaggaagaaacaaacagaagtcttaagattagaatgagaaccaaagagaatttaaccctgccannnnnnnnnnnnnnaacaccaagatcctaagtaattccaaatgccttagatatcaatgaaagctacacaccattgagatgggcaaaattctttctctacaaagggagtaatcaagtaaatacctgttctctttcaatggactgttgcctattgagcattgtggatgatgtgttttcagatttccaggtgaagttctgaccctacctgtttggccaaagacgtaaattgagaggaaaggccttggtcttcctgatcaaccagcatttaacgaacagtggcttaatgcagatcactcaagaggcagcatagcaatgtaaaaggaatataagtaggtgttggatgcctttttcctagaccaggaatggggaatatataacacctgtgccaccgctcttttaaggaggcattatgaatgagtgcagcattcctgtcctctgtgccaggatttggtcttagaatccatgtcagattggtgcttccagacatctattcccagtccatcagagtgaaatgaaggctatttgccatccctgccttagacagaggagtgaaagaattaagtgggtagacaccaaccaaaatgactttgaaagcagtgagctgattgagctccagttctgtggttaccagaaatactgagtgtctgtcatgtgcaagacaatgctaagaacagaatacagacataaataagttacggcccatgaccttgaagagcttacggccttataaagaggttcactgtaattgtcttcaccagggcgtccttctcaaagatgcccacttttgtctggcacattggggctcggtggtctggtggtcccttcggtcttggccctatctgtcctttgtttttgtgatttactaacaatcatcacgaaccagttttgtttttcttttaaatttgaacatcacatcttgtgttttagttttttgctctatgatttttttctcactgcttttcagtcttctctgtacttcatttttgtgaaaaagtgaaaatcacatataatctttatttaaaaatgctcaccaagcactgcagactttggagttagggattcagcagcttgttccagtgaaaaggaggagtgaagctggggaagttagtatctaagaggggcaagctgattgcatgtgcatttatacctatgcctttaaaacattcccataaaaagtattaataaagaaatttccattccacactagtactgatgaaaaggtggttgattttgccttgtgataattatcaaaggatagtttttcatccttagattttattcacatgagaga

SEQ ID NO: 188904 - DNA, 1126 bp, Homo Sapiens
ttgggtttttgagttctccaaatctaaacaagattttgtcccattttcccatgaagctacattgttgcttattcactttagtggcaagtattattgtgccagctgcttttgttttggaagatgtggacttcgaccaaatggtttcactggaagcaaatcgtagttcttacaatgcatcctttccctcaagctttgaactctcagcaagttcccactcggatgatgacgtcatcatagccaaagagggaactagcgtttcaattgagtgtcttctcacagccagtcactatgaagatgtccattggcacaattcaaaaggacagcaactggatggcagaagcagaggtggaaagtggttggtttctgataacttcctaaacatcaccaatgtagcttttgatgaccgtgggctctatacctgtttcgtcacctctccaattcgtgcctcctactctgtcaccctacgtgttatcttcacctcgggagacatgagtgtctattacatgattgtttgcctgattgcctttacaatcacactcatcttgaatgtcacacggctgtgcatgatgagcagccatcttcgcaagactgagaaggccatcaatgagttctttagaactgaaggggctgagaaacttcagaaggcctttgagattgcaaaacgtatccccatcattacctcagccaaaactctggagctcgccaaagtcacacaatttaagaccatggagtttgctcgttatattgaagaactggcaagaagtgtccctcttccacctcttattctaaactgtcgagcctttgttgaggagatgtttgaggctgtgcgagtggatgaccctgatgacctgggtgaaagaattaaagagagacctgccttgaatgctcaaggtggcatctatgtcattaacccagagatgggacggagtaattcaccaggaggagattcagatgatggctctctgaatgaacaaagccaggaaatagcagttcaggtttctgtccaccttcagtcagaaaccaaaagtattgatacagagtctcaaggcagcagtcatttcagtccaccttgatgatataggatctgcagaatctaactgtaactacaaagatggggcatatgaaa

SEQ ID NO: 188905 - DNA, 1525 bp, Homo Sapiens
ttggattccattcattggatgctgcttctaaagcgaggatgaatagtgagtttaactttgacttacatactgtatcttcgagatcactggaaccaacctccaaattattgaccagtaaacctgtagcacaggatcaagaatctttaggttttctaggacctaaatcttcactggatttccaagtcgtacagccttctcttccagacagtaacactattactcaggacttgaaaaccataccttctcagaatagccagatagtaacctccaggcaaatacaagtgaacatttcagatttcgaaggacattccaatccagaggggaccccagtatttgcagatcgattaccagagaagatgaagaccccactttctgctttctctgaaaaattgtcatctgatgcagtcactcagataacaacagaaagtccagaaaagaccctattttcatctgagatttttattaatgctgaagatcgtggacatgaaattatagagcctggtaaccagaagctacgcaaagctcctgtcaagtttgcctcatcatcttcagtccaacaggttactttttctcgcggcacagatggccagcctttattattgccatataagccttctggtagtaccaagatgtattatgttccacaattaagacaaattcctccatctccggattccaaatcagataccaccgttgaaagctcccattcaggatccaatgatgccattgctccagacttcccagctcaggtgctaggcacaagagatgatgacctctcagccactgttaacattaaacataaagaaggaatctacagtaagagggtagtgactaaggcatccttgccagtgggagaaaaacccttgcagaatgaaaatgcagatgcctcagttcaagtgctaatcactggggatgagaacctctcagacaaaaaacagcaagagattcacagtacaagggcagtgactgaggctgcccaggctaaagaaaaagaatctttgcagaaagatactgcagattccagtgctgctgctgctgcagagcactcagctcaagtaggagacccagaaatgaagaacttgccagacactaaagccattacacagaaagaggagatccataggaagaagacagttcccgaggaagcctggccaaacaataaagaatccctacagatcaatattgaagagtccgaatgtcattcagaatttgaaaatactacccgttctgtcttcaggtcagcaaagttttacattcatcatcccgtacacctaccaagtgatcaagatatttgccatgaatctttgggaaagagtgttttcatgagacattcttggaaagatttctttcagcatcatccagacaaacatagagaacacatgtgtcttcctcttccttatcaaaacatggacaagactaaacaatatcaaataagctcactcattgctcccccactctatgtgaatttgggaaaccaagaagtgatggatactaactaaaagtccaagttagagattatccaaaa

SEQ ID NO: 188906 - DNA, 963 bp, Homo Sapiens
  misc_feature (79)..(109): n is a, c, g, or t
caggaagcctaaacgttgtgtaggtgtttgggtggaaagataagaataagctaaacttggcttaaggagaaaaagggtnnnnnnnnnnnnnnnnnnnnnnnnnnnnnnntacaacactctaggttttaattcaaaggaaaaatatatatataataaactggtttacacccttggtcagactgttgcctggaattctctaccttctctttcacagtccaaagagtttgtctctgttcccttccttcactgctttagcaaagagagggggaacttcaaagaggattccaacagtgaagcagaatcatggggcaaaagtcactatggggccagactgaggttggaccacacaagcactccaagctgggccaatcccaaccgctggtgaagccgcacagcacggagtagccatccacataggcctggccacatggtactcaagcagaggttttccacagtactctttctcctcacaaacaaaccccagctctcccaggtaaacattttagaaaaaacatccaggctggtgtactactgtaaaacgctgccagtttctaattaacttagcaccaaatctgtgattccccctccctcaaaccaagtccatctgtagtttaaaatgtgaagtgccacatttctctttgcttctgtgttttcattttctttgaaagtattcctattgatgttcactccatgtcagaagaaataaagttgcaaaatatttggtgatttccgtgtaacgttcttcttatactgaagtaacttcatgggtttcggtcagaattatgtccacagaagtcttttccatgtagttcgtcatacagaaagactcttacacatggctatttttggacagtgcataaatgaagatacctcacaagagaaaagatcattatctgtatccatcagaataatatacagattcacagtcaatgagatgatacgctttgcagaagagaggcccaa

SEQ ID NO: 188907 - DNA, 1104 bp, Homo Sapiens
ttgggctggacttggacccctgcagcaggtactcggagcaaatggtgagatcagaagggggatgatgtcattccttcgaaggaatgaattaaacgtgcttcctcgtgtgtctgattgacagccctgcacaggagaagcggcatataaagccgcgctgcccgggagccgctcggccacgtccaccggagcatcctgcactgcagggccggtctctcgctccagcagagcctgcgcctttctgactcggtccggaacactgaaaccagtcatcactgcatctttttggcaaaccaggagctcagctgcaggaggcaggatggtctggaggctggtcctgctggctctgtgggtgtggcccagcacgcaagctggtcaccaggacaaagacacgaccttcgaccttttcagtatcagcaacatcaaccgcaagaccattggcgccaagcagttccgcgggcccgaccccggcgtgccggcttaccgcttcgtgcgctttgactacatcccaccggtgaacgcagatgacctcagcaagatcaccaagatcatgcggcagaaggagggcttcttcctcacggcccagctcaagcaggacggcaagtccaggggcacgctgttggctctggagggccccggtctctcccagaggcagttcgagatcgtctccaacggccccgcggacacgctggatctcacctactggattgacggcacccggcatgtggtctccctggaggacgtcggcctggctgactcgcagtggaagaacgtcaccgtgcaggtggctggcgagacctacagcttgcacgtgggctgcgacctcatagacagcttcgctctggacgagcccttctacgagcacctgcaggcggaaaagagccggatgtacgtggccaaaggctctgccagagagagtcacttcaggggtttgcttcagaacgtccacctagtgtttgaaaactctgtggaagatattctaagcaagaaggttgccagcaaggccagggagctgagatcaacgccatcagtgagaacacagagacgctgcgcctgggtccgcatgtcaccaccgagtacgtgggccccagctcggagaggaagctc

SEQ ID NO: 188908 - DNA, 1286 bp, Homo Sapiens
aattcttttgaacagaaacaaattactcagactaaatctacaaatgcaactaattcaaatgtcaaagacgttggagctgaagaacccagcagaaaaaatgcaacatctcttattctttttgaggaggttgatgtaatttttgatgaagatgctgggtttttgaatgcaatcaaaacattcatggcaacaactaaacgacctgtaatccttactacaagtgacccaacatttagtttaatgtttgatggctgctttgaagaaatcaagttcagtactccttccctgctaaatgttgccagctacctacaaatgatttgcttaactgagaattttagaactgatgtaaaagactttgtaaccttgttaactgcaaatacttgtgatatcagaaaaagtatcctttacttacaattctggattagaagtggaggtggagttttagaagaacgaccattaaccctttatcgtggaaatagcagaaatgtacaactagtttgctctgaacatggccttgataacaaaatttaccctaaaaatactaaaaagaaacgtgtagaccttccaaaatgtgacagtggctgtgctgagaccttgtttggccttaagaacattttttccccatctgaagacttattttcatttttaaagcacaaaatcacaatgaaggaagaatggcataaattcatccagcttcttacagaattccaaatgcggaatgtagattttttatatagtaatcttgagtttattctaccattaccagttgataccattccagaaactaaaaacttttgtggcccatcagtaactgtggatgccagtgcagcaacaaaaagtatgaattgtcttgctaggaaacactctgaaagagaacagccattgaaaaagtcccagaaaaagaaacaaaagaaaacattggtaatattagatgatagtgatctatttgacactgacttggactttcctgatcaatctattagcctgtcctctgtatcatcttcctcaaatgcagaagaaagcaaaaccggagacgaagaaagcaaagccagagacaaaggaaacaatccagagacaaagaaatctattccttgtcctcctaaaacaactgcaggaaaaaaatgttctgcccttgtttctcattgtttaaattctctctctgagttcatggataacatgtccttcttagatgcacttttaactgatgtaagggaacaaaacaaatactgtagaaatgactttagtttggacaaatggaaaggttacaagtggactttgtgatgagttta

SEQ ID NO: 188909 - DNA, 1174 bp, Homo Sapiens
ttggggagctttgcggggcccatcggagctgttataatcatcaacacagtcacttctgtcctatctgcaaaggtttcctgccaaagaaagcaccattattatgggaaaaaagggatcgtctccctgctgaggaccgcattcctcctgctgctgctcatcagcgccacctggctgctggggctgctggctgtgaaccgcgatgcactgagctttcactacctcttcgccatcttcagcggcttacagggccccttcgtcctccttttccactgcgtgctcaaccaggaggtccggaagcacctgaagggcgtgctcggcgggaggaagctgcacctggaggactccgccaccaccagggccaccctgctgacgcgctccctcaactgcaacaccaccttcggtgacgggcctgacatgctgcgcacagacttgggcgagtccaccgcctcgctggacagcatcgtcagggatgaagggatccagaagctcggcgtgtcctctgggctggtgaggggcagccacggagagccagacgcgtccctcatgcccaggagctgcaaggatccccctggccacgattccgactcagatagcgagctgtccctggatgagcagagcagctcttacgcctcctcacactcgtcagacagcgaggacgatggggtgggagctgaggaaaaatgggacccggccaggggcgccgtccacagcacccccaaaggggacgctgtggccaaccacgttccggccggctggcccgaccagagcctggctgagagtgacagtgaggaccccagcggcaagccccgcctgaaggtggagaccaaggtcagcgtggagctgcaccgcgaggagcagggcagtcaccgtggagagtaccccccggaccaggagagcgggggcgcagccaggcttgctagcagccagcccccagagcagaggaaaggcatcttgaaaaataaagtcacctacccgccgccgctgacgctgacggagcagacgctgaagggccggctccgggagaagctggccgactgtgagcagagccccacatcctcgcgcacgtcttccctgggctctggcggccccgactgcgccatcacagtcaagagccctgggagggagccggggcgtgaccacctcaacggggtggccatgaatgtgcgcactggga

SEQ ID NO: 188910 - DNA, 1277 bp, Homo Sapiens
  misc_feature (354)..(370): n is a, c, g, or t
  misc_feature (416)..(457): n is a, c, g, or t
ttggatttctggttcctacagtatccactccatcctcaaggcttcccgcagggccttggggcactgccttgccatcgggcccagttctccgggccccacctgcacccctttcttccccctgggatatgatgtgtggtgtttcctgtggtaaaagactgaggcaggccaggggtctgccagtaacatgttcccatgtacagacacggtccccacaccctcccagcctcaggcccaggcagacatgggcgagctggtgagactgccagccacggctttgcttagccacctgtggccgagggctctcagagacccccttaacctcccaaatactaagaagctaaaatattttaatannnnnnnnnnnnnnnnncttggtgccagagtttataccctgggtgctggggtcgcactgtgtnnnnnnnnnnnnnnnnnnnnnnnnnnnnnnnnnnnnnnnnnntctattttttttggttgggttcgtttttaattcagtcctacaaaatggtggtaagccccagtctcaggggtcaccctgtcttagagctagagatgaggtggcagggagggaggctgtgtcctcagtggcctggggctgagcagaccttaggaaggggccctccccagtgccgtggctgctctggggctaccccaggtgaacagaggtggtgagatgcgcagggaagaccagctctctccaggacatcgggctgcgtgaagtccagtgaccctgaggggattttggccaaaggaaacagccagggctgggctaggagagctggggtcaaaagctgccccacccactctccctcacatggtgctaggctgggagctgccctgagagctgggatgcccaccaaggcccacagaactgtctccaggcccttgtagacagtgggatctctgggctgatttctggttggggtctgctcctaccccaccccatttaacaatgtgaagtgactgaggctggggtgcctctccctggccccctccaactgccaaattctgcttccctctgaaccccaggaaatactttctggagaggcttgtcttgttcagaagactctagcatcttggggctggaaggtcctttgacgggtatgaaacaggtccagaaaggggaggtggcctgcttggccgacgtcatggagccagctgggagcagggctgagcgttgaacccgagctcccggttccaagtcccatcgtgctcctcttccaatgccacactgcctctgagcccatcccttgggaccctactctgtgccaggttcctgt

SEQ ID NO: 188911 - DNA, 378 bp, Homo Sapiens
atgtattacaaagccacatgctttggaattacttcagtgttccttctattttcattaacactgatatctagtttaatatgaaaaggaacttgaaatcttgaaaattagaacatcgttatttttttctacttgcaatggaaaatctattttgcttttttgcttctaggaaaatattctgattatgatatgtgatatgttggctactcaaagtcagaacttttcaaagtaatcagtaaattgaatcaacagaaaaatattcattaactcggggatgcattaataaagtttttaaattcaaaatgtatagaaaaatcaagcttagtaatactttaatattattctaccaatgtattttttttaattaagacttctgtatgc

SEQ ID NO: 188912 - DNA, 727 bp, Homo Sapiens
ttgggtattcagtcaatgggaagttgcgggcttcactgcccctggcagagcagcctacagccctgacggtgacagaggactttgtgttgctgggcaccgcccagtgcgccctgcacatcctccaactaaacacactgctcccggccgcgcctcccttgcccatgaaggtggccatccgcagcgtggccgtgaccaaggagcgcagccacgtgctggtgggcctggaggatggcaagctcatcgtggtggtcgcggggcagccctctgaggtgcgcagcagccagttcgcgcggaagctgtggcggtcctcgcggcgcatctcccaggtgccctcgggagagacggaatacaaccctactgaggcgcgctgaacctggccagtccggctgctcgggccccgcccccggcaggcctggcccgggaggccccgcccagaagtcggcgggaacaccccggggtgggcagcccagggggtgagcggggcccaccctgcccagctcagggattggcgggcgatgttaccccctcagggattggcgggcggaagtcccgcccctcgccggctgaggggccgccctgagggccagcactggcgtctgcggccgcagcagcactttttgcacagtctggggcggggttccccggcttccaagtcgctgtttcgtcaaagcacgagggccgcctgtggccttaattccctaacggcggccccggttctcccttctcg

SEQ ID NO: 188913 - DNA, 1130 bp, Homo Sapiens
aaaatatattttccatggattatgcttccattgaaattttcacagctgcatttcaggttcgaaaaaatatttccacatctaagagatttcaagagcatttaagttcggggcagccaagaccctacctcttgggaggagggccttcatctcctttcctgctaggtgaggctgggctccttggcagcaagggcccagaatgagcaggctccaaggctggctctgcagagcccccactgccactctgccaacctcatttactgccccatcctcccagacagacaccttcctccaaacagcttattcaatataaggagatccaagtcccttcccttcaggtttgggatcaggcttcccaagcataaattcacctctgaagcctccaggcctcacccaaacccaatgaccaatcaggagcaactcatctactaagggacagggcatggcaagttgggggagccctcagggttcatttccacctccctctgcagcccctgcccagctgtcctcacccagtgccacctcctaagcctgctgggttcatctgcccttcctccctaagggaagacccagggctgcagttctcagccccagcccctgcccccaggggtatgcccttgtggaagtgctcagctagcaggttcccagcaccaggcccaagccacactgcactccactccctctcccaccatactcctctttggtacagataggaaataaccaggctgctccagccccctcacagagtctcagggccagggccaaggcctagtctccacaaggacaacaggggactgagcctgttagtctactctggggagcagcatgaggtgagaacagggcctctgggcaacaggaacaaactgaaaatgcaagtccttagctcctagagcaagtggctgcagctcagcaggtccgtggactgatacagtgttgattcttgctaggatgtaaattagtgcaatctacaaaagactagggaaagggtggcagggcaaggggagccacagcactcctttggtttgatttcaggtgggtgtggcttgaagaatcacgtgtgaagttctgcaagaggtttcctggaacctccatgtgtaaggcaagaggaaaaatcttcaacaaatcaggtccaa

SEQ ID NO: 188914 - DNA, 1517 bp, Homo Sapiens
ttggatggtgaggacgccccagccaccaactccaatgcgccatcacggtccaccatgtcctcctccgtctcttctcatctctcgtccaggacgcaggtctctgagggagcggaggcttctgatggtgaaagccacggtgacggcgatagggaagacggcggaaggcaggcggaggccacggcccagacgctgcgggcccggcctgcctctggacacttccatttgctcagacacaaaccctttgctgccaacgagaggtctccaagcaggttcagcattgggcggggacctcggctgcagccctccagctccccacagtcgactgtgccctcccgagcccaccccagggttccctctcactctgattcccaccctaagcttagctcaggtatccatggagacgaggaggatgagaagccgcttcctgccaccgttgtcaatgaccacgtgccttcctcctccaggcagcccatctcccggggctgggaggacttaaggagaagcccgcagagaggggccagcctgcatcggaaggaacccatcccagagaaccccaaatccacaggggcagatacacatcctcagggcaagtactcctccctggcctccaaggctcaggatgttcaacagagcacagacgcggacacggagggtcattctcccaaagcacagccagggtccacagaccgccacgcgtcccctgctcgtcctcccgcagcacggtcacagcagcatcccagtgttcccagaaggatgacacccggccgggccccagaacagcagccccctcctcccgtcgccacgtcccagcaccacccgggaccccagagcagagacgcgggtcggtcaccttcccagcccaggctctcactgacccaggccgggcggccccgccccacgtcgcagggccgctcccactcctcctcggacccttacacggcgagctccagagggatgctccccacggccctccagaaccaggacgaggatgcccagggcagctacgacgacgacagcacagaagtcgaggcccaggatgtgcgggcccccgcacacgccgcgcgcgccaaggaggcagctgcgtcccttcccaagcaccagcaggtggagtctcccacaggcgcaggggcaggtggtgaccacaggtcccagcgcggacatgcggcctcccccgccaggcccagccgacccggcggcccccagtcccgcgcccgggtccccagcagggcagcgccggggaagtcggagcctccttccaagcggcccctgtcctccaagtcccagcagtcggtctcagccgaggacgaggaggaggaggacgcggggttttttaaaggcgggaaagaagaccttctgtcttcctctgtgccaagtggccctcttcctccactcccaggggcggcaaagacgccgatgggagcctcgcccaggaagagagggagcctgccatcgcgcttgccctcgcggagggagcctggctcctgtgaagcgacctctccccccacctccaggcagct

SEQ ID NO: 188915 - DNA, 1241 bp, Homo Sapiens
ttggcctcttcaatatcttgcatgttacagatttcactgctcccaccagcttggagacaacatgtggttcttgacaactctgctcctttgggttccagttgatgggcaagtggacaccacaaaggcagtgatcactttgcagcctccatgggtcagcgtgttccaagaggaaaccgtaaccttgcactgtgaggtgctccatctgcctgggagcagctctacacagtggtttctcaatggcacagccactcagacctcgacccccagctacagaatcacctctgccagtgtcaatgacagtggtgaatacaggtgccagagaggtctctcagggcgaagtgaccccatacagctggaaatccacagaggctggctactactgcaggtctccagcagagtcttcacggaaggagaacctctggccttgaggtgtcatgcgtggaaggataagctggtgtacaatgtgctttactatcgaaatggcaaagcctttaagtttttccactggaattctaacctcaccattctgaaaaccaacataagtcacaatggcacctaccattgctcaggcatgggaaagcatcgctacacatcagcaggaatatctgtcactgtgaaagagctatttccagctccagtgctgaatgcatctgtgacatccccactcctggaggggaatctggtcaccctgagctgtgaaacaaagttgctcttgcagaggcctggtttgcagctttacttctccttctacatgggcagcaagaccctgcgaggcaggaacacatcctctgaataccaaatactaactgctagaagagaagactctgggttatactggtgcgaggctgccacagaggatggaaatgtccttaagcgcagccctgagttggagcttcaagtgcttggcctccagttaccaactcctgtctggtttcatgtccttttctatctggcagtgggaataatgtttttagtgaacactgttctctgggtgacaatacgtaaagaactgaaaagaaagaaaaagtgggatttagaaatctctttggattctggtcatgagaagaaggtaatttccagccttcaagaaagacagacatttagaagaagagctgaaatgtcaggaacaaaaagaagaacagctgcagaaggggtgcaccggaaggagccccagggggccacgtaccagcggctcagtgggtggccatcgatctggaccgtcccctgcccacttgctcccc

SEQ ID NO: 188916 - DNA, 847 bp, Homo Sapiens
ttggggtttctggaaagcaaggtttggacagagtggtcatcaaaggccagccctgtgacttacactgcattaaattaatttcttagaacatagtccctgatcattatcactttactattccaaaggtgagagaacagattcagatagagtgccagcattgtttcccagtattcctttacaaatcttgggttcattccaggtaaactgaactactgcattgtttctatcttaaaatactttttagatatcctagatgcatctttcaacttctaacattctgtagtttaggagttctcaaccttggcattattgacatgttaggccaaataattttttttgtgggaggtctcttgtgcgttttagatgattagcaataatccctgacctgttatctactaaagactagtcgtttctcatcagttgtgacaacaaaaatggttccagatattgccaaatgccctttagaggacagtaatcgcccccagttgagaaccatttcagtaaaactttaattactattttttcttttggtttataaaataatgatcctgaattaaattgatggaaccttaaagtcgataaagtatatttcttgttttaaagtccccatacgtgtcctactaattttctcatgctttagtgttttcacttttctcctgttatccttgtacctaagaatgccatcccaatccccagatgtccacctgcccaaagtctaggcatagctgaaggccaagctaaaatgtatccctctttttctggtacatgcagcaaaagtaatatgaattatcagctttctgagagcaggcattgtatctgtcttgtttggtgttacattggcacccaa

SEQ ID NO: 188917 - DNA, 1669 bp, Homo Sapiens
  misc_feature (910)..(941): n is a, c, g, or t
  misc_feature (1386)..(1403): n is a, c, g, or t
ttggcaaatgagagacaacatcatcattagtggatctacagatcggacactcaaagtgtggaatgcagagactggagaatgtatacacaccttatatgggcatacttccactgtgcgttgtatgcatcttcatgaaaaaagagttgttagcggttctcgagatgccactcttagggtttgggatattgagacaggccagtgtttacatgttttgatgggtcatgttgcagcagtccgctgtgttcaatatgatggcaggagggttgttagtggagcatatgattttatggtaaaggtgtgggatccagagactgaaacctgtctacacacgttgcaggggcatactaatagagtctattcattacagtttgatggtatccatgtggtgagtggatctcttgatacatcaatccgtgtttgggatgtggagacagggaattgcattcacacgttaacagggcaccagtcgttaacaagtggaatggaactcaaagacaatattcttgtctctgggaatgcagattctacagttaaaatctgggatatcaaaacaggacagtgtttacaaacattgcaaggtcccaacaagcatcagagtgctgtgacctgtttacagttcaacaagaactttgtaattaccagctcagatgatggaactgtaaaactatgggacttgaaaacgggtgaatttattcgaaacctagtcacattggagagtggggggagtgggggagttgtgtggcggatcagagcctcaaacacaaagctggtgtgtgcagttgggagtcggaatgggactgaagaaaccaagctgctggtgctggactttgatgtggacatgaagtgaagagcagaaaagatgaatttgtccaattgtgtagacgatatactccctgcccttccccctgcnnnnnnnnnnnnnnnnnnnnnnnnnnnnnnnntcccttgttctcagtggtgcaggatgttggcttggggcaacagattgaaaagacctacagactaagaaggaaaagaagaagagatgacaaaccataactgacaagagaggcgtctgctgtctcatcacataaaaggcttcacttttgactgagggcagctttgcaaaatgagactttctaaatcaaaccaggtgcaattatttctttattttcttctccagtggtcattgggcagtgttaatgctgaaacatcattacagattctgctagcctgttcttttaccactgacagctagacacctagaaaggaactgcaataatatcaaaacaagtactggttgactttctaattagagagcatctgcaacaaaaagtcatttttctggagtggaaaagcttaaaaaaattactgtgaattgtttttgtacagttatcatgaaaagcnnnnnnnnnnnnnnnnnngccaaccattgccaatgtcaatcaatcacagtattagcctctgttaatctatttactgttgcttccatatacattcttcaatgcatatgttgctcaaaggtggcaagttgtcctgggttctgtgagtcctgagatggattttaattcttgatgctggtgctagaagtagtcttcaaatatgggattgttgtcccaaccctgtactgtactcccagttggcaaacttatttatgctgctcaaatgaaacacagaaaaaagcaaatta

SEQ ID NO: 188918 - DNA, 904 bp, Homo Sapiens
  misc_feature (463)..(494): n is a, c, g, or t
ttggtaaatatgtatcatttcaaatgttgcatttattgtatgttctaaagtagaagtctacaaattataatgtaactaactcatagccattatttctaaccagtaattaaattcttttggtttttgtctaggtcccaacaagcatcagagtgctgtgacctgtttacagttcaacaagaactttgtaattaccagctcagatgatggaactgtaaaactatgggacttgaaaacgggtgaatttattcgaaacctagtcacattggagagtggggggagtgggggagttgtgtggcggatcagagcctcaaacacaaagctggtgtgtgcagttgggagtcggaatgggactgaagaaaccaagctgctggtgctggactttgatgtggacatgaagtgaagagcagaaaagatgaatttgtccaattgtgtagacgatatactccctgcccttccccctgcnnnnnnnnnnnnnnnnnnnnnnnnnnnnnnnntcccttgttctcagtggtgcaggatgttggcttggggcaacagattgaaaagacctacagactaagaaggaaaagaagaagagatgacaaaccataactgacaagagaggcgtctgctgtctcatcacataaaaggcttcacttttgactgagggcagctttgcaaaatgagactttctaaatcaaaaccaggtgcaattatttctttattttcttctccagtggtcattgggcagtgttaatgctgaaacatcatttacagattctgctagcctgtttcttttaccactgacagctagacacctagaaagggaactgcaataatatcaaaacaagtactggttgactttctaattagagagcatctgcaacaaaaagtcatttttctggagtggaaaagcttaaaaaat

SEQ ID NO: 188919 - DNA, 1510 bp, Homo Sapiens
gtacaaaaaagttggctgacagattgtccgtataataaagtatacaagaacctaaaggagttttctcaaaatggagagaatttctgcaaacaggtcacatctgttcttcagcaaagggcaaacctggaaattagctatgccaaaggacttcagaaactggcaagcaagctgagcaaagcattacagaacacgagaaaaagttgtgttagcagtgcctgggcctgggcctcagagggaatgaaatccacagcggacctgcatcaaaaacttggcaaagcaattgaattggaagcaataaaaccgacttatcaagtcctaaatgtacaagagaagaagagaaaatcacttgacaatgaagttgaaaagacagcaaatcttgtcattagcaactggaatcagcaaattaaggccaagaagaaattaatggttagtaccaagaaacatgaagcacttttccagcttgtagaaagctccaagcaatctatgactgagaaggagaagcggaagctcctcaataaactgacaaaatcaactgaaaagttggaaaaggaagatgaaaattactaccaaaaaaacatggcgggttattctaccagactgaaatgggaaaacacactagagaactgctaccagagcattctggagctggagaaggaaagaattcaacttttatgcaataacttaaaccagtacagccaacatatttctctttttggccaaaccctgaccacatgccacacgcagattcactgtgccatcagcaagattgacattgaaaaagatatccaggctgtaatggaagaaactgcaattttatctacagaaaacaaatctgagttcctgttaacggattactttgaagaagatcctaacagtgcaatggataaagagagacgaaagtctttactaaaaccaaaattattgagactgcagagagacattgaaaaagcctcaaaagacaaggaaggcctggaacgaatgcttaaaacgtactccagcacctcctccttctctgatgcaaagagccagaaagacacagcagcgttaatggatgagaacaatttgaaactagaccttttggaagcgaactcctacaaactgtcatcaatgttagcagaacttgagcaaagacctcaacccagccatccttgtagtaattccatcttcaggtggagggaaaaggagcatactcatagctatgtgaaaatatctcggccttttttaatgaagagattagagaatattgtgagcaaggcatcttctggtgggcagagcaatccaggttcttcaactccagcccctggtgcagcccagctcagcagcagactttgcaaggccttgtattcttttcaagccaggcaagatgatgagttgaatttggaaaagggtgacattgtgattatacacgagaaaaagaagaaagatggtggtttggatctttgaatgggaaaaaaggccattttcctgccgcttatgtggagagttaccttcaaatgctggcaacacagct

SEQ ID NO: 188920 - DNA, 1573 bp, Homo Sapiens
  misc_feature (1173)..(1207): n is a, c, g, or t
ttggctcagaagttgtattttcttcttgtgatttgaatttaaccatggaagacagtgatggtgtaacttatgcattaaagtgtgacagtagtggtcatgccccagaaattgtgtctacagttcatgaagattattctggctcttctgaaagttcaaatgatgaaagtgattcagaagatacagattcggatgatagcagtattccaagaaaccgtctccagtctgttgtggttgtgccaaagaattctactttgcccatggaagaaacaagtccttgttcttctcggagcagtcaaagttatagacactattctgaccattgggaagatgagagattggagtcaaggagacatttgtatgaggaaaaatttgaaagtatagcaagtaaagcctgtcctcaaactgataagtttttccttcataaaggaacagagaagaatccggaaatttcttttacacagtccagtagaaaacaaatagataaccgcctgcctgaactttctcatcctcagagtgatggggttgatagtacaagtcatacagatgtgaaatctgaccctctgggtcacccaaattcagaggaaaccgtgaaagccaaaataccttctaggcagcaagaagagctgccaatttattcttctgattttgaagatgtcccaaataagtcttggcaacagaccactttccaaaacaggccagatagtagactgggaaaaacagaattgagtttttcttcctcttgtgagataccacatgtggatggcttgcactcatcagaagagctcagaaacttaggttgggacttctctcaagaaaagccttctaccacgtatcagcaacctgacagtagctatggagcttgtggtggacacaagtatcagcaaaatgcagaacagtatggtgggacacgtgattactggcaaggcaatggttactgggatccaagatcaggtagacctcctggaactggggttgtgtatgatcgaactcaaggacaagtaccagattccctaacagatgatcgtgaagaagaggagaattgggatcaacaggatggatcccatttttcagaccagtccgataaatttcttctatcccttcagaaagacaaggggtcagtgcaagcacctgaaataagcagcaattccattaaggacactttagctgtgaatnnnnnnnnnnnnnnnnnnnnnnnnnnnnnnnnnnntgatatcaaagatagagggcctcttaaaaaaaggaggcaggaaatagagagtgattctgaaagtgatggtgagcttcaggacagaaagaaagttagagtggaggtagagcagggagagacatcagtgcccccaggttcagcactggttgggctctcctgtgtcatggatgacttcagggacccacagcgatggaaggaatgtgccaagcaagggaaaatgccatgttactttgatcttattgaagaaaatgtttatttaacagaaagaaagaagaataaatctcatcgagatattaagcgaatgcagtgtgagtgtacacctctttctaaagatgaaagagctcaaggtgaatagcatgtggggaa

SEQ ID NO: 188921 - DNA, 1725 bp, Homo Sapiens
  misc_feature (1579)..(1597): n is a, c, g, or t
ttggccacatgggctctgctctatgggaatctggcttttagcgaatgtggcgtcttctgcaaacaatagcaattgggctggcttaggagcaagtggctcattttcccataaggctaaaaataactggtgcgctcccttgtgttggctgacacgcgcgttcaaagcacttttgtagtcactttgcttttgctcgtcttcatggacgagtgaacgcctcgcttctgcaggttgagtccagatgcttctcaccttctttctcctcaagaaagatgctttttgggaaacgttgtttaaatcttatttttttactacatcaaaaggatggtggttcaagttcccaatatgtgggtggcacttcttaaaaatcagctttaaggagctggcagaaagcccccagccccacagccctgagagatggtgttgctagctcaggtggctgacacatggggtatgccgggcactgggcaggtcccagagccggggaaccagctcacctctggttgctgtagctcctgccggaggcatgtctacttgtgatcccggacagccgaacccaagagctggtggctctgagcagacagagacatcttggcctgtccctgcctgggggtcatggagaccatgtcttcttagagcaaatgtggaggcggccagggcagttgttgggtgaatgtggagagcacatggccatgtcttgcccccggagtaccactgggcgtggggggtcctggcaccacatgcccggtgtggccgagggcacacagcctctatagcaggccttcctgtggaaggcagaggcagtgagggaggtggacggtgccagctgaggctgagcatgcagcagcccccagctacctttgcttaggctggggtgggaggcacatggtgacaggtatatgtcgtgggactggggtgtgggtgacctgccctcaaaccttgcctgccacctccccattcaggcctggtggcaggaagggacaagctgtggagctggctgagtcacagccacctccccacctccccgcaagctggtcccatcgaccagcaagcccagccccagggcgcttaggcagaaatgacccagcctcctcagaccccgcctgcctgtcctgtgcccaccacgcagcagtcaggggagaaaatggtggctatcccttctgcttagagaaagaaatggcctttagctggtttcatgtttgtgttttgactggagggagtagaccctatctataaggtgccaccccatcatccaagctgccacactgcccggagcagcctgttcctgcactccaccctgctggccccaggacttctgatctcagtcctctgggagggaggttcgcctaggaggtgccccccacattggtgtccccatgggcagcaggcagacagctcacccccaccagcatgatggccccagctgggggcagtggcaggagccttacttttgtcacagccttgcccacaaaccctgcctctgaggggagactgaggaagggcagagccagaagcaagccgtgccaggccatctgcctgctcatggggtcctaaagcgcgggctaagcctgcaggaaagccnnnnnnnnnnnnnnnnnnncttagtgccacatgcaccccactcattccaaagccaccaaactgccaggggctgccgtccacccgtggggcccaggggctggggccacagccttgccattttcgttgccataccctcttgccttactc

SEQ ID NO: 188922 - DNA, 931 bp, Homo Sapiens
  misc_feature (697)..(739): n is a, c, g, or t
ttggctctgttgtgccctgtgacaaaactgctcagtattcctattgcttttactgtgttttaggtactgtgaagggatcaaaaaaccaaacagaagcaagggagtatcagactatgatgatgctggagtggacttctgttcagggaacattttgcattcaggctgtttcttctatcactggggtttcccatgttgcagcacttctgggtcgttgcaattttgcatctaggagttagtttgatcgagttattctcttttttcaagtcacttttgttataggtctccccctaggcctgtctctcccttagcccaaaagatctgaactggaagcagaggttgagattctgcctcccaggagagggatttacctgccccctagtaccagataggtttagggcagtgatctctacagcaatcagttcagtgtcctggttgtccctgctcccatttacagatgtttgggcagcattgatagaagtatggaggggttcaagacagagcccacctgatcaagatcatcagctaccttcaaattattgacctggacagggtccaagtctgatagtaaccttttacaagaaagaacagggatgggaatggaaagagatagccttgatccacagtattgtacctgcattttctaccaccctaaaattgtgtgagacttctcccattgttaacagattgcatggacaannnnnnnnnnnnnnnnnnnnnnnnnnnnnnnnnnnnnnnnnnnctgccatcctagcacagagatttttggtattgatatagttaaagctgttctggcactcaagaagccgtgtttccaacatcctctcatcccaggacatttggggcaagtgagttagggcccaggggcaattttccctctgaataacgtgtctgaggcaggatgctaccctcagctcgcttttggccagctttt

SEQ ID NO: 188923 - DNA, 1315 bp, Homo Sapiens
gccaactttgtacaaaaaagttggactttcaagagttccttagagagtgtgctctagctggctgcctgctaccccaaagctctgaaagagtaaggttgaagtgctggaacatgctcagattgttttttagttactcaaaagccccttcttgttctgaatgtgaaagctcttcccgttcctgcttactgcagccattctgtgtgtgtggttcagaccctggcctagggccggtgatgtggatgagtgaagggagccaggtacacggcagcagggcagaggagactatggggagcccaccgcctacacagtaggggcagtagcccccagctccacgcctgttgccatgtggaaaagtgggcctagggtggccacagctttgatttttcaagagacaagaaacctagatgttttttggtgccatctctccatttataaatgttggcaaccaatttgaacactttcagagaccatgtgcaggtgagctgtgtcctctaggctgccagctcacagcccccaccccagggccctgtaagctgtgcagtgtgagggcctggcttccccggacacacctggagcagcctctgagtcttacccgtaatggagccggccaaccctgtgtgttatgttgctgtcgctcctgtttttaaccatatgttctgtcccatagcagtcattcacacatgtgaagaagacacaagaatcaaagtacaagttgcctcaatacatgctaataactaagcttctattttcacaggactgatcgatgcacacctttatagcttgaccatatgctgtcatgaaagtagcaccccgacggtgcttgctttactaagtcaccgtgtgtggatgcttttgtcgcattttgcttcactgtgagtagcatgggaaaagggtccacgtctccaaaagactcttccacttgtttgtcccacagccctaagtgccacattgctgttggatgctcccgggatgccttctagaagggggcctcccaccttaagttcaggcgccatctgatagccttttctgcaggcttcatgtccttagctgaccctcctttatcttgcaaacccctgcccctgctgtcccagggaggacgggcttctgtagaggcttctgggaaatgagctgtctgcaggaggtgaagcagtgttttccttgggaatgtttgaggacctgcaatagaagatgttgcctttatggccctagagaaagtcaaggaacatggggaccaacaaagcatttccagttgtaagaatatgtcagagagtgctcggttagcccacggtgccaaaactccaaacaagttccccgg

SEQ ID NO: 188924 - DNA, 1419 bp, Homo Sapiens
  misc_feature (1163)..(1176): n is a, c, g, or t
ctttgtacaaaaaagtatggccgcttctgaggcggcggtggtgtcttcgccgtctttgaaaacagacacatcccctgtccttgaaactgcaggaacggtcgcagcaatggctgcgaccccgtcagcaagggctgcagccgcggtggttgcggccgcggccaggaccggatccgaagccagggtctccaaggccgctttggctaccaagctgctgtccttgagcggcgtgttcgccgtgcacaagcccaaagggcccacttcagccgagctgctgaatcggttgaaggagaagctgctggcagaagctggaatgccttctccagaatggaccaagaggaaaaagcagactttgaaaattgggcatggagggactctagacagcgcagcccgaggagttctggttgttggaattggaagcggaacaaaaatgttgaccagtatgttgtcagggtccaagagatatactgccactggagaactggggaaagctactgatacactagattctacggggaaggtaacagaagaaaaaccttacgataaaataacacaagaagatattgaaggcattctacagaaatttactggaaatataatgcaagtgccccccctctattctgcattaaagaaagatggacaaagactttcgactttgatgaagagaggtgaagtcgtagaagcaaaacctgccaggccagtgactgtatacagtatctcccttcaaaaattccagccaccatttttcacattagatgttgaatgtggaggaggtttttatatcagaagcttggtcagtgacattggaaaagaactatcttcctgtgccaatgtgctagagctgacccgaaccaaacagggaccatttacgctagaagaacatgcccttcctgaagacaaatggacaattgatgacattgcacagtctcttgagcattgctcatctcttttcccagcagagttggcacttaaaaaatcaaaacctgagtctaatgaacaggttttgagctgtgaatatataactctaaatgagccaaagagagaagatgatgtaattaagacgtgttgagattggcctgggaatatcatcattttctagttgacatttgaatcctgtgtgcagatgcagaatgacaagctgcattcaaaagacaaacaatatgtcnnnnnnnnnnnnnngcatgaagaaaaatgtctatcatttacagtttcaatagcacataatttattttctatgcattataaatggccttgcagttggctcagttgtttgttgtgttgtgaaatgttttagattttttgtattgtgaaaatatgaatatgattggattcagaaaaattaactttctgaatttgatctgtcttcagtcttgtgaaaaagttgaacaaatttcctaatcaaagaaaaaagtatgagctcca

SEQ ID NO: 188925 - DNA, 1378 bp, Homo Sapiens
tagagcaatgcttttctcccataatagccaactttgtacaaaaaagttggcttctcttcctgttaaagtcatggaagccctaacattggctgaagtcgatgaccagctgaccattaacatagatgaaggtggatgggcttgtctggtgtgcaaagagaagctcattatttggaagattgctctgtcacctattactaagttatccgtttgcaaagaacttcagctgccacctagtgatttccactggagtgccgacttagtggctctttcttactcttctccctcaggtgaagcacattctactcaggctgttgctgtcatggttgccaccagagaaggatctatccgctattggccaagccttgctggtgaagatacctacacagaggcttttgtagattcgggaggtgataagacttacagtttcctaacagcagtgcagggaggaagttttattttgtcttcatcaggaagccaactaattcggttgatacctgagagctcaggaaagattcatcagcatatcctgcctcaggggcaaggcatgctttcaggaattggtcgaaaagtttcttctctttttggaattttatctcctagtagtgatctcacactttcaagtgttctctgggatagagagagatcaagcttttatagcctgacgagttcaaacatcagtaaatgggaattagatgattcttcagaaaagcatgcatacagttgggatataaatagagccctgaaggaaaacattaccgatgctatttggggatctgaaagtaactatgaagctattaaagaaggagtcaacattcgatatttggacttgaagcaaaactgtgatgggctggtgattttggcagcagcatggcactcagcagacaatccatgtctcatctattactctctgataacaatagaagataatggttgccaaatgtcagatgcagttactgtagaagtcactcaatataatccaccttttcagagataaagtcttgctgtgttgcttggactggagtgcagtgatattcacaggtccatcagagtgcacggtagcctccaactcctggtctcaagcagtcctctcaggtagctgggattacagtctgaagacctgattttgtgtcagttgacggtcccaaacttttcaaaccagactgcctatctgtataacgaaagtgctgtctatgtgtgctccacaggaactgggaaattttctcttccccaggagaaaattgtctttaatgcacaaggagatagtgttttaggtgctggtgcctgtggtggtgttcctatcattttttctagaaacagtggactggtgtctattacttcaagggaaaatgtgtctatattggcagaagacttggaaggg

SEQ ID NO: 188926 - DNA, 1375 bp, Homo Sapiens
tttgtacaaaaaagttggcaagaattattgaacaaaatgctgtagtaccttcagaatggctctcttctgtgtataaacagcagtggtttgctatgctgcgggcagaacaggacagtgaggtggggcctcaagaaatcaataaagaagaactagagggaaacagcatgaggtgtggtagaaagcttgccaaagatggtgaagaacaagtggtgatgaacttggacagcaggcttctgatcttccctttatatatctgctgtaacttcttgtatatatcaccagaaaaaaagaattgaaaataatcgtcacccagaaaatccagaaaactgaagatttcatcagttggaaacagtagcactttgaaaactttttaggccagctttaatttaatggccctactgatattcacatcgaaggtgactaacaatgacaaaggccttatgaactgtacagacaatacagaagattattcttatcctcattgcatttctatgcatatgcgtaagaacattttaaagccaagaaaatatctgtcaaaccatttctgttagaacgatgtcaattcatgcttttaatttagcatcaatagaaaattgctgtaggtaaatctcacatttatctgcaacaaaatatagatttaatttttagcttaaactttgtttctaccttatgttagtggacctcagttatccatctgtaaatttctttttatttggctaaaataatctaaaagaataatttggttggccaattagaaatgcctttttcagttggtgtattgaaagctttcctttaacattttcacctgctcattgtgattcctccttttagtctaatatctttccaggtcatacttgtttttaatcattaaatattttcttcctggttttggagactaagctgataaactttttttaaaacttaagcattgtcattgctattttttttaatttgactttcctaggagtttaagaacagtgaaagttagctttgcaccttcaaatgatcttgaatgagggaaaaatcagtttgattccaaggatatttcttgccttacatggtcttttctttgacagtctgtacacctttattattaggttttgaattatttatgtaccagatattatagttttaaacattttaatattctctgatctttagaattatttatgttcaaattttagttgggaactttgtttcctacttaagctcaggactttttaccctctgaattgagtgccttttgagtgacacatgctaatagaaatttcatagtaaatgtaaattaaggtcagaggatgtaatatggagcctgatgatgaagcattaatgtaaaaatggaacttatttttgtcaaaatgagatgtacacttgt

SEQ ID NO: 188927 - DNA, 1465 bp, Homo Sapiens
ttggctggcgccgccagcagccgccgagctgggttgagccgctgggccgcgccgcgcgccgccgccgtctgggaggctcggcccggccgcccgagcaggccgcgcgcgggccgccgggcccgaggccagagccatgggcgagaccaagatcatctaccacttggatgggcaggagacgccgtaccttgtgaagctgcccctgcccgccgagcgcgtcaccttggcggactttaagggcgttttgcagcgacccagctataagttcttcttcaagtctatggacgacgatttcggagtggtgaaggaggagatctcggatgacaatgccaagctaccatgcttcaatggccgggtggtgtcctggctggtgtcagctgagggctcacacccagacccagcccccttctgtgctgataacccatcggagctgccaccacctatggagcgcacgggaggcatcggggactcccgacccccatccttccaccctcatgctggtgggggcagccaggagaacctggacaatgacacagagacggactctttggtgtctgcccagcgagagcggccacgccggagggatggcccagagcatgcaacccggctaaatggaactgcgaagggggaacggcggcgagaaccagggggttatgatagctcatccacccttatgagcagtgagctggagaccaccagcttctttgactcagatgaggatgactccaccagcaggtggggcttgagtttcatgggtattgtggggcaggtgaccctggaggagccctaaaccctgaggatgcggggcccctgggaggcttatgggctttgtgttggggacccaggccctgcagtgcctcccctcatgggggcagggctgggccagcctggtggggaacgactgtgggccccacaggttcagcagctccacagaacagagcagtgcctcacgcctgatgagaagacacaagcggcggcggcggaagcagaaggtttctcggattgagcggtcctcgtccttcagcagcatcacggactccaccatgtcactcaacatcatcacggtcactctcaacatggaaaaatataacttcttgggcatctccattgtgggccaaagcaacgagcgtggtgacggcggcatctacattggctctatcatgaagggtggggccgtggctgctgatggacgcatcgagccaggagatatgttgttacaggtaaacgagatcaactttgagaacatgagtaatgacgatgcagtccgggtactgcggggagattgtgcacaaaccggggcccatcaccctgactgtagccaagtgctgggacccaagtccacgtggttgcttcacattgcccagggagcgagcccatccgcgcccattgaccctgcggccctgggtctcccacactggcagcccatgaccgggcacccttctctgcataacgggcgtgagcccctccc

SEQ ID NO: 188928 - DNA, 2034 bp, Homo Sapiens
  misc_feature (1655)..(1713): n is a, c, g, or t
ttggagcccccttctgtgctgataacccatcggagctgccaccacctatggagcgcacgggaggcatcggggactcccgacccccatccttccaccctcatgctggtgggggcagccaggagaacctggacaatgacacagagacggactctttggtgtctgcccagcgagagcggccacgccggagggatggcccagagcatgcaacccggctaaatggaactgcgaagggggaacggcggcgagaaccagggggttatgatagctcatccacccttatgagcagtgagctggagaccaccagcttctttgactcagatgaggatgactccaccagcagaaggtttctcggattgagcggtcctcgtccttcagcagcatcacggactccaccatgtcactcaacatcatcacggtcactctcaacatggaaaaatataacttcttgggcatctccattgtgggccaaagcaacgagcgtggtgacggcggcatctacattggctctatcatgaagggtggggccgtggctgctgatggacgcatcgagccaggagatatgttgttacaggtaaacgagatcaactttgagaacatgagtaatgacgatgcagtccgggtactgcgggagattgtgcacaaaccggggcccatcaccctgactgtagccaagtgctgggacccaagtccacgtggttgcttcacattgcccaggagcgagcccatccggcccattgaccctgcggcctgggtctcccacactgcagccatgaccggcaccttccctgcatacggcatgagcccctccctgagcaccatcacctccaccagctcctccatcaccagttccatccctgacacagagcgcctagacgacttccacttgtccatccacagtgacatggctgccatcgtaaaagccatggcctcccctgaatcagggttggaggtccgtgaccgcatgtggctcaagattaccatccctaatgctttcatcggctcagatgtggtggactggctgtaccacaatgtggaaggcttcacggaccggagggaggcccgcaagtatgccagcaacctgctgaaagctggcttcatccgccataccgtcaacaagatcaccttctccgagcagtgctactacatcttcggtgacctctgcggcaacatggccaacctgtctctccacgatcacgatggctccagtggcgcctctgaccaggacacactggcccctttgccgcacccgggggccgccccttggcccatggctttcccgtaccagtacccgccacccccgcacccatacaacccgcacccgggcttcccggagctgggctacagctacggcgggggcagcgccagcagtcagcacagcgaaggcagtcggagcagtggctccaaccgtagcggcagcgatcggaggaaggagaaggacccgaaggccggggactccaagtccgggggcagcggcagcgaatcggaccacaccacacgcagcagcctgcgggggccgcgggagcgggcgcccagcgagcgctcagggccggcggccagcgagcacagccaccgcagccaccattccctggccagcagccttcgcagccaccacacacacccgagctacggtcctcccggagtgccccctctctacnnnnnnnnnnnnnnnnnnnnnnnnnnnnnnnnnnnnnnnnnnnnnnnnnnnnnnnnnnntccgggccgcgacctggcctcagtgctctcggaactgaccgccagcagacagtccttccgcatggccatgggaaaccccagtgagttctttgtggatgtgatgtgagcagggcccctcccccagctccattccgctctcaccccagccggctgcgttcctctctccatccgtccgtcttttttactttgtctggtacctgaaagggaaataaaaggaactaaatccaggtgcgctaactgctcgcaaggtgctgcgagggtggggtgcacctaccgattggctctgcagctctctaacctgcctctggctccagttcgttt

SEQ ID NO: 188929 - DNA, 1081 bp, Homo Sapiens
gggatgcccccacccccaagggggctccagcttccagttgaaccggtgagggcaggggcaatgggatgggagggcaaagagggaaggcaacttaggtcttcagagctggggtgggggtgcccctctggatgggtagtgaggaggcaggcgtggcctcccacagcccctggccctcccaagggggctggaccagctcctctctgggaggcacccttccttctcccagtctctcaggatctgtgtcctattctctgctgcccataactccaactctgccctctttggttttttctcatgccaccttgtctaagacaactctgccctcttaacctgattccccctctttgtcttgaacttccccttctattctggcctaccccttggttcctgactgtgccctttccctcttcctctcaggattcccctggtgaatctgtgatgcccccaatgttggggtgcagccaagcaggaggccaaggggccggcacagcccccatcccactgagggtggggcagctgtggggagctggggccacaggggctcctggctcctgccccttgcacaccacccggaacactccccagccccacgggcaatcctatctgctcgccctcctgcaggtgggggcctcacatatctgtgacttcgggtccctgtccccacccttgtgcactcacatgaaagccttgcacactcacctccaccttcacaggccatttgcacacgctcctgcaccctctccccgtccataccgctccgctcagctgactctcatgttctctcgtctcacatttgcactctctccttcccacattctgtgctcagctcactcagtggtcagcgtttcctgcacactttacctctcatgtgcgtttcccggcctgatgttgtggtggtgtgcggcgtgctcactctctccctcatgaacacccacccacctcgtttccgcagcccctgcgtgctgctccagaggtgggtgggaggtgagctgggggctccttgggccctcatcggtcatggtctcgtcccattccacaccatttgtttctctgtctccccatcctactccaaggatgccaa

SEQ ID NO: 188930 - DNA, 1291 bp, Homo Sapiens
ttggggagaagattatagagaaaaacagaagcttggcatggtggaatggattgaacctcctaaacgagaacgcaaagcaaactacgcagtggatgcctactttagagaggctttgcgtgtcagcgagccaaagattccaaaggctccacggcctccaaaacagccaaatgttcaggattttcaatttttcccaccacgcttatttgagctcctggaaaaggaaattctttattatcggaagacaataggctataaggttccaaggaatcctgatatcccaaatccagctctggctcaaagagaagagcaaaaaaagattgatggagctgaacctcttacaccagaagagactgaagaaaaggaaaaacttctcacacaaggtttcacaaactggactaaacgagattttaaccagtttattaaagctaatgagaaatatggaagagatgacattgataacatagctcgagaggtagagggcaaatcccctgaggaggtcatggagtattcagctgtattttgggaacgttgcaatgaattacaggacattgagaaaattatggctcaaattgaacgtggagaagcaagaattcaacgaaggatcagtatcaagaaagccctggatgccaaaattgcaagatacaaggctccatttcatcagttgcgcattcagtacggaaccagcaaaggaaagaactatactgaggaagaagatagattcttgatttgtatgttacacaaaatgggctttgatagagaaaatgtatatgaagaattaagacagtgtgtacgaaatgctccccagtttagatttgactggtttatcaagtctaggactgccatggaattccagagacgctgtaacactctgatttcattgattgagaaagaaaatatggaaattgaggaaagagagagagcagaaaagaagaaacgggcaactaaaactccaatgtcacagaaaacaaaagcagagtccgctactgagagctctggaaagaacgatgtcaagaaggtgaaatcctaaagcctacaaataaagttttaaatgggaaactgctattttcttgttcccatcttcaaatgctaattgccagttccagtgtattcatggtactctaagaaaaatctcttcggttttgatttcctgcatattttatatattttacaatgctttctacctgaaatgtgtacctttatattttatggcattctactatttttgtgtactgtatttcgtgcatttcatgtcttcatcaaaatcctctcagtccttgttcttttgacgctt

SEQ ID NO: 188931 - DNA, 981 bp, Homo Sapiens
  misc_feature (126)..(136): n is a, c, g, or t
tgcaacaaattcgaccgaaaaaatgtttttttataattgccaactttgtacaaaaaagttggattttgtcatttaaggatgttatataaatggaataatatggtatgtaacctttcgaaattagcnnnnnnnnnnnacttagcataattcccttgaggttcattcagattgttaactgtattaatagttctttcctttttattgctgagtaatattatatgatatggatgtatcatggtttgtttaaccagtcatccataaatgacatttacccccactcctaattctggtggaatctattaataccctgtgtgaatattgtcctgaaaaatagcagttttggaaattctataccacagaaatcatacagttaaatagttgtcagcgttttaaagataatgattgggttgcagaaattaaaaatctttattacttcatttaggaattccagagacgctgtaacactctgatttcattgattgagaaagaaaatatggaaattgaggaaagagagagagcagaaaagaagaaacgggcaactaaaactccaatgtcacagaaaagaaaagcagagtcagctactgagagctctggaaagaaggatgtcaagaaggtgaaatcctaaagcctagaaataaagttttaaatgggaaactgctattttcttgttcccatcttcaaatgctaattgccagttccagtgtattcatggtactctaagaaaaatctctttggttttgatttcttgcatattttatatattttacaatgctttctacctgaaatgtgtagctttatattttatggcattctagtatttttgtgtactgtattttgtgcatttcatgtcttcatcaaaatcctctcagtccttgttcttttgaagcttgtgctgaggttttagcttttctatgttttatatgccgctgctttgaaagagacctagattctatagttgtattattgttgtttcatacttta

SEQ ID NO: 188932 - DNA, 785 bp, Homo Sapiens
ttggcgaatgagtaactcctgtcaccactctgaaggtccagacagaaggttttgacacattcttagcactgaactcctctgtgatctaggatgatctgttccccctctgatgaacatcctctgatgatcaaggctcccagcaggctactttgaagggaacaatcagatgcaaaagctcttgggtgtttatttaaaatactagtgtcactttctgagtacccgccgcttcacaggctgagtccaggcctgtgtgctttgtagagccagctgcttgctcacagccacatttccatttgcatcattactgccttcacctgcatagtcactcttttgatgctggggaaccaaaatggtgatgatatatagactttatgtatagccacagttcatccccaaccctagtcttcgaaatgttaatatttgataaatctagaaaatgcattcatacaattacagaattcaaatattgcaaaaggatgtgtgtctttctccccgagctcccctgttccccttcattgaaaaccaccacggtgccatctcttgtgtatgcagggctatgcacctgcaggcacgtgtgtatgcactccccgcttgtgtttacacaagctgtggggtgttacgcatgcctgcttttttcacttaataatacagcttggagagatttttgtatcacattataaatcccactcgctctttttgatggccacataataactactgcataatatggatacgccttatttgatttaactagttccctaatgatggacttttaagttgtttcc

SEQ ID NO: 188933 - DNA, 852 bp, Homo Sapiens
gctgctagttcaagtcctgactcaccataacattaagaaaaatcaggattcccttataaagaaagtgcaatgtctgaggaaatttcaactgtgaaaactacaacatatttactaaaatgcatgaattttcttgtttttggaattattcctggactattcagtagccactcagatgccactgtgtgaaagggccataaatgttgcctgctgcttgaacatctatttttttctcttccagtgcttgataactctgggagataatacactgcagtcgtactagtggttaagatatttgggaataaaattaatacttttgactagaagcgtctaaggataaaccaacagaaattgaatctggatacatctttaagatgtaatcagaaatgaccagatgactctagttagaatttttgaaggagggattacattaatatttcaaaacccttactctgtagataagtgtattttaattttttcccctcgtatacttttatttacctggggaaggagcttttagggttggggggtggtttgctatctctttagctagcagaatagtgtgcctttgatcctcacacatcctgtattatggacacagtagccatgcttcacggggaggtcagagctggctaccagcagtcttgccctttactgagcttagtgtcatctttggatgctgtcatatgctgctttgagtgaaccagagaaacagccatttgcagcatgagaaagccccaaagctctgggatttacctccactttagtaataatgaatattttttagcattagaatgtgttatgtcatttgaattaattttgactacactttggcttggggagaggaattatttt

SEQ ID NO: 188934 - DNA, 1014 bp, Homo Sapiens
ttggctttagtagacaacctgcatccatttaaattaaataatactttctacaatagtgtgatatataaggccacaatatttattttggacaaaccccttaaagtagcgattttattatcaatgttattcattcttttgaaatataaagtacttcagctgaattaaggttgcagataatttttaaaatacaacacacatcatgactagtatattaaaattatttatattcagatatttatatctaatatcaaatgaaaatttactaccaaattttcacagtagacattaatcagtctgacatgcttattgatcccataggtgtaattatagatcaacatgattttagtgtctattcttttattttactaaattaggaacgcagcatttacagaacaaataaacacaagtgacgtggccaccccaggatctaacagctcttcagtgagctatgttgcaagctcagaagtaatccactaacgaaccaagtcagactccagttcttcatcaaaaggtgctggtggaggttgtcagacgccttccaatatagatccttcacagaaaaattatcagtagttaatgtatcttgtgattcacaggagactgtgttacagctgaaacagggtagctcactgtggttagagcttatgcaaggggactggtgattttatacccattataaaaattttgtaatgaatctatctgtgatcttttatctagtgttttatcaatatgtattttgtattaattaacttagaaaacatcagatcgtattcttacatagaaggatcaccaaaccgaatgctgtttccacacagaaagcttctgctttgttccaactcagtgctgggggaagtcacctaccagggcaagatggtgttgctagttcatcaccaccagcctcaccaaagccaactgcttaaaaatgaagcccctgccctcatgtggtttaagtttggtagtgggagagatgtcccaaactaaagatgcaggccaacttttttgtacaaagttggc

SEQ ID NO: 188935 - DNA, 1949 bp, Homo Sapiens
  misc_feature (1478)..(1506): n is a, c, g, or t
caactttgtacaaaaaagttggccgctttcccaccgcccgcagctgaagcacatcccgcagcccggcgcggactccgatcgccgcagttgccctctggcgccatgtcgcagaacggagcgcccgggatgcaggaggagagcctgcagggctcctgggtagaactgcacttcagcaataatgggaacgggggcagcgttccagcctcggtttctatttataatggagacatggaaaaaatactgctggacgcacagcatgagtctggacggagtagctccaagagctctcactgtgacagcccacctcgctcgcagacaccacaagataccaacagagcttctgaaacagatacccatagcattggagagaaaaacagctcacagtctgaggaagatgatattgaaagaaggaaagaagttgaaagcatcttgaagaaaaactcagattggatatgggattggtcaagtcggccggaaaatattccccccaaggagttcctctttaaacacccgaagcgcacggccaccctcagcatgaggaacacgagcgtcatgaagaaagggggcatattctctgcagaatttctgaaagttttccttccatctctgctgctctctcatttgctggccatcggattggggatctatattggaaggcgtctgacaacctccaccagcaccttttgatgaagaactggagtctgacttggttcgttagtggattacttctgagcttgcaacatagctcactgaagagctgttagatcctggggtggccacgtcacttgtgtttatttgttctgtaaatgctgcgttcctaatttagtaaaataaaagaatagacactaaaatcatgttgatctataattacacctatgggatcaataagcatgtcagactgattaatgtctactgtgaaaatttggtagtaaattttcatttgatattagatataaatatctgaatataaataattttaatatactagtcatgatgtgtgttgtattttaaaaattatctgcaaccttaattcagctgagtactttatatttcaaaagaatgaataacattgataataaaatcgctactttaaggggtttgtccaaaataaatattgtggccttatatatcacactattgtagaaagtattatttaatttaaatggatgcaggttgtctactaaagaaagattatatataactatgctaattgttcataatcaacagaaaccaagatagagctacaaactcagctgtacagttcgtacactaaactcttcttgcttttgcattataaggaattaagtctccgattattaggtgatcaccctggatgatcagttttctgctgaaggcacctactcagtatcttttcctctttatcactctgcattggtgaatttaatcctctcctttgtgttcaacttttgtgtgcttttaaaatcagctttattctaagcaaatctgtgtctactttnnnnnnnnnnnnnnnnnnnnnnnnnnnnntctttgccaaatccttcagattactgtatttacatatggtttaaaatcagacgtcatgatagcttcttaatgaaaccaggactggtccctattttgacattatctttcctacagcaaactttttagaaaggctgcctgccgccttgatgtttcacctttccacgcttaattcgggtgttaaatctaacgttttcatttgtaaaaatctttgttgatgctaccttggaagcagtcatctctcagtcttacatttggagaatgtggatggcatgacatcagaattcctttatataatttaacttcagaatagtctgagatcatcgaagcacgatggtcaagggaattccgtttttgttttagagcaaatatgtttgctgtttgtctttcatcacaaacatcagtggagtttcagcaccttacagagctcagtgaaccccctccaa

SEQ ID NO: 188936 - DNA, 1453 bp, Homo Sapiens
tttttaattgactttattacactgctgcaaaaggaagcaatatcttctgttccctctcagtgaggtagaacaattgacctcccaaattaaaacccaggagcagatctgaagaaaaaaggagagttcaggcaaagctgtagaattacattttgatgccttcctgttgactgagttgcgataatgttttcttaatccgcaatgctgtaagcctagctgctccattggcataccaacattctctcataattttagccattactctcaaggcttcacagctctgccatctgtttgggatatttggccttaacttctgttcacaaacaacttttctcatttcttcaactgatgggtcagaaggtacaagatcataataaggcagttggtaatcttcatgaattccaccaatggaacatcgtcgagcaatttcccagaatactaagcccattgcatagatgtcagcacgtttgaaggattcaaaatgtttcatatttatggaatcatcgagaacttcaggggccatgtacctttttgttcccactctgtggtttggagcaatatcaatggtatctgtggctgaatcatgtcttactgccagtcctaagtctgcaatacagcaagttccattcttctttaccaagatattctttgatttcaaatctctatgagcaatggctggctttccttgggtaccaacaatctccatgtgaagatgggcaagaccgctcgccgtggacagagcaagttttatcattccttccacagtaactgtgtatctgtttaagtaatcaaaaagggatccatgctcatgataatctgacaccaaccagagctgagtccaagtaccattgtctttattgtctgctgctataaatcccaggatgttttcatgacgtaacattacagtttgataaatctctgcctcacggaaccacgaacgttcttctctagaggagaatatcttaacagcaacttcttctccccgccactttcctctccaaacttctccaaatcgacctttgccaatgctttcttgtaacacaatagttctcgcaattgttctctgaacaagcaatggtaaacctgagccagaacctgacgttgtcatatcataaattaagtctttcaacgtagtaccctctgaaataaaagggcgatctaatgaagggtcctcttcatttggcactcgatggtgaatgacagtgcggttgtggcagatatagaccatcaacatgagtgagatgcagacgaagcacactggtccagcaatgacagctgccagttccacaggaccaaggccaggtgatgactttactgaaaaagggccagtagttggaagttctattttattgcaatggtcctgattgcagcaatatgttgtagtcacagacccagtttttgaagagggtgcacatacaaacggcctatctcgaggaattaagtcaatttcagccaa

SEQ ID NO: 188937 - DNA, 1662 bp, Homo Sapiens
catgtttagtgactttacatgtgtatacatacaaatgtacacagtcatatatgactagtggtacatggaatctcaatttaattgtaaaagtgaaggagttctaaaactagttttagtatagtaagtgggatatagtaagaatgtcctacaatttaaaagcttatttggttatcttcaatggattttgaatgtattcaatactagatttgcgagtgactatgcctttttagtaaacaaaagaaaggctataatgtagaaagtatatggaataagcataacatctgtcctaatctaattttcaggcacatctccagacttcaatttggctgaaataattcatgccacggacctgtgcacatgcctggaattgagagacacagttaaaagactccaagttgctttctgccttttgaaaactcctgaaaaccatccctctggactctggaattctacacagctcaaccaagactttgcttgaatgtttacattttctgctcgctgtcctacatatcacaatatagtgttcacgttttgttaaaactttggggtgtcaggagttgagcttgctcagcaagccagcatggctaggatgagctttgttatagcagcttgccaattggtgctgggcctactaatgacttcattaaccgagtcttccatacagaatagtgagtgtccacaactttgcgtatgtgaaattcgtccctggtttaccccacagtcaacttacagagaagccaccactgttgattgcaatgacctccgcttaacaaggattcccagtaacctctctagtgacacacaagtgcttctcttacagagcaataacatcgcgaagactgtggatgagctgcagcagcttttcaacttgactgaactagatttctcccaaaacaactttactaacattaaggaggtcgggctggcaaacctaacccagctcacaacgctgcatttggaggaaaatcagattaccgagatgactgattactgtctacaagacctcagcaaccttcaagaactctacatcaaccacaaccaaattagcactatttctgctcatgcttttgcaggcttaaaaaatctattaaggctccacctgaactccaacaaattgaaagttattgatagtcgctggtttgattctacacccaacctggaaattctcatgatcggagaaaaccctgtgattggaattctggatatgaacttcaaacccctcgcaaatttgagaagcttagttttggcaggaatgtatctcactgatattcctggaaatgctttggtgggtctggatagccttgagagcctgtctttttatgataacaaactggttaaagtccctcaacttgccctgcaaaaagttccaaatttgaaattcttagacctcaacaaaaaccccattcacaaaatccaagaaggggacttcaaaaatatgcttcggttaaaagaactgggaatcaacaatatgggcgagctcgtttctgtcgaccgctatgccctggataacttgcctgaactcacaaagctggaagccaccaataaccctaaactctcttacatccaccgcttggctttccgaagtgtccctgctctggaaagcttgatgctgaataacaatgccttgaatgccatttaccaaagacagtcgaatccctcccc

SEQ ID NO: 188938 - DNA, 2324 bp, Homo Sapiens
ttggctaataaagtataactcaaatattggccaagctaggactaattagtaaattttaatataaggtgactttacagaaaaacccaagaagaccttaaacattttaatagacaacagtttatttacagtccaatagccattcagcagtttttaaagttatgcttccgctattgctttttgccatactagcattttaggacatcatgtttaatatcatgaaaatagaaaaatgagacttttcttttacagctcatgaagcagtcaaagactgtggatgtactgtctagaaagttagcaacaaaaaagaaggctatttctacaaaagttatgaatagtgctgtgatgaggaaaactgccagttcttgcccagctagcctgacctgtgactgctatgcaacagataaagtttgtagtatttgcctttcaaggcgtcagcaggttgcccctagggcaggtacaccaggattcagagcaccagaggtcttgacaaagtgccccaatcaaactacagcaattgacatgtggtctgcaggtgtcatatttctttctttgcttagtggacgatatccattttataaagcaagtgatgatttaactgctttggcccaaattatgacaattaggggatccagagaaactatccaagctgctaaaacttttgggaaatcaatattatgtagcaaagaagttccagcacaagacttgagaaaactctgtgagagactcaggggtatggattctagcactcccaagttaacaagtgatatacaagggcatgcttctcatcaaccagctatttcagagaagactgaccataaagcttcttgcctcgttcaaacacctccaggacaatactcagggaattcatttaaaaagggggatagtaatagctgtgagcattgttttgatgagtataataccaatttagaaggctggaatgaggtacctgatgaagcttatgacctgcttgataaacttctagatctaaatccagcttcaagaataacagcagaagaagctttgttgcatccattttttaaagatatgagcttgtgataatggatcttcatttaatgtttactgttatgaggtagaataaaaaagaatactttgtaatagccacaagttcttgtttagagaccagagcaggattaataatttattttaacattttagtgtttggtggcacattctaaaatatagattaagaatacttaaaatgcctgggatagttcttgggactaacaacatgatcttctttgagttaaacctacctaagtagattttaggtgggttcctattaggtcagatttttagcttccctaattacctttcactgacatatacagaaaaaggagcagttttagttttaattaattaaaattaacagatgtgatgaggattaaatgaatcaaaagacttaatttgtagattcttttagagttatgagctaggtatagtttggggaaactcaacctggtgctggtgctcttaacaattttgtaaataaagaagataatttccttttctagaggtacatattaggccttctatgaacactaaaacaatgaggaaatgttggtcatggggcaaagtatcacttaaaattgaattcatccatttttaaaaaacacttcatgaaagcattctggtgtgaattgccatttttttcttactggcttctcaattttcttccttctctgcccctacctaaaacattctcctcggaaattacatggtgctgaccacaaagtttctggatgttttattaaatattgtacgtgtttacagttgggaatttaaaataatacatacactggttgataaagggaagctgcaggaccagggtgaagaattgatagtccaaatgcttttcttttttgagttgtatattttttcacaccatcttagatataattaggtagctgctgaaaggaaaagtgaatacagaattgacggtattattggagatttttcctctgcgtagagccatccagatctctgtatcctgttttgactaagtcttaggtgggttgggaagacagataatgaagtaggcaaagagaaaaggacccaagatagaggtttatattcagaaatggtatatatcaatgacagcatatcaaacttcctatgggaaaaagtctggtgggtggtcagctgacagatttcccatttagtagtcatagaatacagaaatagtttagggacatgtattcattttgttattttgagcattgataggtcagtatatctacctaatctgtttggtaagtataggatatataaaccattaccattgatctgtcttatgccataatctt

SEQ ID NO: 188939 - DNA, 1403 bp, Homo Sapiens
  misc_feature (232)..(253): n is a, c, g, or t
  misc_feature (454)..(468): n is a, c, g, or t
aaaaagttgggtccgtgtaggcctttctccaaacaagcagctactaaggaaaatgattcaagtgaagaagtagatgtgtttcagggtagctctcctgtcgatgatattccacaggaagaaacagaggaggaggaagtttctacagtaaatgtacggcggcgaagtgctaaaagggaacggcgatgaacaaatgtaattaataactttctctgtgaaagctttggaaaaatcnnnnnnnnnnnnnnnnnnnnnnggtcaagcttgaggctgaataaagcctttgatgcacaaaatgggactgctgaaaagtggacagttggaccttactttggtgaccccatacatttgtggtcacatgctttaaccctacacatggtaacattgactatggagtcttgtgaaagtgtaatgtgcgatggctatgtagacataaagaaaaaacttgtaaatatcnnnnnnnnnnnnnnnaatgtttctgatttctgaagtgcttgtatagcttttatctgcggctttaaactgacagtacccgactgtttattggatctattgatttgaaaagaatttgttaggatagatcttaagcagtaatctgtcagtgtttgtatttgtattctctgcaattttactgtgaaaaaaaatttgttttcaacaattggtgtcattttcttgatgtcactatttgttggagagttaaatggtctcttccctttgtgtatcttacctagtgtttactcctgggcacccttaatcttcagaggtgctaaattgtctgccattacaccagaaggatgcctctgataggaggacaaccatgcaaattgtgaaatagtcctgaagttcttggattactttacacctcagtattgatttgtcccagaattttctggcctttcatggcaatgaaaattttaagaagaaagatttaaagtattttaattttaaagagtgtgttataaaataatgtactgaattctttatcccattttatcatcctttcagtttttattaatctactgtatcaataaaattctgtaatttgaatgagtttttaatagtctagaatgttattgtgtatagatatttcctcttgaacgttatgttcagaaaatgcaaattacactataatataaaacctgatatatacacattagaaatattccagttctccgtaacagtgtaaagttaatcagaaagaaaaaattttattgatgcagtgtgtctttataaagctgttcttgaaagccaaagtgttttgtattttatagtgagttgcatgtttttgaaaaaagtgctgaaaatgggatgtgctgttttctgtaaattcatatttagccatagtatatgatagattgccccataacatagattttcatcagagtttattattgtactttattttg

SEQ ID NO: 188940 - DNA, 1014 bp, Homo Sapiens
  misc_feature (799)..(817): n is a, c, g, or t
ttggctgagaattaagtttgtacttccataagcttggattttaaacactgatagtatctcatgagtaatgtgtgttttgggagagggagggatgctgattgatatttcacattgtatgaaataccatgtttgaaactcatagcaataatgctatgctgttgtgatccctctcaagttctgcatttaaaatatattttttctttataggaattgatgtataccatgaagtcattgtcagttgtagtagctctgatgttgaatgagatatcatgttttagcattccattttactgactagggtagaagaacacttttcttggctacatttggaggatacccagggagtcttgggtgttccttatctggggaagcaaacatttcactagtctctttttttcatcctttaaattgtaaattaaggattactcaagctcaccattattcaagattgggactcgcttcccagtcgacactctgccctgcctgtcattgctgcaaagagctgctgctttgccaacctaagcaaagaaaatacggcttctcttgcattattttcccttttggttggtttgttttctagaagtacgttcagatgctttggggaatgcaatgtatgatttgctagctctctcaccacttaactcactgtgaggataaatatgcatgctttttgtaattaactggtgctttgaaaatcttttttaagggagaaaaatctcaaccaaagttatgctcatccagacaagctgacctttgagttaatttcagcacaactcattcttcagtgcctcatgactgnnnnnnnnnnnnnnnnnnncgaaagcatcttcacaatgaagcttccagatagcaccgttttgctaaaagatacattctcattgttttccaacagtgatggcttccacataaattaaacaaactaagtgcttgtaaataatttattacagtttactctatcgcatttctgtaacatgaaatgcatgcccttcttcaggggaagactgtggtcaagtt

SEQ ID NO: 188941 - DNA, 1532 bp, Homo Sapiens
  misc_feature (50)..(62): n is a, c, g, or t
gttggtttaaaggttcatttgtatgataaattcatatgtgtatatataannnnnnnnnnnnngtctagtgagtttcaacatttttaaagttttcaaaaagccatcggaatgttaaattaatgtaaagggaacagctaatctagaccaaagaatggtattttcacttttctttgtaacattgaatggtttgaagtactcaaaatctgttacgctaaacttttgattctttaacacaattatttttaaacactggcattttccaaaactgtggcagctaactttttaaaatctcaaatgacatgcagtgtgagtagaaggaagtcaacaatatgtggggagagcactcggttgtctttacttttaaaagtaatacttggtgctaagaatttcaggattattgtatttacgttcaaatgaagatggcttttgtacttcctgtggacatgtagtaatgtctatattggctcataaaactaacctgaaaaacaaataaatgctttggaaatgtttcagttgctttagaaacattagtgcctgcctggatccccttagttttgaaatatttgccattgttgtttaaatacctatcactgtggtagagcttgcattgatcttttccacaagtattaaactgccaaaatgtgaatatgcaaagcctttctgaatctataataatggtacttctactggggagagtgtaatattttggactgctgttttccattaatgaggagagcaacaggcccctgattatacagttccaaagtaataagatgttaattgtaattcagccagaaagtacatgtctcccattgggaggatttggtgttaaataccaaactgctagccctagtattatggagatgaacatgatgatgtaacttgtaatagcagaatagttaatgaatgaaactagttcttataatttatctttatttaaaagcttagcctgccttaaaactagagatcaactttctcagctgcaaaagcttctagtctttcaagaagttcatactttatgaaattgcacagtaagcatttatttttcagaccatttttgaacatcactcctaaattaataaagtattcctctgttgctttagtatttattacaataaaaagggtttgaaatatagctgttctttatgcataaaacacccagctaggaccattactgccagagaaaaaaatcgtattgaatggccatttccctacttataagatgtctcaatctgaatttatttggctacactaaagaatgcagtatatttagttttccatttgcatgatgtttgtgtgctatagatgatattttaaattgaaaagtttgttttaaattatttttacagtgaagactgttttcagctctttttatattgtacatagtcttttatgtaatttactggcatatgttttgtagactgtttaatgactggatatcttccttcaacttttgaaatacaaaaccagtgttttttacttgtacactgttttaaagtctattaaaattgtcatttgacttttttctgttt

SEQ ID NO: 188942 - DNA, 1315 bp, Homo Sapiens
ttggctgggtgtatcagctgggtgaggcgggccctgcagtcctaagcatcgatgaggacattggggagcagttcgcagctgtcagcctggacaggactctccagtttggccacatgtccgtcacagtggagagacagatgatccaggaaaccaagggtgacacggtggcccctggggcagaggggctgctcaacctgcggccagacgacttcgtcttctacgtcggggggtaccccagtaccttcacgccccctcccctgcttcgcttccccggctaccggggctgcatcgagatggacacgctgaatgaggaggtggtcagcctctacaacttcgagaggaccttccagctggacacggctgtggacaggccttgtgcccgctccaagtcgaccggggacccgtggctcacggacggctcctacctggacggcaccggcttcgcccgcatcagcttcgacagtcagatcagcaccaccaagcgcttcgagcaggagctgcggctcgtgtcctacagcggggtgctcttcttcctgaagcagcagagccagttcctgtgcttggccgtgcaagaaggcagcctcgtgctgttgtatgactttggggctggcctgaaaaaggccgtcccactgcagcccccaccgcccctgacctcggccagcaaggcgatccaggtgttcctgctggggggcagccgcaagcgtgtgctggtgcgtgtggagcgggccacggtgtacagcgtggagcaggacaatgatctggagctggccgacgcctactacctggggggcgtgccgcccgaccagctgcccccgagcctgcgatggctcttccccaccggaggctcagtccgtggctgcgtcaaaggcatcaaggccctgggcaagtatgtggacctcaagcggctgaacacgacaggcgtgagcgccggctgcaccgccgacctgctggtggggcgcgccatgactttccatggccacggcttccttcgcctggcgctctcgaacgtggcaccgctcactggcaacgtctactccggcttcggcttccacagcgcccaggacagtgccctgctctactaccgggcgtccccggatgggctatgccaggtgtccctgcagcagggccgtgtgagcctacagctcctgaggactgaagtgaaaactcaagcgggcttcgccgatggtgccccccattacgtcgccttctacagcaatgccacgggagtctggctgtatgtcgatgaccagctccgcagatgaagccccaccggggaccacccccccgagctccagccgcagcctgaggggccccc

SEQ ID NO: 188943 - DNA, 1203 bp, Homo Sapiens
ttggcacagggatcccggggagcggccccagactcgtaaattatggccgcatctccgcacactctctcctcacgcctcctgacaggttgcgtaggaggctctgtctggtatcttgaaagaagaactatacaggactcccctcacaagttcttacatcttctcaggaatgtcaataagcagtggattacatttcagcactttagcttcctcaaacgcatgtatgtcacacagctgaacagaagccacaaccagcaagtaagacccaagccagaaccagtagcatctcctttccttgaaaaaacatcttcaggtcaagccaaagcagaaatatatgagatgagacctctctcaccgcccagcctatctttgtccagaaagccaaatgaaaaggaattgatagaactagagccagactcagtaattgaagactcaatagatgtagggaaagagacaaaagaggaaaagcggtggaaagagatgaagctgcaagtgtatgatttgccaggaattttggctcaactatccaaaatcaaactcacagctctagttgtaagtaccactgcagctggatttgcattggctccgggcccttttgactggccctgtttcctgcttacttctgttgggacaggccttgcatcctgtgctgccaactccatcaatcagttttttgaggtgccatttgactcaaacatgaataggacaaagaacagaccgctggttcgtggacagatcagcccgttgctagctgtgtcctttgccacttgttgtgctgttccgggagttgccattctgaccttgggggtgaatccactcacaggagccctggggctcttcaacattttcctgtatacctgctgctacacaccactgaaaaggatcagcattgccaacacatgggtcggagctgtggttggggccatcccgcctgtcatgggctggacagcggccacgggcagcctcgatgctggcgcatttctcctgggaggaatcctctactcctggcagtttcctcatttcaacgccctgagctggggcctccgtgaagactactcccggggcggctactgcatgatgtcggtcacccacccgggcctgtgccggcgcgtggcgctgcgccactgcctggccctgctcgtgctgtccgcagcagcccctgtgctggacatcaccacatggaccttccccatcatggcccttccc

SEQ ID NO: 188944 - DNA, 911 bp, Homo Sapiens
ttggctctgtcctatctcccagatacagcatcatgcaggcctgctgggccttggagcccacccacagacccaccttccagcagatctgctccttccttcaggagcaggcccaagaggacaggagagagcgggactataccaatctgccgagcagcagcagaagcggtggcagcggcagcagcagcagtgagctggaggaggagagctctagtgagcacctgacctgctgcgagcaaggggatatcgcccagcccttgctgcagcccaacaactatcagttctgctgaggagttgacgacagggagtaccactctcccctcctccaaacttcaactcctccatggatggggcgacacggggagaacatacaaactctgccttcggtcatttcactcaacagctcggcccagctctgaaacttgggaaggtgagggattcaggggaggtcagaggatcccacttcctgagcatgggccatcactgccagtcaggggctgggggctgagccctcaccccccgcctcccctactgttctcatggtgttggcctcgtgtttgctatgccaactagtagaaccttctttcctaatccccttatcttcatggaaatggactgactttatgcctatgaagtccccaggagctacactgatactgagaaaaccaggctctttggggctagacagactggcagagagtgagatctccctctctgagaggagcagcagatgctcacagaccacactcagctcaggccccttggagcaggatggctcctctaagaatctcacaggacctcttagtctctgccctatacgccgccttcactccacagcctcacctctcccacccccatactggtactgctgtaatgagccaagtggcagctaaaagttggggggtgttctgccc

SEQ ID NO: 188945 - DNA, 761 bp, Homo Sapiens
ttggacttcacggaccgcttgggtgtactggaggcggattcagccatccgtgcagcgggcattaagtgcctgctcacctacaagcctgatgtctacacctacctgggcatctaccgggccaatcgctggcacctctgccccactctctatgagagccgtttccagcttgggggtagtgcccgtggctcccgagtgcttgaccgtgccaacaacgtggaactgacctagaaggggccaaattggggagactgcccactcccccctccatgctggggttggatcctcctgtcttcctccttgtcccatgaaggccacaccccccagctctggggactcctaggtcacttgggaactacctgcatcttcagtccccttgaacttctgccctctgttcagggctgacacaagccccacaggctggggggctccggttccctgagggatgagccttcagcctccctttgtaatgctgctcctctccactgcccagcaccatgagttgggtgcagacacctagaaggagagacttcttggaacgctcatcccccgctatacctccccttcctcctgcatctccccttctttccttccccctcaggagagagaaaacttagtgcttccagcccttcttggagccttcatggtccaggggtaggggccccactggcctgagcatgccattttgaggggagggtagttgtgcctacttatcccctggcagaggggatgccaggaccatggacatgaggcttgcccatccc

SEQ ID NO: 188946 - DNA, 997 bp, Homo Sapiens
ttggccgagacttctcaggagctagcagagggacagagaagaggatcccagggtgacagtaaacagcaaaatggcccaccaagaaaacacattgtggagcgctatacagagttttatcatgtacccactcacagtgatgccagcaagaagagactgattgaggatactgaagactggcgtccaaggactggaacaactcaatctcgctctttccgaatccttgcccagatcactgggactgaacatttgaaagaatctgaagccgataatacaaagaaggcaaataactctcaggagccttctccgcagttggcttcctcggtagcttccacacggagcatgcccgagagcctggacagcccaacctctggcagaccaggggttaccagcctcacaactgcagctgccttcaagcctgtaggatccactggcgtcatcaagtcaccaagctggcaacggccaaaccaaggagtaccttccactggaagaatctcaaacagcgctacttactcaggatcagtggcaccagccaactcagctttgggacaaacccagccaagtgaccaggacactttagtgcaaagagctgagcacattccagcagggaaacgaactccgatgtgcgcccattgtaaccaggtcatcagaggaccattcttagtggcactggggaaatcttggcacccagaagaattcaactgcgctcactgcaaaaatacaatggcctacattggatttgtagaggagaaaggagccctgtattgtgagctgtgctatgagaaattctttgcccctgaatgtggtcgatgccaaaggaagatccttggagaagtcatcaatgcgttgaaacaaacttggcatgtttcctgttttgtgtgtgtagcctgtggaagcccattcggaccatgtttttcacttggaaggatggtgaaccctactgtgagactgattattatgccctctttggtactatatgcccatgggatgtgaatttccc

SEQ ID NO: 188947 - DNA, 899 bp, Homo Sapiens
ttggggatggcggccgttttggagtcgctgctgcgagaagaggtgtcggtcgcagccgtcgtgcggtggatcgcgcgcagcacccagggttcggaggataacgctggggaggcggccgcgctgagctcactccgggccctgcggaaagaattcgtaccgttcctgttgaacttcctgagggagcagagcagccgcgtcctcccgcaggggcccccgacccccgccaagaccccgggcgcctcggcagccttgccagggaggccgggaggcccgccgcggggtagccgcggggcgcgcagccagcttttccctccgaccgaggccctgagcaccgctgccgaggcccctctggcccgccgcgggggcaggaggcggggcccggggccggcccgcgagcgtggaggccgcggcctggaggagggggtcagcggggagagcctgcccggagccgggggccggaggcttaggggctctggcagccccagccgccccagcctcacgctgtctgatccgccaaacctcagcaacctggaggagttccctcccgtaggctcggttccccccggccctacaggcaggacgaagccttctcgcaggatcaacccaactccggtgagcgaagagcggtcactctccaagcccaagacctgcttcacctcacccccaatcagctgtgtccccagttcccaaccctcagccctggacactagcccttggggccttggccttcccccagggtgcagaagtctgcaagaggagcgagagatgctcacgaaggagcgctctaagcagctgcagcagtcacctacccccacctgtcccaccccagaattggggtcgcccctccccagccggacaggaagcctcacagatgaacctgcagaccctgccagagtgtc

SEQ ID NO: 188948 - DNA, 1565 bp, Homo Sapiens
  misc_feature (1231)..(1277): n is a, c, g, or t
ttggggaagtggcttgtggagctttggatggatcagatcccagctgcctggggcttccagcactggaagcttcacaaagattccgcagcatctccaccttggagctattcacagttccactctccacagaggcagccctgacactatgccacctgctgagctcctgggtgtcactggagagcctcacactctcctacaatggcctgggctctaacatcttccgcctgctagacagcctgcgggccctgtcaggccaggctggatgtcgcctccgtgccctgcatctcagtgacctgttctcaccactgcccatcctggagctgacacgtgctatcgtgcgagcactgcccctgctacgggtcctctctattcgtgttgaccacccaagccagcgggacaaccctggtgtgccagggaatgcagggccccctagccacataataggcgatgaggagataccagaaaactgcctggagcagttggagatgggatttccacggggagcccagccagccccactgctgtgctccattctgaaggcctcgggttctctgcagcagctgtccctggatagtgccacctttgcctctccccaggattttgggcttgttttgcaaacactcaaagagtacaacctagctctgaaaagactgagcttccatgacatgaatctcgctgactgtcagagcgaggtgctctttttgctacagaatctgactctgcaagagattaccttctccttctgccgtctgtttgagaagcgcccagcccaatttctgcctgagatggttgctgctatgaagggcaactccacactgaagggcctccggctgccagggaaccgcctggggaatgctggcctgctggccttggcagatgttttctcagaggattcatcctcccctctctctcagctggacatcagttccaactgcatcaagccagatgggcttctggagttcgccaagcggctggagcgctggggccgtggagcctttggtcacctgcgcctcttccaaaactggctggaccaggatgcagtcacagccagggaagccatccggcggctccgggctacctgccatgtggttagcgactcatgggactcatcccaggccttcgcagattatgttagcaccatgtgatggggcccgtacctcacagtctcatgctcggtaccatcagcttgcaggggctgaagcatgggctgcccagaaccccaaccaccagnnnnnnnnnnnnnnnnnnnnnnnnnnnnnnnnnnnnnnnnnnnnnnnccttgcactgaggtcctggaggccttgatgaggcccagcaaacaggcattctcacagctgggtttatagtctttgggccccttactcagtatcctgggaaccctgggccaggaggttacagtggtcatcataattgctgaagagatcccctcccctgcccctgggttcctgccttccctcctcaagcaggcacccaggctttagagaagtatagggggcttcttccctgctgggcttaccacactgctctcaagcctcaaaccctttcatacctttattctttttttt

SEQ ID NO: 188949 - DNA, 1349 bp, Homo Sapiens
ttgggtatattttactcacaggacagattacaatagccttgatagaatcatggcatccaaagggatgcgccatttttgcttgatttcagagcagttggtgttctttagtcttcttgcaacagcgattttgggagcagtttcctggcagccaacaaatggaattttcttgagcatgtttctaatcgttttgccattggaatccatggctcatgggctcttccatgaattgggtaactgtttaggaggaacatctgttggatatgctattgtgattcccaccaacttctgcagtcctgatggtcagccaacactgcttcccccagaacatgtacaggagttaaatttgaggtctactggcatgctcaatgctatccaaagattttttgcatatcatatgattgagacctatggatgtgactattccacaagtggactgtcatttgatactctgcattccaaactaaaagctttcctcgaacttcggacagtggatggacccagacatgatacgtatattttgtattacagtgggcacacccatggtacaggagagtgggctctagcaggtggagatacactacgccttgacacacttatagaatggtggagagaaaagaatggttccttttgttcccggcttattatcgtattagacagcgaaaattcaaccccttgggtgaaagaagtgaggaaaattaatgaccagtatattgcagtgcaaggagcagagttgataaaaacagtagatattgaagaagctgacccgccacagctaggtgactttacaaaagactgggtagaatataactgcaactccagtaataacatctgctggactgaaaagggacgcacagtgaaagcagtatatggtgtgtcaaaacggtggagtgactacactctgcatttgccaacgggaagcgatgtggccaagcactggatgttacactttcctcgtattacatatcccctagtgcatttggcaaattggttatgcggtctgaaccttttttggatctgcaaaacttgttttaggtgcttgaaaagattaaaaatgagttggtttcttcctactgtgctggacacaggacaaggcttcaaacttgtcaaatcttaatttggaccccaaagcgggatattaataagcactcatactaccaattatcactaacttgccattttttgtatgctgtatttttatttgtggaaaataccttgctacttctgtagctgctctcactttgtcttttcttaagtaattatggtatatataaacgttgggaaaaaacattttataatgaaagtatgtagggagtcaaatgcttactgtaaatgcataagagacgttaaaa

SEQ ID NO: 188950 - DNA, 922 bp, Homo Sapiens
gaaatcctcgtagctcctgtagggtgatccatcgtagcagaagtatacctggccgcccatcagggttgcccgctgctccagctcccgggctgccagcacgtgcatccaggcaacattgcccacatagacccggccatgctccacagaggccgggatggcccggaagagccaacctcccaggcgcaggccctggcggtagaagtccctcatgatctggtggccttcaccgtagatgcccgtgggacgaagggcacacgtcaccaggggcagccccccacggaccttcctcccgttggcctccaggaccagccactcggccagggccttgctgcaaggataggggtgcctgtgcactgcttcgtatggggtgtcttcgttgcccctgtagaaggggtgacctttggtgttaggccccacaacttccatgctgctggtgtagaccaggaaccgtgttccggtctgcacacaagcctcgatcacgttccgggtaccctgcacgttgacctcatggatggtcttgggactggccctgccaaacacgtctaccagcccagccgtgtggatgaccacatgggctccggccacagctgctgccacctcatgggcctgggtcacgtccccctggatggcagtcaccctcacaggccctgtcttcagctcctccagccagggacccaggtgttggtcaaagacccgcagctccccgagccggggctcccgctgcagcagcattcgcaccacgtgctctcccaggaagccacagccccctgtgaccaggtacaccagcttctgggcctgtgcagagtcggccatgcctggctgcagccgctatcccagggtgcccagactggcctggaggggccctcttctttcgtccagggctggccggcccgcacaccgtccttccgctggctcctcccaa

SEQ ID NO: 188951 - DNA, 942 bp, Homo Sapiens
ttgggttcgggggtcggcggaagatggcggccggcgaaaggagctggtgcctgtgcaagttgttgaggtttttttattcattattcttccctgggctcattgtatgtggaactttatgtgtgtgtttggtcattgtcctttggggaatcagactgctgctacagagaaagaaaaaattagtgtcaactagcaaaaatgggaaaaatcaaatggtgattgcattttttcatccatactgcaatgctggtggaggaggagaaagagttttatggtgtgctttaagagccctgcagaaaaagtatcctgaagcagtttatgttgtttataccggcgatgttaatgtcaacggtcaacagatactagaaggtgctttcagaagatttaacatcagattaattcacccagtgcagtttgtttttttaaggaaacgctatcttgtggaagattcactgtatcctcacttcacactgctgggccaaagtctaggatccatttttcttggctgggaagctctaatgcagtgtgttcctgatgtttacattgattcaatgggatacgcttttacgcttcctctgtttaagtatatagggggttgccaagttggaagctatgttcattatcctactatcagcaccgacatgctctctgtagtgaagaatcaaaatattggatttaataatgcagccttcattaccaggaatccttttctcagcaaagtaaagctcatctactactatttatttgcttttatttatggacttgttggttcttgcagtgatgtagtcatggtcaattcttcttggacactaaaccatattctctcactatggaaagttgggaattgcactaacattgtttatcccaccttgtgatgtgcagacatttctgggacattcccttacatgcaaaaagatgacccaggacatttgctggtttcctgtt

SEQ ID NO: 188952 - DNA, 1986 bp, Homo Sapiens
ttggctcaaaatcagccacagcaacagatgcccttgacacccttctcgcctcataataccccaggcattttcttggcccctggtgcagggcttctagaaggagctccagaaggtatccaggaagtcagaaatatgggacccagaaatacttctgctcactccagaccctcatatcgttctgcttcttggtcttctgattctggtaggcccaagaatataggcacacatccttcagtccaaaaagaagaagcctttgaaataattgttgagtttccagaaaccaactgcgatgtcaaagacaggcaggggaaagagcagggagaagaaattagtgaaagaggcgcaggccctacatttaaagctagtccctcctgggttgacccagaaggagaaacagcagaaagcactgaagatgcacccttagactttcacagggtcctgcacaattctctgggaaacatttccatgctgccatgtagctccttcacccctaattggcctgttcaaaatcctgactccagaaaaagtggtggcccagtcgcagagcagggcatcgaccctgatgcctccacagtggatgaggaggggcaactgctcgacagcacggatgttccctgcacaaatgggcacggctctcatagactgtgcattctgagacagccgcctggtcagagggcggagacccccaattcctctgtaagcggtaacatcctcttccctgtcctcagcgaggactgcactaccacagaggaaggaaatcagcctggaaacatgctaaactgcagccagaactccagctcatcctcagtgtggtggctgaaatcacctgcattttccagtggttcttctgagggggacagcccttggtcctatctgaattccagtgggagttcttgggtttcattgccgggaaagatgaggaaagagatccttgaggctcgcaccttgcaacctgatgactttgaaaagctgttggcaggagtgaggcatgattggctgtttcagagactagagaatacgggggtttttaagcccagtcaactccaccgagcacatagtgctcttttgttaaaatattcaaaaaaaatctgaactgtggacggcccaggaaactattgtctatttgggggactacttgactgtgaagaaaaaaggcagacaaagaaatgctttttgggttcatcatcttcatcaagaagaaattctggggaggtatgttgggaaagactataaggagcagaaggggctctggcaccacttcactgatgtggagcgacagatgaccgcacagcactatgtgacagaatttaacaagagactctatgaacaaaacattcccacccagatattctacatcccatccacaatactactgattttagaggacaagacaataaagggatgtatcagtgtggagccttacatactgggagaatttgtaaaattgtcaaataacacgaaagtggtgaaaacagaatacaaagccacagaatatggcttggcctatggccatttttcttatgagttttctaatcatagagatgttgtggtcgatttacaaggttgggtaaccggtaatggaaaaggactcatctacctcacagatccccagattcactccgttgatcagaaagttttcactaccaattttggaaagagaggaattttttacttctttaataaccagcatgtggaatgtaatgaaatctgccatcgtctttctttgactagaccttcaatggagaaaccatgcacatagaatacggcacagtctggtcctttggggcttgggcagggccgtgacacaggttctggccaatgatttgcaagaggaattgatcagtatcactttaagtcctgcatttaattgggcagcacaagatccctgcgagcctctttccctctgccacagttatcagaatgggtcaggagaccgcctgcttctgggcataggtcctgcaggaaagcaacttggaaaacagcccc

SEQ ID NO: 188953 - DNA, 1215 bp, Homo Sapiens
  misc_feature (144)..(170): n is a, c, g, or t
ttggcatttctggaaagactgtgtatactaggggtggggagcttctaacagtgaactgtggaaatatttacatgtatcataaagatagacatggaaaataattatgaattccagatatgttctcctttaaaagttattcatacnnnnnnnnnnnnnnnnnnnnnnnnnnnaggtgattaaaaattctggccatctcccaagagacagaatagctgaggatttcgtttgggctcagtgggatatgtcagaacagagattatattacattgacctgaagaaatcaaggagtatcttaaaatgtatccagttttatgctgatgaaagctataacttaatgtttgaagtacccttggatatcattaagcaactcaggatttaaacttgtcaactttggatgtgattatcatcaataccgagataaattttccaaacacctgactctgtgtgtttttaccaaccatacaggaagtttgtgtgtatgttacagcccgaagtgtgcctcttgggaacaaatcacatattcagtgttttacattcataaaggacacagcaagaccttcaccacttctcttgagaatgttggctcacacatgacaaagggcattacttttctcaaccttgactattatgtggctgtttacttacctggtcatttcttccacctacttaatgttcaacatccagacctgatctgccacaatctctttctgacaggaaataatgaaatgattgatatgctacctcattgccctttacagtcattgtcagggtccctggtattggattgttgttctggaaagctctatagagcactgctcagccagtcgtctttattacagcttctgcagaacacttgcttagactgtgagaagatggctgcgttgcactgtgcgctctactgcggtcaaggtgcgcagttcctggaagcccagattattcagtggatttctgagaatgtctctgcctgccattcatttgacctcattcaggaatttataattgcttcttcatactggagtgtatattcagagacaagtaacatggacaaactattgccacattcctcagtgctcacttggaatacagaaattcctggaataactcttgtgacagaagacattgcattgcctcttatgaaggtgctcagctttaagggctactgggaaaaactgaactccaacctagaatatgttaagtacgccaagccacacttcc

SEQ ID NO: 188954 - DNA, 1072 bp, Homo Sapiens
  misc_feature (925)..(934): n is a, c, g, or t
ttggtgataacactgttggagaatggcaaaccgtgttctatattgctgctgctattaatgtttttggtgccattttctttacactattcgccaaaggtgaagtacaaaactgggctctcaatgatcaccatggacacagacactgaaggaaccaataaataatcctgcctctattaatgtatttttatttatcatgtaacctcaaagtgccttctgtattgtgtaagcattctatgtctttttttaattgtacttgtattagatttttaaggcctataatcatgaaatatcactagttgccagaataataaaatgaactgtgtttaattatgaataatatgtaagctaggacttctactttaggttcacatacctgcctgctagtcgggcaacatgaagtaggacagttctgttgattttttagggccatactaaagggaatgagctgaaacagacctcctgatacctttgcttaattaaactagatgataattctcaggtactgataaacacctgttgttgttcactttcctcataaaaattgtcagctctctctgacacttagacctcaaactttagcatctctgtggagctgccatccactgtataatttcgcctggcaactggactgaggggagtgtgcccaggcagctgccaagcactccctccctggcttcagggtcagagtgcccagcgtttatcagaggcagcatccaagcccagagccagtgtcgactcttcggctggtgcctttcctctgaggggctatcaatgtgtagataaagccctgagtaggcaagagcagtgagatccactgctatggtcttgatacatcctcaaactttcccttcccagcacagaggaatattggctggcatgagccactgtgcccagcctgttctatgtttttaagctacacgagaannnnnnnnnnaattaattctcactgtttgttcagtctgtcttcatctaagtttgtgttgcagtttaaagttaaagtgacttttaaaggcacatcacctgagactagggtaatcatctttacttctggttcctgaaatcatatttttcc

SEQ ID NO: 188955 - DNA, 1310 bp, Homo Sapiens
  misc_feature (902)..(942): n is a, c, g, or t
  misc_feature (1157)..(1166): n is a, c, g, or t
ttggggtggccgaggggcttcataccagctgaagagcgacaagccgctggcagccgcggatctcaccgccgctcaggagatctgttggtaatctgaggatttttattctacgtcgtcttgacagatggaaaacctgaagtaacttcgggctaaccttgtgtttttggaaaattagtagacttggtggtgaagaaactgggaggagtaggatattagctaactttgcatagccacatatagagcgtcgcagctgcattccaccaaagaggaaccaaaaggcctgtggtgttcccagggtacatattcatgccagaagtgaagtgccttggtgaattcgtttcctgaaagtttatcgcatacttgtactgggttaggtttttagaacttcagccataaaaatgggcagaattttccttgatcatatcggtggtacccgtctgttttcttgtgcaaactgtgatacgatcctgaccaaccgctcagaactcatctccactcgtttcacaggcgccactggcagagcatttctttttaacaaggtagttaacctgcagtacagcgaagttcaagatcgggtcatgctcactggccgccacatggttcgagatgtgagctgcaaaaactgcaatagcaaactgggatggatctatgagtttgccactgaagacagccagcgatataaggaaggccgcgtgatcctggaacgtgctctagttcgagagagtgagggctttgaggagcatgtaccatctgataactcttgaagatacagagagaaatccatcttttcccaggtctccttcactgaaaacaaaaatctacttacatacactgtcaccttagcatcagagtcggattaatgaactgcggaacaagaggttgtgagaatctaagatggaacnnnnnnnnnnnnnnnnnnnnnnnnnnnnnnnnnnnnnnnnncatccaacagcagcgtgtagagagaatattatgcagatgccgttaattttttaccctatgtttacgtcttgaggcagcagagtctgtctgcagctatgtggtgagctatgtaaggaaaaaaatctgggctgttagagtgaaaaagtgtgttttatgtcaattgtgaaaggaaaatgttaggagtatggtttttaaacttgggcttcattttaacnnnnnnnnnnaaacccagttatttcacttgatttgctagcttcagagaagagatccgaatctgtgcccatcgctaaaggcccaatgttagcatggcttgtgctgagccggtgtgccatattcttgttggagagaaccgtatcaccagagcccat

SEQ ID NO: 188956 - DNA, 1092 bp, Homo Sapiens
ctttgtacaaaaaagttggtggaaactttcctctgaaatgggacagaactgctgggttgtctttttccatgtaacttaagcatagtaatataaataaagtaatagttggatgcttttggtcctgtgttgcttttaaaaacaccttataaaagaggagagtatttgataagcaattttcatagtagtaaagttttttttcatctcttaaactaaattgaccatgcatataatattctttgtttaaatgaaagcatactgttgaaacccgcagtgttgcatttagaaaacagttgaacagaatgtcaatgtgcattcatgcaaaaaaacatttaatctgcatctgttttagaaaagggggaaatgaagcaacttgtctaaaaatactgctttacaaagcatttcagcctttccccctcagttttgcattgattttttgacaagtctgtagagcctaatagtttccatcaaaggcctagatctcttatttagcatttttttcagctcttctctcagaagttcagctgttgaaacgaaaactgtactttgtaccctcacatacaaagggatcaaatttgacctggtgttattttagccccaaatttatgacattacacaatattaaaatgtaaatgtttctttacccaaactacttctagatattctagtatttgcttctggtggaattaaatgacggtaaaattggctaattatttgaatgaatgaatggatggatgttttgcatgctcaatttctaggtcctttgtctagaaaggaaatttgcctcagttgaattagtgaaatatttctgtcgttgatattaaaagtgacttctgagtacagttaagttcctcctatttgccactgggctgttggttagaagcataggtaactgattaagtaggtatgatactgcatttgaaataagtggacacaaactatcctttctccaccatggactcaatctgagaacaacagcattcatttccattcatttccatactggcttttgattatatgcagattccctagtagcatgccttacctacagcactatgtgcatttgctgtcaccataaagtatatttggtcttgc

SEQ ID NO: 188957 - DNA, 1208 bp, Homo Sapiens
  misc_feature (635)..(692): n is a, c, g, or t
ttggatattgaactgcatctggaaagttcttcacatcaggaaacattagatcatatacagaaacaaactaaatttgataaagtagttatggagtttttgcatgagtgtatggtgaataaattcaagaaaacatctattcgtaagcaacagacaaataatcaaacagaagtagttaaaataattgaaaaagatgttatggaaggtgttactgtagatgatcacatgatgaaggtagagacagttcattgcagcgcttgcagtgtttatatccctgctttacatagttcagttcagcagcacttaaaatctcctgatcatatcaaagggaagcaggcttataaggaacaaataaaaagagagagtgtcttgactgctacaagcattttaaataatccaatagtgaaggcgcgatatgaacgttttgttaagggtgagaatccttttgaaattcaagaccattctcaggatcagcaaatagaaggagatgaggaggatgaagagaagattgatgaacctattgaagaagaggaggatgaagatgaggaagaagaagcagaggaagtgggggaagtagaggaagtggaagaagtagaggaagtgagagaaggaggaatagagggcgagggaaatatacnnnnnnnnnnnnnnnnnnnnnnnnnnnnnnnnnnnnnnnnnnnnnnnnnnnnnnnnnnagtacaaagtagaggaattagaggaagagacagcaaaggaagaacctgctgacttccctgttgagcaacctgaagaaaattaaatataaggtattagatttaaaaggagctttacatttcggttctaatgtaaaaaagggtaagaaatttaatagcttaaaatatgaattaacacccatgttgcatgcattccacatattaaaatttgttttatataatttctaaatgtttaacatttgtttaataaaatgaaggcaaaactattttagtttagtttttatagctaccagacttagatccgataaattgtttgtataatttttaatcttaatttttattactttattggtgttaaggataacaaatgtgtattgttactatatctattccaatcattttatcttaaatgctgctcttgggagtgaatattcaagtgtgcatcaattttttgaatacttaccctggaagatataaactgggcaagtattttgtgctctgtgtatttttttactgcat

SEQ ID NO: 188958 - DNA, 1233 bp, Homo Sapiens
  misc_feature (296)..(304): n is a, c, g, or t
  misc_feature (992)..(1001): n is a, c, g, or t
aaaagaaaagacaaacgttaaatggaaatttctgatgatatgctgaattcaggaactctgctatcaaaccttgtactttaccaatagttctatgacaagagatcttaatgccagaaaaagaggccaacacaggtttctccattaaagctgccacagccattattactatccccaaatgaaaatgactcaagtacatttatagcaatatctgaatgttattaatttcttatgaatttcattattctcttgtcataaataaggataatagagcatttgccccagaatgattttgatcnnnnnnnnnccaagcaatacaatgtcctacagaatgccacagaaaatctaggaagtctagggctaaaaaaaagtgaagaataaagttacattagctaagaaaaataaatggaaaaacaattcacagtatttggtggatagaaggaaaccaaagttttaaaaatcatatataaatagaacctctaatacagcatttattcagaaaaagaaaaagcatttggtgaagagatcaatatactgcagtaatgagtcctcacccaaaacaaatgagggcaacatcattcacgtaagctagtcagcttcgtattatttcaacaaacttggaaatgtctgccttcaaccaacagacctctagactagaagctttggatagccaagtcatttcagcattaaaacaaatcacagggagatagaagccagggtctagaaccacaaaagaatagcgttatttgactaataaggataacaaaaatcttttgtgttaaagcatccaaagacctaatctgtaagtactatcatatgtagacactgtatgatactcctccagccataaactttttctgggcagccttcacatcctagatcggggctaccttaggaattcaaaacttggtgagaattcaggcaagaatttctacaaagggatgagattgtggatgaatgtggaattttaagaaaagaagggttaggaagggtgnnnnnnnnnnaatagttagatgactttatttagaatatacattgcaatgattccctcccacagaaatcacttcaaaccgtaattctcaaatactgtgcaacattcaaccagctaaggatttcacgtgactttcaggaaataaatgacccacaattacccagtgaattccatgtagtgttaagaataattgcaggtaacttcttcatgtaattaccatgaaattgagtataatttagagccaa

SEQ ID NO: 188959 - DNA, 2045 bp, Homo Sapiens
  misc_feature (1727)..(1776): n is a, c, g, or t
  misc_feature (1837)..(1892): n is a, c, g, or t
gcagccgcggtagaacgcggtgactggcgctgaagtcacccggcacatctggcaggccgccagcaaaggtgagcacggggctccgcaggtgcctctcgagcacggccagcctctcctgcagctgcgcggcgctcacctcgctctggcccctggtgccgtccacctccagggtggcctcaccgtccctcagcgagacggtgaccacgtgctcttggccgtcgcagaccttgatctccattagggccaaggccgtatgctccacggccaggaccaccagctgcttcttgagtttcttcgtggagtgatagtctaccagtgccacagagagaggcacggcacggaggtcgggggcccagagcgcaaacagcacgcctgtgtctgcggctgggcggatgtgagccacgacttctacttcccaggttgattcagtcccgacgtccagaggggtccgcatgtagtccaggctgtagaaggcgaagccgctcccggggtagaaagagcctctctccgtcaccgagaagcactgcatcctcgtgttcactttcaccgtttcctggatggtggtgtcttctccgttcagccagttccagctcctcatacagccatccagacgagggtttataggctgcacgaggtccttctcatggaagggaatacctcccacggtcaggttcagatgatacagtcctcgctccggttggaacaagtccccggccaccgcgattttcatgacagcatccctgttgaccttgatgaccagattccgcgccagctcctcaacagagattgtctgccacatgccatggttgatgaccgggccgctgctggtgacacggccgacaccgttgtagcgcagctgcagctccagccggccggctctcagggccagcacgatccaggtgctgtcctggtggcctccggcaaagaggaggatgccctcggggtcaaaggtccggaagtcaaactcagctaccagcctggtgggctgcagcctcttgaagcgcagtcggatcacgggggtcccactgaacatccggcccaggtacaaggacttcacactcttggccacgctgaagggcacgcacggcaagatgtcctcacaggtgtccatgtccttgggacagcttgaggcccccacgcccgtcacagtggcaggtgtagctccctggggagttcacgcagacctgctcacagcggccctgcagacactcgtccacatttcggcaagccttctcctgggagctgtacgcaaagccctcgtcacagaggcaggagtaggagccgggcaggttcttgcagcgcgcctccccgcaggcctccgagtctgcgcactcgtatatgtcttggcaggtcctgccatcagaggagagctcgaagccgctgtggcaggaacagtggaagctacccggcttgttgtggcagatctggaggcagcccccgttctcctggctgcattcgttgacatctttgtcgcagagccggcccccccagccagctttacacaggcagaagaagttgcccatgaggtcctggcaggcttgggtccccttcctatcgcaggggttgggcgtgcactggtcaggcaggttttgcacgcaggtggcgaagcctgagtttttggtgtacggagacccatacttgttgatgcagtctaagtatcttgggtaaaaataatccgtctcggggtcgttctcgaacacctcccgcgcctcctcgcggctgcacannnnnnnnnnnnnnnnnnnnnnnnnnnnnnnnnnnnnnnnnnnnnnnnnnacctgaaaggcgcggcgctgcctgggccgcaggaaatgcgtggcctcgcgcgccggcaacnnnnnnnnnnnnnnnnnnnnnnnnnnnnnnnnnnnnnnnnnnnnnnnnnnnnnnnngcgcagggcggcgggcccgggcgagagcgaaggggccatggcgggccggggacgcgcggtcagagcgcccgggaggccgaggcgagccgcgggcgccgcggggcggaggctccggtcatcccgtcctggcggccctgaaggtcacatcgccaa

SEQ ID NO: 188960 - DNA, 494 bp, Homo Sapiens
ttggctcacttcaggggccaccacatccctcctctctgcttctccccccagatcaaagggtaccctcccacggttggcagggcctggctgagtgcctctagcaccctttgtgccaccacaggcggtcccaggaagggcagcaaggtcagaccattcctcattgaaaaccgtggctagggcacagggctctgatctgaaggagtgacaggtgcgtcacaacactgcctaaggctctccctctcaatgctgggaccctcgccccactcccagtggcagccaaaccagcaatatccaacagacataggccccctacgggacagtgtgggcccccagatataagatggataccccccgcacctgcagtaaagcatcccaaagccaaatgctcaattgcatcctgtctgcagctgggactttggagggtaatggctgggcagacagtaaagttgatcatctgttttctcggggtggcagacgcagccatgtcttgccaa

SEQ ID NO: 188961 - DNA, 1070 bp, Homo Sapiens
ttggctatgatggtaatcccaaatatgaacaatgcacggttgtgttgcgtgtagcttccactttcataaggtttggatcctttgagatttttaagtctgcagatgagcacacagggcgtgcaggccccagcgtggggaggaacgacattcgagtgcagctgctcgactatgtcatcagctccttttaccccgagatccaggctgctcatgccagcgacagcgtgcagagaaatgctgccttcttccgggaggtgacgcggcgcacggcgcggatggtggccgagtggcagtgtgtgggcttctgccacggcgtgctcaacaccgacaacatgagcatcctggggctcaccatcgactacgggccctttggcttcctggacaggtacgaccccgaccacgtgtgcaatgcctccgacaacaccggccgctacgcgtacagcaagcagcccgaggtgtgcaggtggaacctgcggaagctggccgaggccctgcagccggaactgcccctggagctgggggaggccatcctggccgaggagtttgacgccgagttccaaaggcactacctgcagaagatgcgcaggaagctgggcctcgtgcaggtggagctggaggaagatggggcgctggtgtccaagctcctggagaccatgcatctgaccggtgccgacttcacaaacaccttctacttgctgagctccttcccagtggagctagagtcgccaggcctggcggaattcctggccaggctgatggagcagtgtgcctccctggaggagctgaggctggccttccggccccagatggatccccggcagctatccatgatgctgatgctggcgcagtcaaacccgcagctgttcgcgcttatgggcacccgggcaggcatcgccagggagctggagcgtgtggagcagcagtctcggctggagcagctgagtgcggcagagctgcagagcaggaaccagggccactgggctgactggctacaggcgtacaggtgagccctgcgtccatggtcaccgggggacggcgggtcgcgtgctggaaaaagtccagcccggctgtga

SEQ ID NO: 188962 - DNA, 952 bp, Homo Sapiens
actttgtacaaaaaagttggctacggtcgcggagcagtggaaccgagactgccccgcggagccgccggtatgagcgcccctcgccaccccgtgtcccaggcccggcctttctgacaagagctagacttcgggctccttgaggatattcagttttgtatgtttgaatatcctctcaccatgttcagcataaagtaccattcttaatgattatcctcaacaagacaggtgtgagagggttgctgttgtattgcaatcatggtgcagaaataccagtccccagtgagggtgtacaaatacccctttgaattaattatggctgcctatgaaaggaggttccctacatgtcctttgattccgatgttcgtgggcagtgacactgtgaatgaattcaagagcgaagatggggctattcatgtcattgaaaggcgctgcaagctggatgtagatgcacccagactgctgaagaagattgcaggagttgattatgtttattttgtccagaaaaactcactgaattctcgggaacgtactttgcacattgaggcttataatgaaacgttttccaatcgggtcatcattaatgagcattgctgctacaccgttcaccctgaaaatgaagattggacctgttttgaacagtctgcaagtttagatattaaatctttctttggttttgaaagtacagtggaaaaaattgcaatgaaacaatataccagcaacattaaaaaaggaaaggaaatcatcgaatactaccttcgccaattagaagaagaaggcataacctttgtgccccgttggagtccgccttccatcacgccctcttcagagacatcttcatcatcctccaagaaacaagcagcgtccatggccgtcgtcatcccagaagctgccctcaagaggggctgagtggtgatgccctcagcagccccagtgcacctgagcccgtggtggg

SEQ ID NO: 188963 - DNA, 1829 bp, Homo Sapiens
actttgtacaaaaaagttggtgcctttttcacctaagcataaggggaaaaactctcagggccctattaagatttataacctttgtaatgttcttcaccacagacaccttcttgtgagttttcagtctgactgtgggggtggggggtgtgaatgaaatggatgtcacagagtgtcatgtgtctgatgcagcctcctctgctgtgtattaaatgtcaaaatctgaatatatctggatatgtactaatcaaataataatcaatcaatcagcatatacatttcagccaaagccatagaagaaaaagcaatagttgcttgaattatgatcatctaccaccaactctgctcagccctgtaacagggtagggagagggtataacaggaagagctttgacttgtccctgtctatacattctctgtatcttttgggggtaacttcttggcagtttttcagtgttcagccatgtcagttgaaactagatttttctgtagattttttacttacccatgtgagcctaacactatcctgtaattcattttctcaggctatgtgtaaatgtagaaccctaatttttctataaaaaaacaaactaactaactgtgtaaagaaagaaaaagggaagtaccaatgggtttttccaccttatttttacctttgatctacccttgcagatttaacctgtcttcttccctcccattattctcattttccttttacctttctccaccatccagagccacaaaagcaaaccttctacctcctacctacttttctctgggacaaggataaaggaatatgattttccagagccccagagccagctcatcttccaggtgctgaaaccactttccaaataaactaaagcctggatttgatattacaaattttgggaaatcttagaataaagaacgagaacaaggaagtcattggctagtataattaagaaaggtaggattcagtgcttaccgatgatgcagtacttgatagaagaaaacagtctgggaggatagcgctcatttttcagttaccctttaaggagtccctttgtctttgggaaagtagcagaatggtccgcttctttcccatgagtggaaaatgtggcttgtccaactctcctccaggttgcatttcagtttctttccaaaacttattacctcccctaatcctgagactttggaaaaaggaaggaagaactgttgctttatctccccctccctgcatgtgtcaacattgtgatgtcagtatttactaatctacattcagtggctgtacaaataacagctgtagtaagaagagattcaggatgctagaggtgaatatttgggtcatttacatgtacactacatagcaagttgatactcatgttgcatgttcttttaaattagtgattttgtgtcttaagtctttaacttccaatacttcatcatgtatgtaaccttccatgtttgcttctgataaatggaaatgtaggttcactgccacttcatgagatatctctgctcacgcttccaagttgttctcaatgacattagccaaagttgggtttgccattcatcccctaggcatggtaaatcttgtgttgttccctgctgtcctccgtattacgtgaccggcaaataaatctcatagcagttaatataaaacatctttggaggatgggagagaacaggagggaagatgggaaacaaaatagagaattcttaagattttgtttaaaccaaatgtttcatgtagaatgcaaaatgtttggcacgtcaaaaatatgaatgtgtagacaactgtagttgtgctcagtttgtaatgatgggaagtgtattttactctgatcaaa

SEQ ID NO: 188964 - DNA, 1278 bp, Homo Sapiens
ttggagcccgagctgccgccgcagccacagccgagggcactatggcttctggagttacagtgaatgatgaagtcatcaaagtttttaatgatatgaaagtaaggaaatcttctacacaagaggagatcaaaaagagaaagaaagcagttctcttctgtttaagcgatgacaaaagacaaataattgtagaggaagcaaagcagatcttggtgggtgacattggtgatactgtagaggacccctacacatcttttgtgaagttgctacctctgaatgattgccgatatgctttgtacgatgccacatacgaaacaaaagagtctaagaaagaagacctagtatttatattctgggctcctgaaagtgcacctttaaaaagcaagatgatttatgctagctctaaagatgccattaaaaagaaatttacaggtattaaacatgagtggcaagtaaatggcttggatgatattaaggaccgttcgacacttggagagaaattgggaggcaatgtagtagtttcacttgaaggaaaaccattataaaatgacagtcaagtgccatctggatcttaaggagcttccatttctccagctcagtccattggaatagtattaggttttggttttttgttgtatttccccctttccactgggcccttccaacacaatgaatgaaggaaatatcatttatttaagcagcctatcagtgattgccattagactgttgaatactgttacttttatatagaacccaaggaatgccttcctgtcatattttagccaaaacaactggttatatgcctcccttgcagcaagcactacaatgtatgtgatcgtcaatgtgaatagcttagaatactgcaaaggataagctaattgaatgccttgaaagtattatccactggtcagatggtcaacttttttcagtattatttatagttggcacttgattgcagttctgtgaggcttgagcattcatacacctcacctgccttggcaagcctattttagtgatatggcagcacggatataacactatgcattaaaagcactttttgtaataagtttaatatcctaaaaggaatgccaattaagttttgttaactgtgtcatcaacttatcctagtacctcagtgttcattcctgttacctgcatatcttcttaaaagaaatagctgttattaatgcctttttgttttccattgagtgtacactactgaataagtgtaggagttttatgtttaccatgtgagtcctgcacactaaagatattttgaat

SEQ ID NO: 188965 - DNA, 1166 bp, Homo Sapiens
ccaactttgtacaaaaaagttggcctctgaacaacctccaggtggccgtgaagaacaacatcgatgtcttctacttcagcaccttgtacccactgcacatcctctttgtggaggacgggaagatggaccggcagatgttcctggccacatggaaggatattcccaatgagaatgaggcccagttccagatcagagactgccccctcaatgcagaggctgcgagcagcaagctgcagagcagcaacatcttcactgtcgccaagaggaacgtggagggccaggacatgctctaccagtccctgaagctgaccaacggcatctgggtgctggcggagctgcggatccagccgggcaaccccagctgcacggacttagagctgtccctgaagtgtcgagcaccagaggtgtcccagcacgtgtaccaggcctacgagaccatcctcaagaactgagaccccggccagcgcccaccccagccttctgcccgccccatcgaggaggcccctcgggggcagcacatcttcctcctcgcaggagggaccaggcggggctccaggccactcagtgggctccctggtcctgatggcagaacccacccgatccctggggtagggcaccaccccctcctggggtgagagcgcagtgcactcccgtgctctgggacacccctgctcctgtggctgtgatgtggggttaagtgaggtggggaccaaaggaaacagagccagagcagccacagaagctgtgcctgaagggtgagtgtggagcttgcccctccggctcacagccccggcagcccctggctccttggtctctccggttggtgttaaagggccctccactgccacctctcatgggatggaccctgccaacctggcctgggtgtgcagggaggggttccccttggtaccaggagagctgctcacttaggggcctggggctcaaggagctgtaggtgccggcagaggggcagagctaggctgggaggagcccagggcctgcaccacccacttgcacccacaaggctgggtgccctgcagctgtgccagttgggccacagcctcccgagtgctgacccacatgggtcaggaccaggcagaagctcccagagccccggtctcgggctccccaaccgactggcagctgcactattcccaaactcccca

SEQ ID NO: 188966 - DNA, 938 bp, Homo Sapiens
ccggagagaccaaggagccaggggctgccgggggctgtgagccggaggggcaagctccacactcacccttcaggcacagcttctgtggctgctctggctctgtttcctttggtccccacctcacttaaccccacatcacagccacaggagcaggggtgtcccagagcacgggagtgcactgcgctctcaccccaggagggggtggtgccctaccccagggatcgggtgggttctgccatcaggaccagggagcccactgagtggcctggagccccgcctggtccctcctgcgaggaggaagatgtgctgcccccgaggggcctcctcgatggggcgggcagaaggctggggtgggcgctggccggggtctcagttcttgaggatggtctcgtaggcctggtacacgtgctgggacacctctggtgctcgacacttcagggacagcgtgcagctggggttgcccggctggatccgcagctccgccagcacccagatgccgttggtcagcttcagggactggtagagcatgtcctggccctccacgttcctcttggcgacagtgaagatgttgctgctctgcagcttgctgctcgcagcctctgcattgagggggcagtctctgatctggaactgggcctcattctcattgggaatatccttccatgtggccaggaacatctgccggtccatcttcccgtcctccacaaagaggatgtgcagtgggtacaaggtgctgaagtagaagacatcgatgttgttcttcacggccacctggaggttgttcagaggctccatcttcatgaccgagcccaccgtgctgagaggcagggagatctccactgtctggttggggctgagtggcgcgtggacctggaggggggcggcgggggccaggccaaagctgttgcggttgaactggatggcaaagtcggtcccaa

SEQ ID NO: 188967 - DNA, 883 bp, Homo Sapiens
ttggcccaggagcagagcagtctccctgtccagatcaccaggatccctgcttgctggagaatgacccagatgtcccaggtgcaggagctcttccatgaggcagcccagcaggatgccctggcccagccccagccctggtggaagacccagctgttcatgtgggagcctgtgctgtttgggacctgggatggtgtgttcacatcctgcatgatcaacatctttggggttgtgctcttcctgaggactggctggctggtgggaaacacaggagtgctcctgggcatgttcctggtgtccttcgtcatcctggtggccctcgtcacggtgctgtctggcattggcgtcggggagcgcagcagcatcggcagcggtggcgtctactccatgatctcctcggtcctgggtgggcagacgggaggcaccatcgggctgctctatgtgtttggacagtgtgttgcaggtgccatgtatatcaccggctttgctgaatccatctcggatttgctgggcctcgggaatatctgggctgtgcgaggaatttcagttgcggtgcttctggccttgctgggcattaacctcgcaggtgtcaaatggataatccgcctccagctgctgttgctgttcctgctggccgtgtccacactggactttgtggtgggttctttcacccacctggacccagaacatggtttcattggatattcacccgaactgctacagaacaacacgctgcccgattacagcccgggggaatcttttttcactgtctttggggttttcttcccagcggctacaggagtcatggccggcttcaacatggggggcgacctcaagagcctgccgccagcattcccctgggctccctggcagctgttggcatctc

SEQ ID NO: 188968 - DNA, 1231 bp, Homo Sapiens
ttggcgaagaagccccggaagtttcgaactaccaccggcgtgcgttcgcaggtagatcgcggtgccagttgccatggagccggccgggccctgtggcttctgcccggcgggggaggtccagccagcgcgttacacctgccctcgctgtaatgcgccctactgctcgctgcgctgctaccggacgcatggcacctgcgcagaaaacttctaccgtgaccaggtgctgggagagctccgcggttgcagcgctcctcccagccgcctagcaagcgccctacgccggctgcgtcagcaacgcgagaccgaggacgagcctggggaagcaggcctcagctccggcccggcgcccggcggcctatcgggactctgggagcggctggcgccgggcgaaaaagctgccttcgagcggctgctgagccgcggtgaggccgggcggctgctgcctccatggcggccgtggtggtggaaccgcggagccggaccgcagcttctggaggagctggataatgccccgggtagtgacgccgcggagctggagctcgcccctgcgaggaccccgccggattctgtgaaagatgcctccgccgcggagcccgcggccgccgagcgggttcttggagatgtcccgggggcctgcacgcccgtcgtacccacccgcatccccgcgatagtcagcctgagccgcggcccagtctcgccgctcgtgcgcttccagctgcccaatgtgctgttcgcctacgcgcatactctcgccctgtatcacggcggtgacgacgcgctgctctctgacttctgtgccacactgctcggcgtttccggagccctgggtgcccagcaagtcttcgcctctgcggaagaagctctgcaggcggcagcccacgtgctggaagcaggcgagcacccgccggggcccctgggcacacgaggggctatgcacgaggtcgcccgcatcctgctgggcgagggctcgaccaaccagaaaggctacacgctggcagcactgggggacctggcacagaccctgggccgtgcccggaaacaggccgtggctagagaagagcgagatcatcttttaccgggcccggaaaaagtgccagttcctcctggtctgtaccaacgaaaatgaggcggccctcacacccctggcttctagactgcgccaggtctcaccaagcccaatgctgtgggtagccgaaggaaggtggccgccctcactggggagctggagcgg

SEQ ID NO: 188969 - DNA, 1058 bp, Homo Sapiens
tacatgttgctggtaaatgcattcagtaaggcactcaaatcctagacacgaactaagcacagaacgctcttccctgctttaataaattgaaacatgatctcatttccttcattttcaatactttttatagaaagacacgcttgtcttgaacttgtctaaacataggtttatataaactaatccattatcattatagttataatcaaggaaatgatttcacattgacggttttttaggtagggataagcgaaagcactgcagcagtttctgagggaatgtcttctctgtggttccccatacttagtacaatgcctggaatgtagcagggactaaatacagtgaacaaatgggcaaacctttaattcccagggatctgctacatattgccttgactggtagatcatttctccaggagaaagtaagaaaccaaaagacaaaaacaatctttttaaacctcacaggattttcttagaaaaaagttttaatttatatatctagtgcaattctctttgtaaaatatatttcataaaaaatccaaagcaaaagccctgtcattcatttatttcaaaagacaaatcatttcagtacttcttccttgaaatgcctgcaatttcttcctctggcctcagagacgggcattggctccatgctttacaatgtcaggataaaaatccaggagggagaaatcttgttgtaatggatagctgttttcatctaacacaaaaaggctctgaatctttaatacacaaggttctgcgctgactgccaacaaggagtggaacaggtctgccacgaccatcccataggtgatctctgaggaaggaactatcactctgttgaggcagtctgcagaaatgttgagaagaatcttctctatcagctttgattctacacggatacaaacatcatgtcttccatcaatggcagtcattaacgctggcctataatatattttcttcatagtaaatggcaagcagctaaaacattgtttgtagatcctgttctcatctgtttctagttccaatccacattttgcacaaccagtatatacgatccaa

SEQ ID NO: 188970 - DNA, 521 bp, Homo Sapiens
ctttgtacaaaaaagttggataaattaaaacttttttctaagaaaatcctgtgaggtttaaaaagattgtttttgtcttttggtttcttcctttctcctggagaaatgatctaccagtcaaggcaatatgtagcagatccctgggaattaaaggtttgcccatttgttcactgtatttagtccctgctacattccaggcattgtactaagtatggggaaccacagagaagacattccctcagaaactgctgcagtgctttcgcttatccctacctaaaaaaccgtcaatgtgaaatcatttccttgattataactataatgataatggattagtttatataaacctatgtttagacaagttctttacaagcgtgtctttctataaaaagtattgaaaatgaacgaaatgagatcatgtttcaatttattaaagcagggaagagcattctgtggttagttcgtgtctaagatttgagtgccttactgaatgcatttacaagcaaacatgtagcaatctgttc

SEQ ID NO: 188971 - DNA, 932 bp, Homo Sapiens
gggggcttggcccccagccacccttccttgctccggggcgggccagaggccggacacccctgggctgtgcaaacaggactctccagggcccagccaggcctgggtgaggggcacatactggctggcaggcatggttcccaacacccgcagccacggaggctctggcggggctgggggcccggatgaggggtgagtccagaaccgattgtccgctgattgtctgcttgtctggttcgtggctgtgtcggctcttcccggtatcggggcctgctgcccgctttctgggggctgcccgccccatgggctcctcacctgcggagccgctgcagctcactctctaccagattccgcctatagagcgcctcctttgcagcatccctgctgccatcgttgcccaggcgccgggcagcctccgtgtagaactgcagctgccgctccagctgggctgtgtattcccgtcggatgcccacacccccctgctccagctgtgccctctgccactggctgcgttgcatgatgtcctggtactgctgggccacttctgggggcaccggccgccgcgcctgcctgagggccaggatcttccgctccagacgctcttggtcaaacgccagcacactgaggctatgcaggggccgggctgatctgttccctgactcccttgcaggggcaggcacaggaggggccttccctttgggcccagcaacctgtgtgggcacagctgccggcacagggtcaatgaccagccacctctctgtcgtcatctccaactgctgggctgtcagtggctcccgaatccggaccattacctccagtcgcccccctgtgggccggcgaccatccaggacctgggtgggggtaaggagaaactgttggtgggaagcaggaagtgactagaggcccagggccaggacaagggagaacaagactgg

SEQ ID NO: 188972 - DNA, 954 bp, Homo Sapiens
tcaaacgccagcacactgaggctatgcaggggccgggctgatctgttccctgactcccttgcaggagcaggcacaggaggggccttccctttgggcccagcaacctgtgtgggcacagctgccggcacagggtcaatgaccagccacctctctgtcgtcgtctccaactgctgggctgtcagtggctcccgaatccggaccattacctccagtcgcccccctgtgggccggcgaccatccaggacctcaaggatctcccggacctcacatgctatctccagtgcatccagcttcagctgggctgtccccagcacccggtcagtcttgaacagcccccccttgtgaaccacttcgaacttgatgcccttggtctggatggcccttcggaagccacggtggctgcggttgatgcagagtttgaactgctccttgaactcaggggagtctgtgttcttgatcacactggtcttgtctttctgagcttcttccacgttgggataggggaagtcaaaccgaacaaagacatccagatcgccaggggacagtcctgggggtgtgggcaagttgatgcccttcacgatgaagaggagcatgtcgttgctgctgaggtcagggaagatcttgatgacgctgaaggtcctttgctcaaagcgggcggtgggcgtggggagaccccggacgaaggcttgcttcagaatgtccatgctccgcttacagtcctccgccaacttttcaaacttggtggtttcagtgatgttgcccagctgggtgaattggtttgagtggttcaggcacatctcgtgctgctgccgtatgagcttggtgagttcaccatagcgccgggcggcctcctgagacagacccgggccaggccgctggaccagggcaaagtcgtccttgttgacaggggcaggcggcaccttggtgatgtccacaggcagcccattgcgccaa

SEQ ID NO: 188973 - DNA, 914 bp, Homo Sapiens
ttggctgcactccagggacgcatggcaggacttggctggctgcgactttgtgctggacctgatcagccagactgaggacctgggggacccagctcgcccccgcagctaccccatcactcctcttggctcagccgaggccattccccttgcccctggcattcaggccccctcactgcccccaggaccccctccaggtccagccccaacgctgcccagcagggaccacacaggggaggtccagaggtcagggagcctggacggcttcctggaccagatcttccagccagtgatatcctccggcctcagcgatctggaacaaagctgggctctgagcagccgcatgaagggagggggcgccattgggcccacacagcagggctaccccatggtgtacccaggaatgattcagatgcctgcataccagccaggcatggtccctgcacccatgcccatgatgccagcaatgggcacagtccctgccatgccagccatggtggtgccgccgcagccaccgcttcccagcctggatgcagggcagctggccgtccagcagcagaactttatccagcagcaggcgctaatcctggcccagcagatgacagcccaggccatgtccctgtccctggagcagcagatgcagcagcggcagcagcaggctcgggcctccgaggctgcgtcccaggcctcaccctcagccgtcacctccaagcccaggaagccccccacacccccggagaagccacagcgtgacctgggatcagagggtggctgcctgagggagacctccgaggaggctgaagacaggccctatcagcccaagagcttccagcagaaacggaactatttccagaggatggggcagccacagatcacagtgaggacgatgaagcccccggccaagtccacatccccca

SEQ ID NO: 188974 - DNA, 1227 bp, Homo Sapiens
agcaatgcttttttataatgccaactttgtacaaaaaagttggcgttcctctcctcggtctcctccgcctccagctccgcgctgcccggcagccgggagccatgcgaccccagggccccgccgcctccccgcagcggctccgcggcctcctgctgctcctgctgctgcagctgcccgcgccgtcgagcgcctctgagatccccaaggggaagcaaaaggcgcagctccggcagagggaggtggtggacctgtataatggaatgtgcttacaagggccagcaggagtgcctggtcgagacgggagccctggggccaatggcattccgggtacacctgggatcccaggtcgggatggattcaaaggagaaaagggggaatgtctgagggaaagctttgaggagtcctggacacccaactacaagcagtgttcatggagttcattgaattatggcatagatcttgggaaaattgcggagtgtacatttacaaagatgcgttcaaatagtgctctaagagttttgttcagtggctcacttcggctaaaatgcagaaatgcatgctgtcagcgttggtatttcacattcaatggagctgaatgttcaggacctcttcccattgaagctataatttatttggaccaaggaagccctgaaatgaattcaacaattaatattcatcgcacttcttctgtggaaggactttgtgaaggaattggtgctggattagtggatgttgctatctgggttggcacttgttcagattacccaaaaggagatgcttctactggatggaattcagtttctcgcatcattattgaagaactaccaaaataaatgctttaattttcatttgctacctctttttttattatgccttggaatggttcacttaaatgacattttaaataagtttatgtatacatctgaatgaaaagcaaagctaaatatgtttacagaccaaagtgtgatttcacactgtttttaaatctagcattattcattttgcttcaatcaaaagtggtttcaatattttttttagttggttagaatactttcttcatagtcacattctctcaacctataatttggaatattgttgtggtcttttgttttttctcttagtatagcatttttaaaaaaatataaaagctaccaatctttgtacaatttgtaaatgttaagaattttttttatatctgttaaataaaaattatttccaacaacctta

SEQ ID NO: 188975 - DNA, 946 bp, Homo Sapiens
ttggggcctattacgggatggaagctccgggtgtcgcgggggcgggaggaattaagggagggagagaggcgcgcgggtgaaaggcgcattgatgcagcctgcggcggcctcggagcgcggcggagccagacgctgaccacgttcctctcctcggtctcctccgcctccagctccgcgctgcccggcagccgggagccatgcgaccccagggccccgccgcctccccgcagcggctccgcggcctcctgctgctcctgctgctgcagctgcccgcgccgtcgagcgcctctgagatccccaaggggaagcaaaaggcgcagctccggcagagggaggtggtggacctgtataatggaatgtgcttacaagggccagcaggagtgcctggtcgagacgggagccctggggccaatggcattccgggtacacctgggatcccaggtcgggatggattcaaaggagaaaagggggaatgtctgagggaaagctttgaggagtcctggacacccaactacaagcagtgttcatggagttcattgaattatggcatagatcttgggaaaattgcggagtgtacatttacaaagatgcgttcaaatagtgctctaagagttttgttcagtggctcacttcggctaaaatgcagaaatgcatgctgtcagcgttggtatttcacattcaatggagctgaatgttcaggacctcttcccattgaagctataatttatttggaccaaggaagccctgaaatgaattcaacaattaatattcatcgcacttcttctgtggaaggactttgtgaaggaattggtgctggattagtggatgttgctatctgggttggcacttgttcagattacccaaaaggagatgcttctactggatggaattcagtttctcgcatcattattgaaaactaccaaataaatgctttaatttttcattt

SEQ ID NO: 188976 - DNA, 1220 bp, Homo Sapiens
ttgggtaatcattcaaaggataaccaaatgtgccgtgatgtatgtgaacagattttctcctcaaaaagtgaatcccgactaaaacatctgttgcagcgagccccagattattgcccagagacaatggttgaaatttggaattgtatgaattcatctttgccaggtgtgtttaagaagtctgatggctgggttggcttaggctgctgtgaactggctattgccttggagtgtcgacaggcatgcaagcaggcatcttcaaagaatgatatttccaaagtttgcagaaaagaatatgagaatgctcttttcagttgcattagcagaaatgaaatgggctcggtttgttgcagttatgcaggtcatcacacaaactgccgagaatactgtcaagccatttttcgaacagactcttctcctggtccatctcagataaaagcagtggaaaattattgcgcctctattagtccacaattaatacattgtgtgaacaattatactcaatcttatccaatgaggaacccaacggatagtttatattgctgtgacagagctgaagaccatgcttgccaaaatgcctgcaagagaatcctgatgtccaagaaaacggaaatggagattgttgatggtctcatcgagggttgtaagacccagcccttgcctcaagatcctctttggcaatgttttcttgaaagctcacaatctgttcaccctggaatcactgtacaccctcctccctctacaggcctcgatggggctaaattgcattgttgttctaaagcaaacacttcaacatgtagggaactctgcactaaactttacagcatgagctggggcaatacacagagttggcaagagtttgatcgcttttgtgaatataatccagtggaagtgtccatgttgacctgtttagcggatgtccgggaaccttgccagttgggctgtagaaaccttacttactgtactaattttaacaacaggccaacagaacttttcaggagttgtaatgcacagtcagatcaaggagccatgaatgacatgaagttgtgggagaaaggaagcataaagatgccatttatcaatatacctgttcttgatattaaaaagtgccagccagagatgtggaaagcaatagcttgttcactgcagattaaaccttgtcatagtaaatctcggggaagtattatttgcaaatcagattgtgtggagattcttaaaaaatg

SEQ ID NO: 188977 - DNA, 884 bp, Homo Sapiens
agttggcgcctccggagcccgacgctgcagcggctcttctcgaaaggttctttccgcctgtgcagctcgccggctcaatactccgggggtctgggtggggggctcaaacgcagggctctgggacgcaggcactgctccaggtgatagtgcgggaacatggccttgcagctgggcaggctgagctcgggcccctgctggctcgtggcgcggggcggctgcggagggccccgcgcctggtcccagtgcggcggcggagggctccgagcctggtcccagcgcagcgcagccggacgcgtctgccggccccctggcccggctggcacggagcagagccgcgggctggggcacggctcgacgtcgagaggcggcccctgggtggggacagggctggccgcggcgctggcggggttggtggggctggccaccgccgccttcgggcatgtgcagcgggcggagatgttgcctaagacctcggggacgcgggccacttcgctggggaggccggaggaggaggaggatgagctggcccaccgctgcagcagcttcatggccccgcctgtgaccgacctgggcgagctgcgaaggaggccgggcgacatgaagaccaagatggagctgctgattctggagacccaggcccaggtgtgccaggctctggcacaggtagacgggggcgccaacttttctgtggaccggtgggagaggaaggaaggaggtggcggcatcagctgtgtacttcaagatgggtgtgttttcgaaaaaggctgggggtgagcattttctgttgttcatggaaatctttcagaggaagctgccaaacaaatgagaagcagaggataagttctgaagactaaagatggtaaaattgccatttttgtgctatg

SEQ ID NO: 188978 - DNA, 2069 bp, Homo Sapiens
ttggaatagtgcgggtagtgggtttggagaagttccgaggcggcggtggcgccggtcaggacaaggatagcggaaccgggccctgggcttgtcgctcaccatgccgacagtagaggagctttaccgcaattatggcatcctggccgatgccacggagcaagtgggccagcataaagatgcctatcaagtgatattggatggtgtgaaaggtggtactaaggaaaagcgattagcagctcaatttattccgaaattctttaagcattttccagaattggctgattctgctatcaatgcacagttagacctctgtgaggatgaagatgtatctattcgacgtcaagcaattaaagaactgcctcaatttgccactggagaaaatcttcctcgagtggcagatatactaacgcaacttttgcagacagatgactctgcagaatttaacctagtgaacaatgccctattaagtatatttaaaatggatgcaaaagggactttaggtgggttgttcagccaaatacttcaaggagaggacattgttagagaacgagcaattaaattcctttctacaaaacttaagactttaccagatgaagtcttaacaaaggaagtggaagagcttatactaactgaatccaaaaaggtcctagaagatgtgactggtgaagaatttgttctatttatgaagatactgtctgggttaaaaagcttacagacagtgagtggaagacagcaacttgtagagttggtggctgaacaggccgacctagaacagaccttcaatccctcggatcctgactgtgtggacaggctcttacagtgcactcggcaggcagtacccctcttctctaaaaatgtccattccacaaggtttgtgacatatttctgtgagcaggttctccctaacctcggtaccttgactaccccagtggaaggtcttgatatacagttggaggtattgaaattgttggcggagatgagttcattttgtggtgacatggaaaaactagaaacaaatttaaggaaactatttgataagttattggaatacatgcccctccctccagaagaggcagaaaatggagagaatgctggtaatgaagaacccaagctacagttcagttatgtggaatgtttgttgtacagttttcaccagttgggccgaaaacttccagatttcttaacagccaaactgaatgcagaaaagctcaaagatttcaaaatcaggctgcagtactttgcacggggcctgcaagtttatatcagacaacttcgcttagctctccagggtaaaacgggtgaggccttaaaaacagaagagaacaagattaaagtcgttgcattgaaaataacaaacaatatcaatgttttaatcaaggatctcttccacattcctccttcttataagagcacagtaacactatcctggaaacctgtacaaaaggttgagattgggcaaaagagagccagtgaagatacaacttcaggttcaccacccaagaaatcttcagcaggaccaaaaagagatgccaggcagatttataaccctcccagtgggaaatatagcagcaatttgggcaactttaattatgagaggagccttcaggggaagtagaggtggccgaggttggggcacacgaggaaatcgtagtcggggaagactctactgaataagacatcagcattcttcagcattgtcatgagcttaatatacttaaattctactactcattggattgccggggatgtccctttaaacagactgctgccttcagctaaaaacttaatgttctttatacctttgtatgtatgacctacttttgtaacagaccatggttgtgtccaaggtaaaaccacagtgatatttttggatgctttgtctgcaatcttgacttgtttttgcagtatcattattcagacttcaaattgtgaatcttttaaacatcttgataatttgttgttgagagctgttcattctaaaatgtaatgaaattcagtctagttctgctgataaagatcatcagttttgaaaggtactgattttcctcttccctcttagttttttaccc

SEQ ID NO: 188979 - DNA, 2019 bp, Homo Sapiens
  misc_feature (769)..(828): n is a, c, g, or t
ttggctaaacccttgttcgctttttcgtagagcagagaggagccttcaggggaagtagaggtggccgaggttggggcacacgaggaaatcgtagtcggggaagactctactgaataagacatcagcattcttcagcattgtcatgagcttaatatacttaaattctactactcattggattgccggggatgtccctttaaacagactgctgccttcagctaaaaacttaatgttctttatacctttgtatgtatgacctacttttgtaacagaccatggttgtgtccaaggtaaaaccacagtgatatttttggatgctttgtctgcaatcttgacttgtttttgcagtatcattattcagacttcaaattgtgaatcttttaaacatcttgataatttgttgttgagagctgttcattctaaaatgtaatgaaattcagtctagttctgctgataaagatcatcagttttgaaaggttactgattttcctcttccctcttagttttttacccaatatatggagaagagtaatggtcaatcttaacattttgttttaattgtttaataaagctgctgggcagtggtgcagcattcctacctagtgtcataaaagcaaaatacttacatagctttcttaaaatataggaatgacattacatttttaggagaaagtaagttgctttgcaccgcctacttaattcttttccatatattgtgatacaaacttttgaatatggaatcttactatttgaatagaaatgtgtatgnnnnnnnnnnnnnnnnnnnnnnnnnnnnnnnnnnnnnnnnnnnnnnnnnnnnnnnnnnnngcatgctgtgaaacttgactacacaacataaatcactttttaaattccaggaacgggtagtctgacacggtgattatccttttgaggctgaatccgttattaacttgttatttaggtttttactcccagtagcaagggattctaagttagttgcacttacatgattattgttatttaaaactaagaataaaggctgcattttcaaagataaattggaattgctgttggtgaaataacaaccaaaatactgaatctgatgtacatacaggtttctacaggaagagatggtataatttacaatttggagatttaataaccagggctacccagaaaaagtgacttgataacatggtaccaataagtaagggatgctctctcggtttgcttttgccactttcaagattttaacttctcaggttattaatcaaaattattgtataagttagccaatagaatttttaggttaaaacaacagatggggggtttgtggagtgtttaatgtcatgggcatttttagtagcatagaccctttgttctgcatttgaatgtttcgtatatttttgtttcacagttaatcttccctccccaagtttgctattcaaatcaactgcctgaatgacatttctagtagtctgatgtatttttctgaggaatagtttgtgattccaatgcaggtgtcttcattaccattacctctacactgcagaagaagcaaaactcctttattagaattactgcacatgtgtatggggaaaatagttctgaaaggctagaatgatacaagtgagcaaaagttggtcagcttggctatggagtggtggcaataatctctaaacattccaaaagaccatgagctgaacctaaactcccttggaatctgaacaaaggaatataaaattgccatttgaaaactgaccagctaatctggacctcagagatagatcagccagtggcccaaagccatttcaagtacagaaattatagagactacagctaaataaaatttgaacattaaatataattttaccactttttgtctttataagcatatttgtaaactcaaaactgagcagaagtgactttactttctcaagtttgatactgagttgactgttcccttatccctcacccttccccttccctttcctaaggcaatagtgcacaacttaagttattttttgcttccgaaat

SEQ ID NO: 188980 - DNA, 1076 bp, Homo Sapiens
ttggcccgccggctccccgtgcactttaacccgccctccagctgtgtcctggagatcagcgtgcggggtgtgaagataggcgtcaaggccgatgactcccaggaggccaaggggaataaatgtagccactttttccagttaaaaaacatctctttctgcggatatcatccaaagaacaacaagtactttgggttcatcaccaagcaccccgccgaccaccggtttgcctgccacgtctttgtgtctgaagactccaccaaagccctggcagagtccgtggggagagcattccagcagttctacaagcagtttgtggagtacacctgccccacagaagatatctacctggagtagctgtgcagccccgccctctgcgtcccccagccctcaggccagtgccaggacagctggctgctgacaggatgtggcactgcttgaggaggggcacctgccaccgccagaggacaaggaagtgggggccgctggcccagggtaggggagggtgggggaatggggagaggcaaatgcagtttattgtaatatatgggattagattcatctatggagggcagagtgggctgcctggggattgggagggacagggcttggggagcaggtctctggcagagaaggatgtccgttccaggagcacacggccctgccccatcctgggccatacctcccctgccagggctcgggtgctctggctcctgccttgatgaagcccatgtcctgccttgatgaagcctgtgccacctgcaagtgcccgccctgccccgtcccaacacccaccgaagaaccctgagctcaggctgagcccagccacctcccaaggactttccagtgaggaaatggcaacacgtggaagtgaagtccctgttctcagctctgtcatctgcggggcttctgggtggctcctgccaccgacctcactggcatgctagcctgtggcaggcctaggacctcagcggggaggaggagctgccgcaaggccctatcccagcaggagagggaggcttcctgactgacacaggctagccccatcttggtcctgtcaccctggccccaactattaa

SEQ ID NO: 188981 - DNA, 2432 bp, Homo Sapiens
  misc_feature (200)..(574): n is a, c, g, or t
ttggcgagggctggacgccactgcacgtggccgcctcctgtggctacctagatatcgccaggtacctcctgagccacggggccaacatcgccgccgtcaacagtgacggggacctgcccctggacctggccgagtcggacgccatggaggggctgctgaaggcggagatcgcccgccgagacaggatctcacgctgcctnnnnnnnnnnnnnnnnnnnnnnnnnnnnnnnnnnnnnnnnnnnnnnnnnnnnnnnnnnnnnnnnnnnnnnnnnnnnnnnnnnnnnnnnnnnnnnnnnnnnnnnnnnnnnnnnnnnnnnnnnnnnnnnnnnnnnnnnnnnnnnnnnnnnnnnnnnnnnnnnnnnnnnnnnnnnnnnnnnnnnnnnnnnnnnnnnnnnnnnnnnnnnnnnnnnnnnnnnnnnnnnnnnnnnnnnnnnnnnnnnnnnnnnnnnnnnnnnnnnnnnnnnnnnnnnnnnnnnnnnnnnnnnnnnnnnnnnnnnnnnnnnnnnnnnnnnnnnnnnnnnnnnnnnnnnnnnnnnnnnnnnnnnnnnnnnnnnnnnnnnnnnnnnnnnnnnnnatgagccactgcacccggccatggttttatattaaaaataataaaaatacggtgaatttctggttgaaatggggaaaggcctgtgatctccgttttcccagtgcttagcgctgactcagagaccctgagtgggacacacgactgcatggagtacagttgggaaacaactgggctagtctgggcctcctgagtctcagaggggagcagggggaagagctctgggcaagtcactgggctgaaccctggccagcccagtgtatgaccctgggtatttcaggtcatggggtgtgagtcctacctcgtgcctcttatcctcctaggtgtggatgtggaagcagccaagcgggcagaagaggaattgctccttcatgacacgaggtgctggctgaatgggggcgccatgccagaggcccggcacccccgcacaggcgcctctgccctgcacgtggctgctgccaagggctacattgaggtgatgaggttgctccttcaggctggctacgacccagagctccgggacggggacggctggactcccctgcacgcagcggcacactggggcgtggaggatgcctgccgcctgctggccgagcatggcgggggcatggactcactgacccatgcggggcagcgtccctgtgacctggccgatgaggaagtactgagcctgttggaggactggcccggaaacaggaggaccttcggaaccaaaaagaagcttcccagagccggggccaggagccccaagcgccctctagcagcaaacacagaaggagctctgtgtgtcgtctgagcagtcgcgagaagatttccctccaggacttgtccaaggagcgccggcctggtggggctggggggccccccatccaggacgaggatgagggggaagaaggtcccaccgaaccaccccctgcagaacccagaaccctcaatggcgtctcctccccgccgcaccccagccctaagagtcccgtgcagcttgaagaggcccccttctccaggcgctttggcctcctgaagacagggagttctggtgccctgggtccccctgaaaggcggacagcggagggagcccctggggctgggctgcagcgctcggcttcctcctcctggctggaagggacctccactcaggtgagtgagggttgggccgggtccaggcccaggcccctgcccagtcgagggaactgccccttcctccccttctcctctccacacaggccaaggagctccgtcttgccagaattaccccgaccccctccccgaagctgccggagccctctgtcctgtgagtccccagggcctgggcccctcaggggtgggtggcagatgtgggttccaagcctgtccgtgtgatcctgagtgagaccatgtaccccctggggtctggttcctgccgccactccagagcctgtgctgtgttcctcttgggggctctctccctccctcaggtctgtgttgaaacgtcaccttctcccctatcttccccccaccccgaggtgcacactgaccaccctgctgccaccacggcgccgtccgcacacgcacaccctcccgctctcagttctcgcactgctgcttctgtccagagtcctttatccttctgaccggttgcgtagtgtgctggtcttttcatggcttttgtgggttttgtgtatttctgctcagctctgactctgttgtggcccagataatttgtttctttcactcacggctgcatctccagtgccgggcacacaatgcacctgggtaatgtttgtggaatgaatgaattgatgcagggtctgagtcaccaagcctcctcctttgcttggagaactcctcgcctccctccatgattccggagcctgaatcccca

SEQ ID NO: 188982 - DNA, 792 bp, Homo Sapiens
  misc_feature (277)..(286): n is a, c, g, or t
  misc_feature (559)..(638): n is a, c, g, or t
ccaatcaacactttcagctccagtccgccatcttcccgcctgtaaagacttcaaactctcagctcccaccttctctggatgcctttccccaagccgtggactgatccagcgcatgtgggcgatttctttaactttctccccttcggtctttcatttttgggttgcacaatgcacgggagagagcggggttgaatatctcgcacccagggcgggcgagcagcggactgtaatttttttgcatgcaacaagacggaggaaaagaaagagagaggggagnnnnnnnnnngctcccgatacccaatcaatggcaagacgaagtgattgccttgcctctcggattcctctcggcagcgtggaaaatgagccccgggaaggcaacttcaactcatccaccactctccgtgcagagcactccggttccaacaagtcagccgatcccgggttcagccggctagtgcatcttgcagctggggcgccgtaacctcacaaatccctgcatctctctttattcccttctgcagcggctccaagactccggcggtgtttactcctgcgctcnnnnnnnnnnnnnnnnnnnnnnnnnnnnnnnnnnnnnnnnnnnnnnnnnnnnnnnnnnnnnnnnnnnnnnnnnnnnnnnncctccccgcgggcagtgccggccccgagcagcgcttcgcaggcccccgcgcgaacgctgccgaccgccgcgttcggtcgccgaatgttacccggttctgaatgttacacttacacattccattcccgacacgacattgcaggcctcatccccaa

SEQ ID NO: 188983 - DNA, 2993 bp, Homo Sapiens
ttggctgattggctggccgctccagcctcccggcccgcttgctggctgcccagctgctaggacagtttgcagagcagtggcgtgcggagcggcggcggaccacctccaggggctaagtgatggatcttgtactccgtgttgcagattactatttttttacaccatacgtgtatccagccacatggccagaagatgacatcttccgacaagctattagtcttctgattgtaacaaatgttggtgcttacatcctttatttcttctgtgcaacactgagctattattttgtcttcgatcatgcattaatgaaacatccacaatttttaaagaatcaagtccgtcgagagattaagtttactgtccaggcattgccatggataagtattcttactgttgcactgttcttgctggagataagaggttacagcaaattacatgatgacctaggagagtttccatatggattgtttgaacttgtcgttagtataatatctttcctctttttcactgacatgttcatctactggattcacagagggcttcatcatagactggtatataagcgcctacataaacctcaccatatttggaagattcctactccatttgcaagtcatgcttttcaccctattgatggctttcttcagagtctaccttaccatatatacccttttatctttccattacacaaggtggtttatttaagtctgtacatcttggttaatatctggacaatttccattcatgacggtgattttcgtgtcccccaaatcttacagccatttattaatggctcagctcatcatacagaccaccatatgttctttgactataattatggacaatatttcactttgtgggataggattggcggctcattcaaaaatccttcatcctttgaggggaagggaccgctcagttatgtgaaggagatgacagagggaaagcgcagcagccattcaggaaatggctgtaagaatgaaaaattattcaatggagagtttacaaagactgaatagattattgcccagttattcttaagtaaggacaaagaaggaaatatcatcgtatttcttttttttaataaggaaaaaataatatccatacagtcaagatacatagtaaatggtatcatttggaaatcagcatcgtgggcactgctgaggaatgatcctagtggtaggtcagaagaagatgctgtgaacaccaggactttaatcttatgcttaaaatgccagatgttgttcgggggacaacttgtatctttctagcagcagatctgtagtttgtatagcctcaacaacaattttaaataagatggagaataaattattgaggggactaggctatatgcatttgccttcatccacccatgtttattaagaatcattgtgcttaataataccaagactaagcaccataaccaagaaatactaatgtaaagattgtttcttgtttcaggaatggttaattcttcaacgttggtatgataatgataacttgttttgacttgaataaagtactacatcagtgtggaaaaaaattctgatacattagcagctatgtaaatgacctaattgatagcaggtgtaataagactatcgtcttcctacacataggaggctcattctctggacacactatcacctattacattttactgattaacaaataaattggaatttaaaaatatcgatatcaccatgatttaatccagatctgggattatgtagctaaacattgtgatgattattatttaaaaccattatttaataagagtaaaaatatgtgaatctggatatatttaaaaaaagaaatttgatgcccagataatatattaggcactactgattttttagttaaattgatgcactacacttttgatgtttgaagttacaaacctgtaatttttttgtaaaggaaataattgccaaatacctaggcccattgctgacgattagttctaaaatcttattcctcctcttctcccctcacttttccctacttcctctgcaaaaagatttaacaaatacattcataaggaaatgtgtgttgtaacaaatatattgcaaaaacatagtttgtaaaggcattctataagctatttatgtaaaatcaataaaagttgatcataattaaactgtatcagttgagtattatagcagcacaaagtattctttgtacagattttgtgccaatttgaagccacagaaatgatgtggattgttaattgtgttttagaacatccccggacactcagtgtcacagggggaaagaagtgggtaccacattctgtttatatttcacattttaactagatttgagtgtttttagcaagaaatcagttttaaaatctaatgtctgggatccagaagaaaatgtctttaatctgtgagttattgtcacaatgtcatcttatttaaatgtaccaattagcattttgtaataggcaaatgtcatttagtgcttttcaccaatcccactcacccccggtgctccgccttgcctaagaaaaagaaattaaggagaagtaaactttatttcctaatataatgtcagctgatatttattgagcttttcctctttgcccagagactaggacccaaagaagttaagtaactattcccaggtttatttctctctcatatgatgtcccatgtggatgtttgtggtcagtggacagctttccacctagtctttctgcgacccaggctccttcctcttggggctctgcctttctctcagtccatagagccctctttgttgaaagagcacataggaaaagaaggaaaagtctgtgtggaaaatgtttctgggtcacgcctggaagtggtgcatatctcttccgcccatgttcctttggacagaactccgtcacatggcccacctagagagattttgggaaatgtgtccagctgtgtgcctgggaggaagggggcaccattttcttgagcagctagacagtttgccgtatttgtggtgttctctcttgt

SEQ ID NO: 188984 - DNA, 966 bp, Homo Sapiens
ttggctccccctgcctcctctccgcctttaacttctcgggaagatgaggcagtttggcatctgtggccgagttgctgttgccgggtgatagttggagcggagacttagcataatggcagaacctgtttctccactgaagcactttgtgctggctaagaaggcgattactgcaatctttgaccagttactggagtttgttactgaaggatcacattttgttgaagcaacatataagaatccggaacttgatcgaatagccactgaagatgatctggtagaaatgcaaggatataaagacaagctttccatcattggtgaggtgctatctcggagacacatgaaggtggcattttttggcaggacaagcagtgggaagagctctgttatcaatgcaatgttgtgggataaagttctccctagtgggattggccatataaccaattgcttcctaagtgttgaaggaactgatggagataaagcctatcttatgacagaaggatcagatgaaaaaaagagtgtgaagacagttaatcaactggcccatgcccttcacatggacaaagatttgaaagctggctgtcttgtacgtgtgttttggccaaaagcaaaatgtgccctcttgagagatgacctggtgttagtagacagtccaggcacagatgtcactacagagctggatagctggattgataagttttgcctagatgctgatgtctttgttttggtcgcaaactctgaatcaacactaatgaatacggaaaaacacttttttcacaaggtgaatgagcggctttccaagcctaatattttcattctcaataatcgttgggatgcctctgcatcagagccagaatatatggaagacgtacgcagacagcacatggaaagatgcctgcatttcttggtggaggagctcaaagttgtaaatgctttagaagcacagaatcgtatcttctttgtttcagc

SEQ ID NO: 188985 - DNA, 1443 bp, Homo Sapiens
ttgggtaactacgtgtccgggaaacatgcctgcatattctacgatgaggtgagggccggagatgcggtgggagggagctttcccaacctgaggcctctcccaggcagtaggtttttgttcagtgccctgaggggagggaagagggattgggggtcctctctttttcttccctccctgtcattcctggaggaggagagtcttgatgtgaaatagcatcctacctgggaagctacctgcttcccaggagcagggctaccatttttcctgaggttagtcacaggcacaacagagggagcctaccctaaagcaagggaggggaccagcatagaaggaagccaagccttgtgggtgtgtccctgtgaatttcattatcatcacgggccagtgagtatcataccaagaggagcggtgctgagagggcagagtgaaggagtgggagagtagggagtgtgggacaccagaaggaaagcttccctgaggaggtgtctctagccctcttctgaaaggacaggggccatgactggggaggcaagtaaggactctctaggtagagtagcacggccttctccatatgtcctctctccccttagccccaggccccacacagcagaccacacatcttatctcccctcctcctcctcagaataccaaacattatgagctgttaaactacagtgagcatgggacaacggtggacaatgtgctgtattcatgtgacttctcggagaagaccccgccaacccccccaagcagtattgttgccaaagtgcagagtgtcatcaggcgccgccggcaccagaaacaggacgaagagccaagtgaggaggcagccatgatgagttcccaggcccaggggccgcagcggagaccctgcaattgcaaagccagcagctcgagcttgattgggggcagtggggccggctgggagggcacagccttactgcaccatggcagctacatcaagctgggctgcctgcagtttgtcttcagcatcactgagtttgcgaccaaacagcccaaaggcgatgccagcctgctgcaggatggggtcttggccgagaagctctctctcaagccccaccagggccctgtgctgcgctccaactctgttccttaggactggcggctaccccgccactggcctgtacacccacccaagactcctgcaatgcaaaaatgtacacaaaccaaagcccgggtgttttctatactctaccagaaacccttcaactacaatctttgcatgaaatgaagaaaaccttttgactgttttttaaaaatcctttttcttttctcaagttctaagggcatttgcacatatatttgtactcacatttcatgggaaagcggcagacctgagctgaggaacagcgtgggcagggagggaaagacccaaggtctggacacttcctccaacacaaaacccttccccaccccacctcc

SEQ ID NO: 188986 - DNA, 1509 bp, Homo Sapiens
gggcccactattgccacacgtcttctttggacacccagaaaacctggcaccgtgaaaccaccagctagagaagaatgaaatgctactcttcctacagtctaatagcaaaaccagatctctagtacagcaaactgtacaaaaatgatagaaaggaatatgcactgttattagcacagtgcttattttaatataaaataaacagcttacattttcactgtaaatataggctatgtacagaattatatatagatatagctacacgtataaagcttcattataggcctctgatacaattataataacggttccctgaaccttttagagtgcaattaagaacaaaaactaaattttgtttacatgaatatggaataaatacaataatcaaaatatgactctccctaaaagtgaaacacacaagccaatccggaactgctgtgcgaaagataaaatcgagaaaggcaaggtttcggtaggaggacgcgatgaggggcccgccccaggcagggaatggcaatgctctaaagaaaagagacttcgtcaacagggaggagtcagcccttgacagcgaccttgttctctgcagcagcaaacatggcatagaatcgggaactgtcgttggacagaaggaccgatggggtgtcaaactccaccacctgtccctgggccagcaccataatcctatcggagcctagaaccgtgtgcaggcgatgggcaatggtcagcatggtacagtctgcaaatgcttctcggatggtctcttgaatcaataagtctgtctctgtgtccatggcagctgtggcttcatctaaaatcagaatcttacagtggcggagcagggctctagctatgcacaagagctgccgttcccccactgagaagttatccccattctccatcacttcagattcaagtttcagaggtagctgagcaatacattctttcatgtgtgtcctctccagggcatcccaaatctggtcttcagtgtactggttgaaggggtccaaatttgatctgacagtgccactgaacagcaccggctcttgaggaatgatagagagtttgcttcggaggtcggcaaggccaatatcactgattctcactccatcaatcttgatgcagcctccagataactccaccagacggaagagggccatccccagcgaggacttccctgatcctgtccgccccacaatgccaatcttctctttaggtttgatcgtgaaggatactttctttaggacgagagggaggttttctcggtacctcatctctgcgttctcaaaggtcacctctccctcctggggccagtcaggggagggagccttgttcttaattctggcaggtgcttccaaggacagagtctggggagacaagggtggccagttcagactgaccacagattcttggggagctgcaggctttgtcacagagaaataaaaccaggacaaccatagtagccacacagaggtagctgccaccctgtcaccttgctaggaaagaatcccccaa

SEQ ID NO: 188987 - DNA, 417 bp, Homo Sapiens
ttggctaagatggcggcgagggggacggtgaaggttgcctcccgcccgtccgggctctgatcctccgtctccccgtcccccggcggccggcccatggcctggcggaggcccgaaccatggacctccgcaccgccgtgtacaacgccgcccgtgatggcaagctgcagctgctccagaagctgctcagcggccggagccgggaggaactggacgagctgacgggcgaggtggccggcgggggaacgccgctactcatcgccgcccgctacggccacctggacgtggtggagtacctggtggaccggtgcggcgcgagcgtggaggccggtggctcggtgcacttcaatggcgagaccatcgagggcgcgccgccgctgtgggccgccaccgcaaccggccacctggacgtggagcgga

SEQ ID NO: 188988 - DNA, 1993 bp, Homo Sapiens
ttgggtgttttatcgccatgacttaatcaatcaacttcaacacaatcatgccctagttactttggtagcagaaaaccttgcaacttacatggaaagcatgagactatatgctagagaccatgaagattatgacccacaaactgtgaggctgggaagtagatatagtcatgttcaagaagttcaagaacggcttaacttccttagatttttattgaaggatggtcagctgtggctatgtgctcctcaggcaaaacaaatatggaaatgcttagctgagaatgcagtttacctttgtgatcgtgaagcctgttttaagtggtattccaagttgatgggggatgaaccagacttagatcctgatattaataaggacttctttgaaagtaatgtgcttcagcttgatccttctctgttaactgaaaatggaatgaagtgttttgagcgattcttcaaagctgtgaattgtcgagaaggaaaactagtagcaaaaaggagagcctatatgatggatgacttggagttaataggattagattacctttggagggtcgtgattcagagtaatgatgatattgccagcagagctatagatctcctcaaagagatatacacgaaccttggtccaagactacaagtcaatcaggtggtgatccatgaagacttcattcagtcttgttttgatcgtctgaaggcttcctatgacacattgtgtgttttggatggtgacaaagacagtgttaattgtgcaagacaggaagctgttcgaatggttcgagtattaactgttttaagggaatatataaatgaatgtgacagtgattatcatgaggaaagaacaattctccctatgtcgagagcattccgcggtaaacacctctcttttgtagttcgatttccaaaccagggcagacaggttgatgacttggaggtatggtctcatacaaatgatacaattggttcagtacgacgatgtattctcaatcgtattaaagccaacgtagcccatacaaaaattgagctctttgtgggcggtgagctgatagatcctgcagatgatagaaagttgattggacaattaaacttaaaagataaatcgcttattacagccaaacttacacagataagttccaatatgccttcaagccctgatagctcttctgattcctccactggatctcctggaaaccatggtaatcattacagtgatggtcccaatccagaagtggaaagctgtttgcctggagtgataatgtcactgcatcccagatacatctcttttctttggcaagttgcagacttaggtagcagcctaaatatgccaccccttagagatggagcaagagtacttatgaaacttatgccgccagatagcacaacgatagaaaaattaagagctatttgtttagaccatgccaaacttggagaaagcagccttagtccatctcttgactcacttttctttggtccttcagcctcacaagtgctatatctaacagaggtagtctatgccttgttaatgcctgctggtgcacctctggctgatgattcctctgattttcagtttcacttcttgaaaagtggtggcctaccccttgtactgagtatgctaaccagaaataacttcctaccgaatgcagatatggaaactcgaaggggtgcctacctcaatgctcttaaaatagccaagcttttgctaactgccattggctatggtcatgttcgagctgtggcagaagcttgtcagccaggtgtagaaggtgtgaatcccatgacacagatcaaccaagttacccatgatcaagcagtggtgctacaaagtgcccttcagagcattccctaatccatcatccgagtgcatgcttagaaatgtgtcagttcgtcttgctcagcagatatctgatgaggcttcaagatatatgcctgatatttgtgtaattagagctatacaaaaattatctgggcatcaggatgtgggtcgttacagctagtattt

SEQ ID NO: 188989 - DNA, 1378 bp, Homo Sapiens
ttggcactcttgggtgatttcatggaccctaaagcagacctgacactgatccagatttgcagtccatttttaaggacacctgtctttatttcctcaaagtcaagcagctttctctggaaaatgaatgctaattagtgtgaaccaaaagagtaagtaagagtctgaagtttttttaaaggagaaagcttattatggaaagtcactggtcctcccctccgcacaggaaaggtacccagtagataatgaaccaaattaagttccctccctccagccagaagttaaacatctgggatatgacgtcttcatgccaggggcactcatttcttagcagcctctctacatacatctctcaggtggtgccaagaggcacaccaggtagagcaaacttagcagctctgactaacaggctgcaaagtgcaagttcagattctgtggcagagatttggaaggcacccacctccagactgcttcccgtccaagttaccaggacagctcaaaaacatgctgacagaaaactcccatggctctaggaagaagtgacactaagccaacacctttctttatgtgggagcagaatcagctgatgaaggggtgggcagcagtgtggggcaggcaccccactggctgcagctagcccaccataggcacagcacatcccaccactctccttccagtcctgaccaggccccagccggcaacttctaccgagagccatggctcaacaccaaactggacagtagacatcatgatccctccagttagctctaattacagaccccaccagtacagcttgacagctcccggcaccatcccttccttcatctgacttattgaacttttacaaactaacagtcaccagcaccaaagaattaagtcaactaacctgccttgaattttagaccagcaatccatatggctttatctggtataaatcttctgcctttgatcatttctggaccgtaggaaaaaggaatagcaatcattaaaatcttgggccagagaacactatttttacataacagtttcttaacctaaagtcaaggccttggactcttccctgagggttgcctgagattccttcatgctttctattcaggactaagtcccttactgcaaatgtgttagctctaacatctcccacaagctagaggaacttgcgagtatattaacaaggacacatctgacatcctgtgtttggttagaatatacagcacattgtgataacataaagtggattcatcttgtatcattataggcagaaggtatttggcaaatttttatgtattgttttatgtactgtacaagtaacttattcttgaataatgcaaattttgctataatgtacaaattgctatatgtgaattaaaaagttttcaga

SEQ ID NO: 188990 - DNA, 1647 bp, Homo Sapiens
  misc_feature (693)..(711): n is a, c, g, or t
  misc_feature (759)..(809): n is a, c, g, or t
tacaaaaaagttggcgaaggcctcctcaacgacgaagaggtctttcccacgcgtgttggagttcccttccctaagaacttccagcaggtctgcaccaagatcctgacccgcctcttccgagtctttgtccatgtctacatccaccacttcgatagcatcctcagcatgggggcagaggcgcacgtcaacacctgctacaagcacttctactacttcatccgcgagttcagtctggtggaccagcgggagctggagccactgagggagatgacagagcggatctgccactgagcccaggtctggacttttttggccatcagatggacgatctgaacatagggtggctggcagaggggacccccaggagcctgaaggaatctgaaggcactggaatcactccacacacccaaagcctctggacttctggttctcaggagtctgcctacctgtcgccctgaccgcttgtggatggagaaggggagagcatctaggcaggcaaacagaagggaagtggagttaaacctctggcatgaagtctgggagtagggtaggctagggggtttcttctatgacacttgacccttccatgctggttcccaagcctattggaggaatgtgggtgtggccgaggtgatggcaagaaaggtgcaagaaagtgagcagtctgcctgtgagtgagcacagatgccgggnnnnnnnnnnnnnnnnnnnattttcactgtggggtgtgtctgtgagagctagctgccttacccctcnnnnnnnnnnnnnnnnnnnnnnnnnnnnnnnnnnnnnnnnnnnnnnnnnnntgggaccatcagaccatgtccactgtaggagtgatgacagctcagcgtccccactcagtgtatctgaccatgtgtgtaagtgcacaaaaatgtggttgtagatgttgctctacattcaaaccttccaggctacactcttccatcagcatgagtcctggagagctgggggaaggtaggaagaggagccttgccttgagttcctaaaccgacccactgcagacacaggctctgattctcttacccagagatgcccatgagctgacattttactcatccctctgcctccaagaaggcctgtattatacgtgtcctcctgggggttggagatgatccctcaagtacacaaaggtcccctggcccttcatctgggaatcatatactccactctagctcccagaatctacagacctggctcctcggatctgaagcccagcacaaaataatctccccgtccaaggagcttgtggaacttgaattgggaactttggagtcttgtctcccatcccagcacattgaggatgtagttggtgaatggactcttccaggcatggagatcctccatcctaaaagtacctgcctccttcccagccatccctgacacattccagccagttggatctcacagcacagctatccacagggagactggggatgttcacgcagcactccattactcagtacctccataccccagccctatacgcagacccacaggtggggaaactgaggcaggaacagggttctgccctcccagagcctccactctgggatgccagaatggaaagccagagggaacctgagaatcatccagtcttactgtctcaatgtacataccggg

SEQ ID NO: 188991 - DNA, 952 bp, Homo Sapiens
  misc_feature (402)..(425): n is a, c, g, or t
  misc_feature (666)..(675): n is a, c, g, or t
tttgtacaaaaaagttggcaaaattaaaaccataaacattgtcttggagggttaaaaaatagaaaggtgtatgtgtatagattcacatacacatatgtatatacaggctgacttgatctagaacattaaatccgccctgcaagttaaccccccattgcaatggttgccttaaggtgtttgctagttgtgtacatagtgtggttaatcattagctacactgcttcccacttgattagagcaatgggaagcatactgtggcctaccagcatctggaagtgtgtgctcgatctgtatgtgtgcagaggtggtgtggatgtgagcgtgcatgaaggaaaaaaagctgctactcctagtaggccaaacgctcaggttaaacaactgacgagtgttactgtagggtgnnnnnnnnnnnnnnnnnnnnnnnncttctatcaaattgctacttttgttgtggaagacaaaagcatttccatttcaacgagtttgtcagctttattaatgttgggcaaaaattgatatgtcatgaaaatgaaacagatctatagttttgggacaaaattataaaatgaaatgtgtaggtaacctatttatatactgctataaagtattttttgaagagagatatgcaaagaagctattacctacataagaggtatatttaaagannnnnnnnnncatcctggtgccaggaatataaaaaagagtggatatatttaaccataacatactgtgattcatcaaacagcacaaactttcatttcatggagtttatctgttgacattgatttaactgtcacttgttttatcatgtggggaacataagttatgtggccaaaaatataaggattttgaattaatgttaattcaagttgtattgtcttattgaattgtcttttccaagtgctgccggttgaaaagggaagcatatgttacaaatctgttttgaaatgtt

SEQ ID NO: 188992 - DNA, 1477 bp, Homo Sapiens
  misc_feature (337)..(360): n is a, c, g, or t
  misc_feature (610)..(610): n is a, c, g, or t
ggtgtatgtgtatagattcacatacacatatgtatatacaggctgacttgatctaaaacattaaatccgccctgcaagttaaccccccattgcaatggttgccttaaggtgtttgctagttgtgtacatagtgtggttaatcattagctacactgcttcccacttgattagagcaatgggaagcatactgtggcctaccagcatctggaagtgtgtgctcgatctgtatgtgtgcagaggtggtgtggatgtgagcgtgcatgaaggaaaaaaagctgctactcctagtaggccaaacgctcaggttaaacaactgacgagtgttactgtagggtgnnnnnnnnnnnnnnnnnnnnnnnncttctatcaaattgctacttttgttgtggaagacaaaagcatttccatttcaacgagtttgtcagctttattaatgttgggcaaaaattgatatgtcatgaaaatgaaacagatctatagttttgggacaaaattataaaatgaaatgtgtaggtaacctatttatatactgctataaagtattttttgaagagagatatgcaaagaagctattacctacataagaggtatatttaaagattttttttantcatcctggtgccaggaatataaaaaagagtggatatatttaaccataacatactgtgattcatcaaacagcacaaactttcatttcatggagtttatctgttgacattgatttaaactgtcacttgttttatcatgtgggaacataagttatgtggtcaaaaatataaggattttgaattaatgttgattcaagttgtattgtcttattgtattgtcttttcaaagtgctgccagttgaaaagggaagcattatgtttacaaatctgttttgaaatgtttgccaaaattttggtagtgtctttaataaagatgtttgtctccagcatccagaaaaataaatgaataactttgttgtgtatcactgtaaaccagaaaaatgttggttatctagaaaacttgagagagcatgtagattaacttttctctttggagttctaaaacattaactggaaagattagataatatactaaatgtatacagaagtatacagactatacaaagactgaaacaagtcccttttgcactacaactctataacattaccgcagaaattttggttctatgtagcatggacctcctaaggaattctgtttcttttagcattgagatccctggtgctctttttttacctcagaattggtacaatcattattaaacgttaatttatttcaaactttttaattgaaaaaaggaaagggaaacttaattggggataaattcacgcatcatattattatgatagagtctcctgagtggttcgtctataggtaatgaactcattggtgttatttcttggacatcttggccttttaatcaaagactgtgtgctgctatttgctatgagcaagtttctcaaaagcaaaa

SEQ ID NO: 188993 - DNA, 1670 bp, Homo Sapiens
gccaggtttccaggtccccacggcaagggctgttgggtgtggcagcagaagtacacagcagtttttcccagctcacagcagtgacctcagatctccagcagcaagggccgcactctcgtgcccacaagggccttgcagaaatgctccggtccctgggcctcccccggcaggaggggcggggctcctgcctgcagtgaggccacagcactaagcggcttcagtcacatgcttttcaggtgaatcactccaaattcagtgaggagggccacgacaaggaagttcaggtagaagaggagcaggcagaagccatagactctgctgagctggaagcactgcaatgggactgagaccagggagaagacgaggctgagccccagggcgcctgccaggacccacaccagcagtccgtctggctccagcttcacttctgtgtggcttcgggagatctggagcaggcagcccagccccacacccacgaggatgttgaagatgatgccgccaaagcaggcggagaacgccatccgtgggtagccctggcgagccagtgtgaaatccgagaaggcatctccaatgctgttcccccaggccagcagcgtgagccccagcacagtgttgctcagccggaagaccacacccagggaccgcaagatgttcaccacctctgtggcggccgcgttgatccacagggcgctggtcagaaagcccaggaaagcaaagagccagtgaagcctggggggctggctgtcagatgtggcaaaaaaggtcactgaagccaaggctgtgcctgcgatcaccaccacgacccagacgggaacgaggccgcctatctcatagacaccataggtccccgactgcagggtcaggaccacaaccagggggctgataaccagatgcagacagttgaggggccgtttccagttctggtcatccttgtccgggtccacgacggggactgtgaggagcagcaggaactccacaggcagcttgaacaccttgagggctttccagtatgctgatttccttctccacttcatgtaatccaggggattgagggcccggaccaggatctgagccgtggtctcctggtagaagaacagcggccggtactcatcaccgtagtcatagctgttggtattagaagatacccggtcctcctcggagtctgagaggatctctggagtaactggcatggggcagaacagagatcctctccgttgccgttggtagatccaggtgcagagaatcacagtgaccacatagaacacatacaagcccaggtaacccagagcccatgccagggtgaccctgccacggaagagcatgaggaaggtcaggaacacagccaccatgtagaaaacgatgtccctgccaagaagggcctggaggcagccatgaaggggtgtaggatggtaatgcctccggccaccactgtggtaaccagcacgccagcgccaaacagtgccccaagggccaggccggctgtgtgcgggtcagagaaggccaccagggcactgaagatgtcaggtgcaccattcccaaatgccaggaaggtgacgcctgccacgttgtgggagagcttcagtgtggtagaaatggccgacaagttggggcagaaaaacttggctgcggtgactcccagccaacttttttgtacaaagttggtttttatg

SEQ ID NO: 188994 - DNA, 701 bp, Homo Sapiens
ttggcccatgcagaggtcagtgagagcccaagccaattgctctaggccccgtggctggctacttatggggcactgtcctgaccagctctgctaagatgctcctggcccctccctccaccccgtccagaggacggacccccagcgccgtggagaggctggaagccgacaaagccaagtatgtcaagacgcaccaggtgatagctaggcgacaggagccagccctgcgtgggagtcctgggccgctcacgccgcacccctgcaacgagctggggccccctgcatcgcccaggacgcccaggccggtccgccggggaagcggcaggcggctgccgaggcctgattccctcatcttctaccgccagaagcgggactgcaaggcttcggtgaacaaagagaacgccaagggccagggtctggtgcggcgcctctttctgggtgccccgcgggacgctgccccgagcagcccggcctccacagagcgacctgcggcttcagggggttgggctgcgccccaggatgccccggaagcggcgggaaagcgggcgctgtgtcccacgtgctcgctgcccctgtcggagaaggagcgcttcttcaactactgcggcctggagcgcgcgctggtggaggtgctgggcgcagagcgcttctccccgcaaagctggggagccgacgccagcccgcaggcccggaacttcgccgcc

SEQ ID NO: 188995 - DNA, 399 bp, Homo Sapiens
tcatgagccaccatgcccagcctatttatttctgattctttaagggtgactggacgtgttgatcagcgctcgctgggatttggctgacgtggccccagccccgcctccctccccaccccacaatggcagaagaaactggacagagtaaattagctgcagccaagaaaaagttcaaagaatattggcagagaaaccgccctggtgttccagcagcagcgaagaggaacacgaaagcaaatggtttttagccctgagacggccgcttctggtggttgccactcatctgaagctgtgagtcttgcctggacaggcttttggggacagggggcccaaggagcagtagagggcaatcgttaagattgtggatggactgttgggtactggtgaaggattctggat

SEQ ID NO: 188996 - DNA, 1522 bp, Homo Sapiens
  misc_feature (1279)..(1331): n is a, c, g, or t
ttggaatacacatgcagcaaatagcattgtgagtcaaactattccaaaagcacagattcagcaatcaacacacactcatctggatatctcactttttccattgggtttaactgatgaaaaaagtaatggaacaattgcccttgtggatgattctgaggatcctggagccaatgtatctaacatacagcttcagcaaaaaatttcaagtctggagattaaactcaaagtatctgaagaagaaaaacagagaattaaacaggatgtggaatcattgatggaaaagcataatgtcttagaaaaaggctttctaaaagaaaaagagcaagaggccatttcttttcaagatagatacaaagaacttcaggaaaaacataaacaagaattggaagacatgaggaaagctggtcacgaagccctcagcattattgtggatgaatataaggcactactgcagtcttcagttaagcaacaagtagaagctattgaaaaacagtacatttctgcaattgagaaacaggcacacaagtgtgaggagttgctaaatgctcagcatcagaggctccttgaaatgctagatacagagaaggaactgttaaaagaaaaaataaaggaagctttgattcagcaatctcaagaacagaaggaaatattggaaaagtgtttggaggaagaaaggcaaagaaataaagaggcattagtatccgctgcaaagcttgaaaaagaagcaatgaaggatgcagttttaaaagtcgtagaagaagaaagaaaaaatttagaaaaagcgcatgctgaagaaagggaattatggaagacagaacatgcaaaagatcaagaaaaagtatctcaggaaattcaaaaagctatacaagaacaaagaaaaataagtcaggaaactgttaaggcagcaataatagaagagcagaaacgaagtgaaaaggctgtggaagaggcagtgaaaagaacaagagatgaattgatagagtatataaaagaacagaaaaggctcgatcaagtcatccgccaaagaagcctgtccagtttggaactgttcctctcctgtgcacagaaacagttaagtgctttaatagctacggaaccagttgacattgaataaaaagaacatgacaaacccacactggcattggataaatcatattacaccttcaaaatacacactctgaattataaagatgtgtttgttttctttccaaatcatgtagaattgatttccagttcaaggataaaccaaaacaatatttagaactatcaagtgatctannnnnnnnnnnnnnnnnnnnnnnnnnnnnnnnnnnnnnnnnnnnnnnnnnnnngtagtagcagcaacagagtatgatatgacccaaaagccattgtaaagtgccacattaccaaaattaattaagtaaactttatagcctgtgggagtctattatatattattttgcaaaagtagtaaatatattattgtttcatgatgactcttgatgagatgctagatgtaaccatacatttatcttatttt

SEQ ID NO: 188997 - DNA, 2015 bp, Homo Sapiens
ttgcaaggatatagttagctaatcaccttccagcaaccttcccacaacgaaactgtattccttgaaggaacaattagaaactacttcattctgagagttgtttcccagcccccattgtaaaataatttcactttcatttcttctcctcttttctctccatgacagataatgctctaccacaagaaaatggcctctcacctggggccattgctggcattgtgattggagtagtggccctggttgctctgatagcagtagccctggcatgttttctgcatttcgggaagaccggcagctcaggaccactccaatgacccacctaacaagatgaatgaagttacttattctaccctgaactttgaagcccagcaacccacacaaccaacttcagcctccccatccctaacagccacagaaataatttattcagaagtaaaaaagcagtaatgaaacctgtcctgctcactgcagtgctgatgtatttcaagtctctcaccctcatcactaggagattcctttccccttttcccaacctggacttgttttaaacttgcctgttcagagcactcattccttcccacccccagtcctgtcctatcactctaattcggatttgccatagccttgaggttatgtccttttccattaagtacatgtgccaggaaacaagagagagagaaagtaaaggcagtaatgccttctcctatttctccaagccttgtgtgaactcaccaaacacaagaaaatcaaatatataaccaatagtgaaatgccacacctttgtccactgtcagggttgtctacctgtaggatcagggtctaagcaccttggtgcttagctagaataccacctaatccttctggcaagcctgtcttcagagaacccactagaagcaactaggaaaatcacttgccaaaatccaaggcaattcctgatggaaaatgcaaaagcacatatatgttttaatatctttatgggctctgttcaaggcagtgctgagagggaggggttatagcttcaggagggaaccagcttctgataaacacaatctgctaggaacttgggaaaggaatcagagagctgcccttcagcgattatttaaattattgttaaagaatacacaatttggggtattgggatttttctccttttctctgagacattccaccattttaatttttgtaactgcttatttatgtgaaaagggttatttttacttagcttagctatgtcagccaatccgattgccttaggtgaaagaaaccaccgaaatccctcaggtcccttggtcaggagcctctcaagattttttttgtcagaggctccaaatagaaaataagaaaaggttttcttcattcatggctagagctagatttaactcagtttctaggcacctcagaccaatcatcaactaccattctattccatgtttgcacctgtgcattttctgtttgcccccattcactttgtcaggaaaccttggcctctgctaaggtgtatttggtccttgagaagtgggagcaccctacagggacactatcactcatgctggtggcattgtttacagctagaaagctgcactggtgctaatgccccttggggaaatggggctgtgaggaggaggattataacttaggcctagcctcttttaacagcctctgaaatttatcttttcttctatggggtctataaatgtatcttataataaaaaggaaggacaggaggaagacaggcaaatgtacttctcacccagtcttctacacagatggaatctctttggggctaagagaaaggttttattctatattgcttacctgatctcatgttaggcctaagaggctttctccaggaggattagcttggagttctctatactcaggtacctctttcagggttttctaaccctgacacggactgtgcatactttccctcatccatgctgtgctgtgttatttaatttttcctggctaaaatcatgtctgaattatgtatgaaaattattctatgtttttat

SEQ ID NO: 188998 - DNA, 917 bp, Homo Sapiens
ttaaacttatcgcaaatgtctggaacgctggtggcttccaaaatcaactcctggtgctgcttaataaggtcagggccacccggaagataatcttcgagcttcgttaaacaaacagtcccagatccgaagcactgtctccacgggcaagatgtccacaaacaggcagatgaaccagcgggacaccagcagcgtccacagcacaccgagacgctccatcagggcccccacagccggcagcttcgcccgcaccagctccccgaggacctcctggtcggtcttcaggcccagcatggccgggctgtagtaatctggtagtattcttccaacaagagcatctaacagccaaaaagattcttcttcattatttgttataagaatcagatatcctgctataaaattcattccctggcagtagcccactccctggttatggtgcccatatgccagcagcacattgtacagggtcctctgtaagcaggggtccgtggtcttccggaacttcacgttgtcggggaaggtccggttcaggtctgtcctgatggcgtcctccagcctggggtttctctctccctggagaagctggtggtagtagccgggattctggtccatctgcgcctgggccccactcagcaccatccagacgcgggcacggtgctccagcgggacccctttccggacatagcgcttcactgtccggctcctggggacgcccccgccctgcagcagccgggaccatttgatcgccctgcgggtgagcgtgaccaggtagctggagaaaaacttctcgtaggcggcgtcgtcgaagtcctcaggccgctcgaatccgtacgggtcgatcctggggacccgcgagcgctcggcgggctgcatgcggggagggaggcgcgcaccgagcgaggccagcggtcccaagccaa

SEQ ID NO: 188999 - DNA, 1740 bp, Homo Sapiens
ttggtgcttttgcgcgcgaactgtaagtgccagggtctcagggtcaggtcgcggctggtcactgtgcaggcgcttgggtgacgcgacgatctcagcggatctggtcaccttcgtctccccgccatggagacctcagcactcaagcagcaggagcagcccgcggcgaccaagatcaggaacctgccctgggttgaaaaataccggccacagaccctgaatgatctcatttctcatcaggacattctgagtaccattcagaagtttatcaatgaagaccgactgccacacttgcttctctacggtcccccagggacaggcaagacatctaccatcctagcctgtgcgaaacagctatataaagacaaagaatttggctccatggtcttggagctgaatgcttcagatgaccgaggaatagacatcattcgaggaccgatcctgagctttgctagcacaaggacaatatttaagaaaggctttaagctagtgatcttggatgaagcagacgccatgactcaggacgcccagaatgccttgagaagagtaattgagaaattcacagaaaataccagattctgcctcatctgtaactatctgtcaaagatcatccctgccttgcagtcccgctgcacgaggtttcggttcggtcccctgactcctgaactcatggttccccgcctggaacatgtcgtggaagaagagaaagttgatataagtgaagatggaatgaaagcactagtcactctttccagtggagacatgcgtagggctctgaacattttgcagagcaccaatatggcctttgggaaggtgacagaggagactgtctacacctgcaccgggcacccgctcaagtcagacattgccaacatcctggactggatgttgaatcaagatttcaccacagcctacagaaatattacagagttgaaaactctgaaggggttggcactgcatgatatcctgacagagatacacttgtttgtgcatagagttgactttccatcttcagttcgaatacatttattgaccaaaatggcagacattgagtacaggctttctgttggcaccaacgagaagatccagctgagctccctcattgctgcatttcaagtcaccagagacctgattgttgcagaggcctagatgctctgagggccattcacaattctcagggctcagcagtgatgggagaacagaggacagttccaggataaactgctgcctggggctgtgggatgaatcagtcaccccgaatcttggaaaaacccccttccaggagaggatgggcaggcatttaaaaagtaccatttttgtggttgtttggagcagggatgtacaaaataattttaatgtattaactcatactgcctgtcttttataggggaaaaaaataaccttttttattttaaagttataaggtttttaccttttagttgcttggatgacagggaattagcctaccccattttggtctggaacagaagactttcaaatttaatatggtccaagtgtcttcctactcaaagcaaacattatctccaaaattacatttatgattctaatatttggcattgtgtctgtatctaatttaaacagatgttaatggacgtctggccgaaactattatacttttataagatgagctgaatcctcttactttaaaactggtctttttatttacctctgtggtagagagtcaccagcagttccaaattgatgtgtatgatagggaaaaaa

SEQ ID NO: 189000 - DNA, 1592 bp, Homo Sapiens
ttggccccatagtgcggctttaaatgtgatgcattcagaaaaggactatgtttttgcagctgttttcaacagtactatggtttattctttacctatattagtgaatatcattagtaactactatctttatcatttaaatgtgactgaaaccatccagatctggagtaccccattctttcaagaaattactgatatagtttttaaaattgagctgtattttcaagcagctttgcttggaatcattgttactgcaatgccaccttactttgccatggaaaatgcagagaatcataagatcaaagcttatactcaacttaaactttcaggtcttttgccatctgcatattggattggacaagctgttgttgatatccccttattttttatcattcttattttgatgctaggaagcttactggcatttcattatggattatatttttatactgtaaagttccttgctgtggttttttgccttattggttatgttccatcagttattctgttcacttatattgcttctttcacctttaagaaaattttaaataccaaagaattttggtcatttatctattctgtggcagcgttggcttgtattgcaatcactgaaataactttctttatgggatacacaattgcaactattcttcattatgccttttgtatcatcattccaatctatccacttctaggttgcctaatttctttcataaagatttcttggaagaatgtacgaaaaaatgtggacacctataatccatgggataggctttcagtagctgttatatcgccttacctgcagtgtgtactgtggattttcctcttacaatactatgagaaaaaatatggaggcagatcaataagaaaagatccctttttcagaaacctttcaacgaagtctaaaaataggaagcttccagaaccaccagacaatgaggatgaagatgaagatgtcaaagctgaaagactaaaggtcaaagagctgatgggttgccagtgttgtgaggagaaaccatccattatggtcagcaatttgcataaagaatatgatgacaagaaagattttcttctttcaagaaaagtaaagaaagtggcaactaaatacatctctttctgtgtgaaaaaaggagagatcttaggactattgggtccaaatggtgctggcaaaagcacaattattaatattctggttggtgatattgaaccaacttcaggccaggtatttttaggagattattcttcagagacaagtgaagatgatgattcactgaagtgtatgggttactgtcctcagataaaccctttgtggccagatactacattgcaggaacattttgaaatttatggagctgtcaaaggaatgagtgcaagtgacatgaaagaagtcataagtcgaataacacatgcacttgatttaaaagaacatcttcagaagactgtaaagaaactacctgcaggaatcaaacgaaagttgtgttttgctctaagtatgctagggaatcctcagattactttgctagatgaaccatctacaggtatggatcccaaagccaaacagcacatgtggcgagcaattcgaactgcatttaaaa

SEQ ID NO: 189001 - DNA, 1017 bp, Homo Sapiens
ttggctagtgaatatcgatactaatgaagatgggtttttcagggattgtggtccatcaggagtctgtgtgtgccacctatggaagtggcttaagcagcacgtgtattgtagacgttggggaccagaagacaagtgtatgctgtgtggaggatggggtgtctcatcggaatactcggctttgtctggcatacggaggatctgatgtgtcaagatgtttttactggctaatgcagcgagctgggttcccttacagagaatgccagttaacaaataaaatggattgtcttcttctgcaacaccttaaagaaactttttgtcatttagatcaggacatctctgggcttcaggaccatgagtttcagattcgacatcctgattctcctgccctgctttaccagtttcgattaggagatgaaaaactgcaggctccaatggctttgttttaccccgcaacttttggaattgttggacagaaaatgacgactttgcagcacagatctcagggcgatcctgaggatcctcacgatgaacattacctgctggccacacagagcaaacaagaacagtctgcaaaagctactgctgaccgaaagtctgcatccaaacctattggatttgaaggggatcttcgtggccagtcctctgatcttccagaaagactccattcccaggaggtagatttggggtctgcacagggagatggcctgatggccggcaacgattccgaggaggccctcactgcactgatgtccaggaagactgccatctcgctgtttgaagggaaagccctgggcctggataaagccatcctccatagcatagactgctgttcatctgacgacaccaaaaagaagatgtacagctccatcctagtggtgggaggtggtttgatgtttcataaagctcaagaatttctgcagcacagaattctcaacaaaatgccaccatccttcacgcgaattattgaaaatgtggatgtgatcacaagcctaaggacatggacccccggctgattgc

SEQ ID NO: 189002 - DNA, 2207 bp, Homo Sapiens
  misc_feature (839)..(877): n is a, c, g, or t
ccccacagtatatattatacagcagtcataatatctataaatacatagagtttatgttgtgaagtttcccagttcactgaaatgttaggtttcctaaagggtacagtgccgtgtaaaacaacctgcctcatatatttctcctcaaaacgttggactatttgggaaaaggaaaagagttgggaaaattggttttaaggtaagttttagtcaaaagaattctttcttgaaactagctggtttgtggattcagatactctgatccttacagaatccaagaggaagctttcataaaaacaattcagcaaatatttccaatataatttgaatggctaattttcagttgctaattaattagcagctttgtaatacttgatttgggagcatttacttggaaatcctaaggactataataaaagttttcaacatatttctaaattgtgtgagtttccagctgtagcttttgtctttgtcacattttaaaaaataataagcaagacacattggggacactggcagcagttgccaggttttagctgccaccgcttcagtatgagatatagctgtcccatcttcccccattcagggtaggagatatagtgacccagacttcatgcaaatggaaaaaaagttttaactgaaatatttatttagatttcagggtctagatggatgggaaagtagaaaaacatatgcaaatctcagtgttctcactatgaccactctgagcagagatttggttttgtttccttttgtaacaaagtgaaaacaggtgagacaatgtgcccaaaacaaagggaagaagagaaccttctgtgactcctaaaatgttccatgctgcnnnnnnnnnnnnnnnnnnnnnnnnnnnnnnnnnnnnnnnaaacatgaatataatgcttacttcaaattgtttagtaaaacaaaataactaaagaaatgtgagcttcccaaggtttctaaactatcgctgttgtatattctatagcgttccttattctttgagggaaactgtgcttgctgtgatccattttgtctctagcttctagttgtgattcttgtccataagcaccaaatttgatgcccatgatttcaaaaggtcatttcttttatctgaatgaaaatggtggtactaagactgtgaaaattatgtgaaacctaaagtagttgccaaagtggctcagggttgtaaaattcattgacttaattattcatgtgccagatcaacccctttattttctctttagctgtgcatatttaaaatattggaaagtatcagatttacagattttctttgactaatttttttcacataactttaggattttcgaaagttgtaaccataactggatatcttagctgagcaaaggcggttataatttgtctttttaagatcactggaaattgataaaattttgtgataattatgattattctgtgccatttacagtttctaatactatactgtatgaaatatgtataaatatatgatgctgagtctgtggaatgatacttctgaaatcaaaattcctcataaggcatgaagttgtaaaaacttgaatgtgtatagttagatatttaaatggttgcttcttcatagaattgtctgctttttaaaactggaagtacaggattttcttcaggtaaaatctgtgtgttccaattacagttgtagctgaaggaagtatgctttggtgagtcaattagtatgggaacttgactaaagacccccagtgttgtaacgtacctttgtacccagacaaaacaattatgttacattcctcaaagtggcatgggctttcttctctaattcttctgttttattagacccaagacaagttctaaaaattgaatgcaatgagagattgtccagaaatgtaatatatactaaaatataccacttaagcattgattgccttttcttgtttgcttcaagaatataaaacttgttacttgagcttggaatcatgggcttgattgaattaattactcttggggaaaaaagacaccttgtggcattaagtcttgctttggttaaagccttatttcacataattgctaaaaactcatttttggttaatatactacctatagtttaattatcggcacttgtattttgtaacttgatatcttacctaaggattgggaatttgggacatgacatgtactataaaagtcagtctatgtacatactgcttattgatgtgctgtga

SEQ ID NO: 189003 - DNA, 934 bp, Homo Sapiens
ttggcagtataagaacatttgtcaacaggtgaacataaaatctctggaggatgttgttagggcatatttgaaaatggcagaggaaaaaactgaagctgctaaagaagaatctcagcagatggtcttagatatagaggatctagataatattcaaactcctgagagtgttctcctaagtgctgtaagtggtgaagacactcaggatcgtactgacagattacttttaactccatgggttaaattcctgtgggagtcttacaggcagtgtttggaccttcttagaaacaattctagagtagagcgcctgtaccatgatattgcccagcaagctttcaaattctgcctccaatacacgcgtaaggctgaattccgtaaactgtgtgacaatttgagaatgcacttatcgcagattcagcgccaccataaccaaagtacggcaatcaatcttaataatccagagagccagtccatgcatttggaaaccagacttgttcagctggacagtgctatcagcatggaattgtggcaggaagcattcaaagctgtggaagatattcacgggctattctccttgtctaaaaaaccacctaaacctcagttgatggcaaattactataacaaagtctcaactgtgttttggaaatctggaaatgctctttttcatgcatctacactccatcgtctttaccatctctctagagaaatgagaaagaatctcacacaagacgagatgcaaagaatgtctactagagtccttttagccactctttccatccctattactcctgagcgtacggatattgctcgacttctggatatggatggcattatagttgaaaaacagcgtcgccttgcaacactactagtcttcaagccccaccgacacgaattggccttattaatgatatggtcagatttaatgtactacaatatg

SEQ ID NO: 189004 - DNA, 870 bp, Homo Sapiens
cactgcagcgtaaatggcttgattcctcctcttaattttctttctttgttcaggttcatgttcatcactcagcctcttcaatggcaccttggttaagtcctctccattccctgactccacagtcccaccaggtttcccctctctatcaattgtggaatccaccgtatcatcagaagatacaatcatagagcctggcaagatcctgacatcagagaaacttgcagaaaactcagaagcttgatcagaaggttctaccgatggtgtattcatgccactatgtgcacttacaatactatcttcatcttcttcttcatctaacattatttcatctggattaatagaagacagagcagatgtgtctgtattatattcactctggtcttctccagagtcattactctccacatcatcctgttcttcatattcaccacacacatgatgttcttccttggacttctgaagcctaacattgatgtctatgatgccaagttgggcacaaaattcagtagtctgaggattgatcctatgaatcagctgcatttgtgtctgtggcttgctaggatcataacaagcagctgttacactaaagttacatggaaccttgagatcatgattcaatttttccaatacttctttcataccttcttctgttgcactataatcccaccttgcatgcaggccattattttctggcatattccacaggcgcccagtcacattaataagatcatccgtagccctgagaatagtgagccattcaatatcatattccaagtaatcaggagcactggggtcatgttctatctctaatatctacaggatgaaatcaatgttaagaaatacatatatatttttaacagtctaatccaa

SEQ ID NO: 189005 - DNA, 958 bp, Homo Sapiens
ttgggcagagaactggttccgaacatcagcagacccacctcccaaacacaggagccaggactcattggtgcccaagaaggaaaagaagaaaaatctggcaggtggaaagaagcggggccgaaagcccaaggagcggaccccagaggagcctgtggccaagctgcccccgcgccgggacgactggcctccaggatgcagagacaagggggcccggggctccaccggccggaaggtgggagtcagcaaggcgcctgaaaagtgagcatggtgcgtggggcctggcccccatgcagccgccacaccgccctctgttcaaggcagggccagctccgggacctctgtcctccagttctccatcccccacccccgcctcttcatccgtccagtggggcagccagccactctcccttccctgaaggtggcccttcccctgttaaggctgccacagggcacacctgggttggggctccccaaggtgtgcccagcagaagtgcaatagccaggagggttgcccctcctcatgggaatgtgtctggggtcttggtgccacaggggctgcagcgcagagtaggcagatggcctttggccccccggctccgcttcctcaggccctgccgggtcccttccctggctaccccaaggctcaggcatccctggtgacctgtggttctgggctggtgagggcacctgagcaacctggcacgggcagccaccatcctggcctcacctccacccaacactggaactccagcacccccagctacctcccaggacagacccctgtctgaccactgccatgctgacctgacaggctcccggcctgcccttggccacccacttggtccccttgcttctgttttctacctctccaggcctgcccactacccccacccctgctcctcctttgtcagtgcgatccctgctgtgctcaggccctgccccccagcctgtctgtaat

SEQ ID NO: 189006 - DNA, 1373 bp, Homo Sapiens
  misc_feature (249)..(311): n is a, c, g, or t
ttgggatgcgctgtgcaaggatggcagatttctttcctttctggagaatgatgattggaaactcattgaaaacaatgacaccattttagaaagcacccagccagttgatgaattagaaggcagatactttcaggttgaggttgagaaaagaatggtccccagtgcagcagcttctcagaatcctgagtcagagaaaagaaacacctgtgtgttgagagaacaaatcgtggctcagtaccccagtttgannnnnnnnnnnnnnnnnnnnnnnnnnnnnnnnnnnnnnnnnnnnnnnnnnnnnnnnnnnnnnncattatttgaattgcatagaacaacgtttgggaaagtaacaaaaaattcttcttcgattaaagtagtgaaacttcttgtacgtctcagtgactcagttgggtacttattctgggacagtgcaactacgggttacgcctcctgctttgtttttaaaggattgttcattttaacttgtcggcatgtaatagatagcattgtgggagacggaatagagccaagtaagtgggcaaccataattggtcaatgtgtaagggtgacatttggttatgaagagctaaaagacaaggaaacaaactacttttttgttgaaccttggtttgagatacataatgaagagcttgactatgctgtcctgaaactgaaggaaaatggacaacaagtacctatggaactatataatggaattactcctgtgccacttagtgggttgatacatattattggccatccatatggagaaaaaaagcagattgatgcttgtgctgtgatccctcagggtcagcgagcaaagaaatgtcaggaacgtgttcagtctaaaaaagcagaaagtccagagtatgtccatatgtatactcaaagaagtttccagaaaatagttcacaaccctgatgtgattacctatgacactgaatttttctttggggcttccggctcccctgtgtttgattcaaaaggttcattggtggccatgcatgctgctggctttgcttatacttaccaaaatgagactcgtagtatcattgagtttggctctaccatggaatccatcctccttgatattaagcaaagacataaaccatggtatgaagaagtatttgtaaatcagcaggatgtagaaatgatgagtgatgaggacttgtgagaattcagtctactggatttaagggaatggcttatggagttgttatttcataggcattgaaaatggttttctaaactccaaaatggtcatcttatcaataataataatattgaccatttcctatctgccaggcatttttctaagcacatgaagaaattagtcctaacaacactatgagatggactataacttgcccaaa

SEQ ID NO: 189007 - DNA, 998 bp, Homo Sapiens
ttgggtttgattcccgaaggaccttaactagtcgtggaagtatgggcagggagaagaatgacaagccccttccatctgcaacagctcggccaaatactttcatgaggggtggcagcagtaaagacctgctagacaatcagtctcaagaagagcagcggagagagatgctggagaccgtgaagcagctcacaggaggtgtggatgtggagaggaacagcactgaggctgagcgaaataaaacaagggagtcagcaaaaccagaaatttcagcaatgtcagctcatgacaaggctgcattatcagaagaggaactggagaggaagtcgaaatctatcattgatgaatttctacacattaatgattttagagccatgcagtgtgtggaagagctgaatgcccagggcctactacatgtttttgtgagagtgggagtggagtccaccctggaaaggagccagatcaccagggatcacatgggccaactactctatcagctggtacagtcagaaaaactcagcaaacaggactttttcaaaggtttttcagaaactttggaattggcagatgacatggccattgatattccccatatttggttgtaccttgctgaactggtgacccccatgttaaaagaaggtggaatctccatgagagaacttaccatagaatttagcaaacctttacttcctgttggaagagctggggtcttgctatctgaaatattgcacctactatgcaaacaaatgagccataagaaagtgggagccttatggagggaggctgacctcagctggaaggactttttaccagaaggagaagatgtacataattttcttttggagcagaagttggacttcatagagtctgacagtccctgttcctctgaagcactttcaaagaaagaactgtctgccgaagagctgtataagcgactcgagaaactcattattgagacaaagcgaatgatgaacagatctttgactgggtagaggctaatc

SEQ ID NO: 189008 - DNA, 1291 bp, Homo Sapiens
  misc_feature (243)..(252): n is a, c, g, or t
aactttgtacaaaaaagttggccctctcatccccctgtggaatgttgggtctcactctctggggaagtcaggggagaagctgaagcccccctttggcactggatggacttggcttcagactcggacttgaatgctgcccggttgccatggagatctgaaggggcggggttagagccaagctgcacaatttaatatattcaagagtggggggaggaagcagaggtcttcagggctctttttttnnnnnnnnnntggtctcttcctgtctggcttctagagatgtgcctgtgggagggggaggaagttggctgagccattgagtgctgggggaggccatccaagatggcatgaatcgggctaaggtccctgggggtgcagatggtactgctgaggtcccgggcttagtgtgagcatcttgccagcctcaggcttgagggagggctgggctacaaagaccactggcataaacaggaggctccggccccacaggtttccccaaggcctctcaccccacttcccatctccagggaagcgtcgccccagtggcactgaagtggccctccctcagcggaggggtttgggagtcaggcctgggcaggaccctgctgactcgtggcgcgggagctgggagccaggctctccgggcctttctctggcttccttggcttgcctggtgggggaaggggaggaggggaagaaggaaagggaagagtcttccaaggccagagggagggggacaaccccccaagaccatccctgaagacgagcatccccctcctctccctgttagaaatgttagtgccccgcactgtgccccaagttctaggccccccagaaagctgtcagagccggccgccttctcccctctcccagggatgctctttgtaaatatcggatgggtgtgggagtgaggggttacctccctcgccccaaggttccagaggccctaggcgggatgggctcgctgaacctcgaggaactccaggacgaggaggacatgggacttgcgtggacagtcagggttcacttgggctctctctagctccccaattctgcctgcctcctccctcccagctgcactttaaccctagaaggtggggacctggggggagggacagggcaggcgggcccatgaagaaagcccctcgttgcccagcactgtctgcgtctgctcttctgtgcccagggtggctgccagcccactgcctcctgcctggggtggcctggccctcctggctgttgcgacgcgggcttctggagcttgtcaccattggacagtctccttgatgga

SEQ ID NO: 189009 - DNA, 1521 bp, Homo Sapiens
ttggagactattgtggaagcaccctcatttttgaatggagtatggatgattatgaatgataaactgactgaatacccccttgtcattaatacattaaaaagattcaatctttaccctgaggtaattttggccagttggtaccggatttataccaaaataatggacttgattggtattcaaaccaagatatgttggacggttaccagaggagaaggactcagtcctattgaaagctgtgaaggattgggagatcctgcttgcttttatgttgctgtaatttttattttaaatggactaatgatggcattattcttcatatatggcacatatttaagtggcagccgattaggaggcctggttacagtgttgtgcttctttttcaatcatggagagtgtacccgtgtaatgtggacaccacctctccgtgaaagcttctcatatccatttcttgttcttcagatgttgctagtgactcatattctcagggctacaaaactttatagaggaagcttgattgcactctgcatttccaatgtatttttcatgcttccttggcagtttgctcagtttgtacttcttactcagattgcatcattatttgcagtatatgttgtcgggtacattgatatatgtaaattacggaagatcatttatatacacatgatttctcttgcactttgttttgttttgatgtttgggaactcaatgttattaacttcttattatgcttcttctttggtaattatttggggtattctggcaatgaaaccacatttcctgaaaataaatgtatctgaacttagtttatgggttattcaaggatgtttttggttatttggaactgtcatacttaaatacttgacatctaaaatttttggtattgcagatgacgctcatattggcaacttactaacatcaaaattctttagttataaggattttgatactttattgtatacctgtgcagcggagtttgactttatggaaaaagagactccactgagatacacaaagacattattgcttccagttgttcttgtagtgtttgttgctattgttagaaagattattagtgatatgtggggtgtcttagctaaacaacagacacatgtaagaaaacaccagtttgatcatggagagctggtttaccatgcattgcaattgttagcatatacagcccttggtattttaattatgagactaaaactcttcttgacaccacacatgtgtgttatggcatcactgatctgctcaagacagctatttggatggctcttttgcaaagtacatcctggtgctattgtgtttgctatattagcagcaatgtcaatacaaggttcagcaaatctgcaaacccagtggaatattgtaggggagttcagcaatttgccccaagaagaacttatagaatggatcaaatatagtactaaaccagatgcagtgtttgcgggtgccatgcccacgatggcaagtgttaagctctctgcacttcggcccattgtgaatcatccacattatgaa

SEQ ID NO: 189010 - DNA, 896 bp, Homo Sapiens
ttgggtcagtagcgagggccaggtcccaaacctgaagagatatggccacgcctctgtcttcttgagcccagacgttattctcagtgcaggaggatttggagagcaggaggggcggcactgccgagtgagccagtttcacttgctctcaagagattgtgactctgaatggaaaggcagccaaataggcagttgtgggactggagttcagtgggatggacgcctttatcacaccatgacaagactctcagagagtcgggttctggttctgggagggagactgtccccagtaagtccagccttgggggttctccagcttcatttttttaagagtgaggataataacactgaggacctgaaagtgacaataacaaaggctggccgaaaggatgattccactttgtgttgttggcggcattcaacaacagaagtgtcctgtcagaatcaggaatatttgtttgtgtatgggggtcgaagcgtggtggaacctgtactaagtgactggcatttcctccatgtagggacaatggcttgggtcaggatcccagtggagggagaagtacctgaagcccggcattctcacagtgcctgcacttggcaagggggagcccttattgctggaggtctcggggcttctgaggagccattgaactctgtgctctttctgagaccaatctcttgtggattcctctgggagtcagtagacatccagcctcccattaccccaaggtactcccacacagctcatgtgctcaatggaaagctgttactggttggagggatctggattcattcctcctcatttcctggagtgactgtgatcaatttgactacaggattgagctctgagtatcagattgacacaacatatgtgccatggccattaatgttacacaacc

SEQ ID NO: 189011 - DNA, 945 bp, Homo Sapiens
ccgaggtggcacagttgatggccttcagcccacacaggccgagaagagtcttcgtcagccaggatgcccttcagagactccacccagcggaagctggtatcgtccaccggcaggaagatggggctgtccgcggggtgggccggcggcacaggaagagcgtggagccgtagaaggacttctttcaggcccaccaggcgcagcgacaccctggagaagaggctctcccacgcgtcctggctcaggatgccctggccatactgcggctcagtggaggtgaggaaggccacgatgtccccgagggggtgcccccggagcagtgtgtgcaggagcagaaagcccccttctctcagggcagccaccatgttgctgagagctgaggccgggtccccgagggcagccacagcacagttgcacaccaggaggtcggcgctgcccagggcgctgggggcagggtctgcgggatcccactggccctgggcaacgtcgtgctgctgcagctcggcctgggcagcctccagggcctgggggtggcggtcggtggccgtgtagctcagctgcagcaggggatgggggctgagcaggcctgggatgcgggaatacaggtgaccgtggccagccagcacctccaccaccttcatcttcaggctgggcatgttctccacggcagtgtccaggcaggccttgagtgccggggagtccaggagaccgctgagcagagggtcctctggcagcttgggcctctcctgggccagcacctgcgccagctccagctgcaggttcccgttgagctgaagcctgcaggcagccgacaacagccggggcagttcctgctgtgaggggtcccgggggatctgggccccatccagtccgggcaccaccatcttcagcccctgctgggtcaccttggtctgcagtgcctgcaccagccccttgcacagttgccaa

SEQ ID NO: 189012 - DNA, 807 bp, Homo Sapiens
  misc_feature (259)..(340): n is a, c, g, or t
ttggaatcacgaatgtagtaatatttcatgattgtaataatgttacatgatcatgggtgtggcattctctaacaaatgatgtgaaaggaaagtagttttcataaaactcatggctctgattgcacagtcccacttgcttttgatattgctatgtcaaagcaaagggcacttcttttaaggctactttcagaactttgtattttcgctaaactataaatgcagttgtgtccagttggaggccagggtaccacatgtcacnnnnnnnnnnnnnnnnnnnnnnnnnnnnnnnnnnnnnnnnnnnnnnnnnnnnnnnnnnnnnnnnnnnnnnnnnnnnnnnnnngaatgtgggaactcaaattttcatttttaatgtaatccccaagattttctccaagaaataaattgttgttttgtattttgtaacttaaaagcagctattggtaaatttctgagatatagcaggagaccaaaacatgtttggaaagagaataaatatatgaagagagactggttgttttattttcaatgtattgaatatattagactactatttattttctgagtggatgtgattaaatattcagacgtttagtgtatgattaagagtgagatagagatttctttggagtaattaaatccatcctgtcttttacacaatggacaaatcaagttaaaaaaatttttagatagcttagcttgttttctggtgctgttgacctgcaagagaatatacttttgcatatacaggtgaaagttttgcaatttatgtatacaagaaattgtaggcattaaaaatattttattgat

SEQ ID NO: 189013 - DNA, 1283 bp, Homo Sapiens
  misc_feature (390)..(423): n is a, c, g, or t
  misc_feature (1117)..(1128): n is a, c, g, or t
ttggcctaattgtcccacttaggcctgaatgtcttgcatggagagaaatctcctgtcagtgtggtccagcagcagggaggagttctgcccaaattccgatatcaccccttcccccatccaagcatccttcgattagggaagtggagagcacatccctgtaaggcccataagagaaagaggagtttgttacatttaatcaacactgtgaagtctgttctacagcaattcagccattacacagtatatgactgaaactcatttaactgggttaatttcatttcttagactgaatatattattgttaagatacgtgtgcgtgttaggtaattctcagcatctcctccaagtaggccgaccttctcggaaaattcaccctaaaagtctcacaannnnnnnnnnnnnnnnnnnnnnnnnnnnnnnnnntgaactgagatgaaagcagccaacagcccaggagcttttcagaatagcgtctgcagcagaaccagtttccattcagagcgcgtccttggtggaaatgcttttttgtgtgtctccacgcgctgatggtggaatgggagccccaagacgtgtgggcttagaaatcaacttttgttccccaaggcttcttgtccagatctttccagtgctttcatagccctgggagatcaagttgttctccccactttactgcaaggtagactgaagttcagaagaaatactgaatttctgctcccagaagaatagtttctctggctcacaggcccaagttctcaatgaaatcgttttttaactttcacattcctaagctggcttcccggcacagaagccatggatttcccctctctcccttccccctcctcaaggaaatagtcttcctttatggattttcattggaccctttcctcagcgattgtcctggctgtttattgatagtccttcccataagaaatggggttaaacatggggtaggtattttgtctttcaaactacaaatggaatgtggtgacataaactagacatggggtgccctcaagtttccaaggggaccaatgtgccactgttcttccttggggatgaggcctttgactgttggatggatcagagcacgctccagtcagaccctggttctgcatgnnnnnnnnnnnncggtgactatccagtgagccttcagtgggtgcaaggcgccatacttgctgtgagagagctgagtagagtgttggtttttccataactacagggggaaaaaagtcattagctttccctttgtgtcagtgaaaccaaaagtgcttcttacaacgttc

SEQ ID NO: 189014 - DNA, 951 bp, Homo Sapiens
ttggggcttaaagataagaacttgcagaacagcttagcaaaggaaactttggagcccctctctcaggcagcctggttgcttcaggtcaagaagaccacagacagtgatgccaaggagatctacgaacgctgcacctcactgtctgctgtgcagatcataaagatccttaattcatacacacctatagatgactttgagaagagagtgactccatcctttgttcgcaaagtacaggctctcctaaatagccgggaggattcatcacagctgatgttggataccaaatatctctttcaagtcacatttccttttaccccctctccacatgctctggaaatgattcagatccccagcagtttcaagctaggctttctgaataggttatagcaggagaaaaagtcaatgcactttttcttcaaaagctaagtgaaggttcaatatgagggatgtgttttattaattggcagtggaaattggaatgtgatttaaggaagaaaacagacttttctcaaatggaccacatcatctctcactcacagtgacaatgctgctcctgtaattttgtaagaattcacacacaccagctgtatttggaaaagccatgtctcactctcgaatctcagctggttttcactgaaattcctggagggctcatattttcttccacgtgcctcttgatctgttctgtcttgtggcagggctctaccaggagggagtgagatctggggacacagtggcttccaagttttctaaggttcatgtgaaacctgagtacatttacaaagctgcaagtggattctagtgctgagtcttccaggaaaaaatcccgtttggccaccgtgacctgcccaaagttctcttgccccatgcctgctggggacagaagttttcatgaactcttttactgaaaatgccctgcatttaaaaatgtttattttagacccttctaaa

SEQ ID NO: 189015 - DNA, 1746 bp, Homo Sapiens
gtacaaaaaagttggctctggagtttgggcggcccgggcggccactaggtactctgatattccgtactaaacacgtctgcaagtcaagatgtcgcacccgtccccccaagccaagccctccaaccccagtaaccctcgagtcttctttgacgtggacatcggaggggagcgagttggtcgaattgtcttagaattgtttgcagatatcgtacccaaaactgcggaaaattttcgtgcactgtgtacaggagaaaaaggcattggacacacgactgggaaacctctccatttcaaaggatgcccttttcatcgaattattaagaaatttatgattcagggtggagacttctcaaatcagaatgggacaggtggagaaagtatttatggtgaaaaatttgaagatgaaaatttccattacaagcatgatcgggagggtttactgagcatggcaaatgcaggccgcaacacaaacggttctcagttttttatcacaacagttccaactcctcatttggatgggaaacatgtggtgtttggccaagtaattaaaggaataggagtggcaaggatattggaaaatgtggaagtgaaaggtgaaaaacctgctaaattgtgcgttattgcagaatgtggagaattgaaggaaggagatgacgggggaatattcccaaaagatggctctggcgacagtcatccagatttccctgaggatgcggatatagatttaaaagatgtagataaaattttattaataacagaagacttaaaaaacattggaaatacttttttcaaatcccagaaactgggagatggctattaaaaaatatgcagaagttttaagatacgtggacagttcaaaggctgttattgagacagcagatagagccaagctgcaacctatagctttaagctgtgtactgaatattggtgcttgtaaactgaagatgtcaaattggcagggagcaattgacagttgtttagaggctcttgaactagacccatcaaataccaaagcattgtaccgcagagctcaaggatggcaaggattaaaagaatatgatcaagcattggtaaattttgttccaaatgtttaattttttaaaatagacaactacctttataaatcatacacctaacttaaatgtttttttccaattaaaggctgatcttaagaaagctcaggggatagcaccagaagataaaggtaagttggcagcttttgtagtgaaagttaattttgttatttaaatacttatcctcaggaaccattgttcactttgccagattttagatgtttgttcaacagacactacagaatgcctgctgttgggccaggcattatcatatagcaatgaacaagacagtcaaagtccctgccctcaaagagcttacattctactcccattcaagaatatagtagtttttcacgttatttattcttcaagttatcatctctgtagttttttatatgtctaaaatactgtttgtcttatggtatcctttgagactgtgttcctattctggttagtctagtcgagagctcagcattgtaagacacagtattcatggtaaatttaacatttgggaccattcaagttgaatgtggctataaccttagtattgatgtactggttatatgttttaggaaactatgacaaaaataagcttgtttttcaaataaaccaactatgaatagtgacactagatctgggtattacaaaatgtctttggtctcttatactaaaa

SEQ ID NO: 189016 - DNA, 1507 bp, Homo Sapiens
acaaaaaagttggctgggaaggaaggagacgcctaaaccgcggcactgcccggtttgagcgtagccaaacctgcccaccggctttgtagccccgattctctgtgttttgctcccgtctccgacgagagaggcggcgacggtggcgtctgcgacgggagacagcgcgtcggagcgagagagcgctgcgcctgccgccgccccaacagcggaggcgccgccgccatcggtcgtcaccagaccggagccgcaggccctcccgagcccggccatccgtgccccgctcccagatctctatccttttgggaccatgcgcggaggaggctttggggaccgggaccgggatcgtgaccgtggaggatttggagcaagaggtggtggtggccttcccccgaagaaatttggtaatcctggggagcgtttgcgtaaaaaaaagtgggatttgagtgagctccccaagtttgagaaaaatttttatgtggaacatccggaagtagcaaggctgacaccatatgaggttgatgagctacgccgaaagaaggagattacagtgagggggggagatgtttgtcctaaacccgtgtttgccttccatcatgctaacttcccacaatatgtaatggatgtgttgatggatcagcactttacagaaccaactccaattcagtgccagggatttccgttggctcttagtggccgggatatggtgggcattgctcagactggctctgggaagacgttggcgtatctcctgcctgcaattgttcatattaaccaccagccatacttggaaaggggagatggcccaatctgtctagttctggctcctaccagagagcttgcccagcaagtacagcaggtggccgatgactatggcaaatgttctagattgaagagtacttgtatttatggaggtgctcctaaaggtccccagattcgagacttggaaagaggtgttgagatctgcatagccactcctggacgtctgatagatttcctggagtcaggaaagacaaatcttcgccgatgtacttaccttgtattggacgaagctgacagaatgcttgatatggggtttgaaccccagatccgtaaaattgttgaccaaatcaggcctgataggcagacactgatgtggagtgcaacctggccaaaagaagtaagacagcttgcagaggatttccttcgtgattacacccagatcaacgtaggcaatctggagttgagtgccaaccacaacatcctccagatagtggatgtctgcatggaaagtgaaaaagaccacaagttgatccaactaatggaagaaataatggctgaaaaggaaaacaaaacaataatatttgtggagacaaagagacgctgtgatgatctgactcgaaagatgcgcagagatggttggccagctatgtgtatctatggagacaagagtcaaccagaaagagattgggtacttaatgagttccgttctggaaaggcacccatccttattgctacagatgtagcctcc

SEQ ID NO: 189017 - DNA, 533 bp, Homo Sapiens
catggaatccctttaaaaaaatgccatcgcagcatcaccctcggtgggtttggagcagaccgtttctacctgggccagtggcgggaaggcctcggcaagctcttcagcttcggtggcctgggaatatggacgctgatagacgtcctgctcattggagttggctatgttggaccagcagatggctctttgtacatttagctgtggtgtgtgcttcagaaaggagcagggcttagaaaaagcccttttgtccgtaggagttgatgtggtgtgagtgatatatttctatgtttttaatgtacagcatctgtactttgtttgccttgataaaggtaagataaatgaaacgctgaactatgctaatctggaatttgtttttatttgcctgaaatatatttttttctgtgaaaaaattaaaacgtacttaagccaggagaatgaattatacagtgattgaaaatccatttaattcctatgacttttgttttgtattgcccaagtcaaactacatcacttgtatctccagcccaaatgta

SEQ ID NO: 189018 - DNA, 580 bp, Homo Sapiens
  misc_feature (509)..(529): n is a, c, g, or t
actttgtacaaaaaagttgggcattgcttctgtaaatgcaggcgcagtttgtcgtgtttccaaaccagttgtgccgtccactcactccttttcagaatagaaatctcctctcgcttctctggccttgtgaggttgtggacaactggaagattctgactcaggaatccagaactaggtctaccttcaacatttatgcagtcagggcagggatgtttatatctttcataagggctgttgcaaccatatgaactgaaaaaacacgcattttgtaatccaaatattgatattctttacaccaagccatcaggctccttttatcaaatagcattcagagtatttgaatgtccaccagacaccagccccggggggcacagagagaacaacattcctctctgtcaacatcgagaggctttaaaacaactgtttagtggaaactttctgagagatggaaaacaagcttctggtgggtgcattttctggcccggagttgcctgcatccacgctactgnnnnnnnnnnnnnnnnnnnnnagtttgtacggatgcaacagtgttccttttcttggttgaaatttctgaaca

SEQ ID NO: 189019 - DNA, 1196 bp, Homo Sapiens
ttgggattcagtggttcagctttgtcagcatcatctcaacacaagcctgctggctctttttagcatctcatccaaccatgtcatcgtccagatgagaaatcttagcccaggtgaggggagtaacttgcttgaggtcacacagctggctgttggcaaagctgggattagaaccctcaacccagggtcccttcctctgcagcgcctacatggttggttgaataagtggctgcgtttcctggggccctgggttttggggaagccagttagctgctgctttggcactggcatggaggtgagcagtcaaggatgctggtgaggccgcagtttctgctctttttcatcaggggggatagtctctaggatttttcagtgaggacccttgggctttggatgcagcttgaaccaagaaaacgaggagggaaagggattcagtgaactattcctcagtgggatcggttcttcagctcctgatgggggctgtgtaatgggggcagaggccagggaaaaagatgctgttcacccaccctcagcttcccttttcctaaattaagaggaaaagtggtcaaagaaaaactcttcatttctccctgattcttaaacgaaggtggttaatagaaactcaggctcccgtgacaaggcaggacaagagcctgtttcgctttcctccctgaccctgccaggtgccaactcaaacactacctttctcattggtttctaagtcagtagagacagatctgttttaagcagttgggggttcgagtagatctcatgggtacaggaggccagcagggaccaggccagtcagccatgctcaggacccctcggctcctcccccagcctctagctaccctgtatcgaggcaaggggaggccagtaaagtttgccaagcctgatcctgcagcctggtggggctggctggggtattcttttaccaaactctgttttaccgccagccccttgtacaccccaatcccatgtctccctcccttcagctggaccgtgtgcccctttgggaggaagaagacaagccccactagggccaagggcagcagagccctgccgagtgagaggctgtggggcagcggctctgtcctgtgccttaccagccctgggggaggggggcatttggctggaagactggaatttaattgccatcgtctttgattttgtgacatttctgcttggaagtgtgaact

SEQ ID NO: 189020 - DNA, 988 bp, Homo Sapiens
ttggctccactctgcaccctacctcgtgggcagatgataacatgttttggatgctgtcagtgatgaatggtgagatggcagattgtcagagtcaattgattaaacctcatttatacttctagtgtcattttatatgactagtttacaaaataggacattgagtttccaagtattgagataagggaatataaatagtattatatgtatcaggaaatctctcatcttgtttttgtttcatgtattttttaaagttttcatttgtgccacaaaaatctgtcgtggaatatattttattttcattaattcagtgaagttgagacttcatagtaattttagaatgcaacttgaaggtaaaaattttactttgtcaatactgaagtctctgctgtaatccttatatatctttctccagagaacataatattgtcaaatagatacacatttttctaataggtatttagaagcacttgaaatattcttaatctctgcatgtgttacaattcagttatttctgtagtttgtaaactctaaagtgacattactattattttagagatgtctaagttggaattttgatttttgtggaaccattgtttgttaatgttgggattctctgcacttttgaatgtgaaagcttatatccctgaattctgatacttaagagttttctatttcagacatctctgtgtggaagttgagactaagaataatcctagggatgtcatgaatttaggcaatgtttctcatttggaaaatgaaatgagaaataatttccttctttaaagcaagtatatatagtatgagaaacttggaggcatttcatacacacatttcttaggaaaatggacacattgaaaatgtcctcttttttatatttatatattctgcagctctttgctcttaaaagcaaatcacaacacgattcttaatgtatgaatttctttgtttcatatattatgaatgtattatcttatttgcttcgtaataa

SEQ ID NO: 189021 - DNA, 2778 bp, Homo Sapiens
ctttgtacaaaaaagttggaggattattctccctgtcagtatgcaaatgatgtcactagagttctttatatgtttaatcagatgcccctcaatcttaccaatgccgtggcaacagctcgacagttactggcttacactgtggaagcagccaacttttctgacaaaatggatgttatatttgtggcagaaatgattgaaaaatttggaagatttaccaaggaggaaaaatcaaaagagctaggtgacgtgatggttgacattgcaagtaacatcatgttggctgatgaacgtgtcctgtggctggcgcagagggaagctaaagcctgcagtaggattgtgcagtgtcttcagcgcattgctacctaccggctagccggtggagctcacgtttattcaacatattcacccaatattgctctggaagcttatgtcatcaagtctactggcttcacggggatgacctgtaccgtgttccagaaagtggcagcctctgatcgtacaggactttcggattatgggaggcgggatccagagggaaacctggataagcagctgagctttaagtgcaatgtttcaaatacattttcgagtctggcactaaagaatactattgtggaggcttctattcaccttcctccttcccttttctcaccaaagcaaaaaagagaactcagaccaactgatgactctctttacaagcttcaactcattgcattccgcaatggaaagctttttccagccactggaaattcaacaaatttggctgatgatggaaaacgacgtactgtggttacccctgtgattctcaccaaaatagatggtgtgaatgtagatacccaccacatccctgttaatgtgacactgcgtcgaattgcacatggagcagatgctgttgcagcccggtgggatttcgatttgctgaacggacaaggaggctggaagtcagatgggtgccatatactctattcagatgaaaatatcactacgattcagtgctactcccttagtaactatgcagttttaatggatttgacgggatctgaactatacacccaggcggccagcctcctgcatcctgtggtttatactaccgctatcattctcctcttatgtctcttagccgtcattgtcagttacatataccatcacagtttgattagaatcagcctcaagagctggcacatgcttgtgaacttgtgctttcatattttcctaacctgtgtggtctttgtgggaggaataacccagactaggaatgccagcatctgccaagcagttgggataattcttcactattccacccttgccacagtactatgggtaggagtgacagctcgaaatatctacaaacaagtcactaaaaaagctaaaagatgccaggatcctgatgaaccaccacctccaccaagaccaatgctcagattttacctgattggtggtggtatccccatcattgtttgcggcataactgcagcagcgaacattaagaattacggcagtcggccaaacgcaccctattgctggatggcatgggaaccctccttgggagccttctatgggccagccagcttcatcacttttgtaaactgcatgtactttctgagcatatttattcagttgaaaagacaccctgagcgcaaatatgagcttaaggagcccacggaggagcaacagagattggcagccaatgaaaatggcgaaataaatcatcaggattcaatgtctttgtctctgatttctacatcagccttggaaaatgagcacacttttcattctcagctcttgggggccagccttactttgctcttatatgttgcactgtggatgtttggggctttggctgtttctttgtattaccctttggacttggtttttagcttcgtttttggagccacaagtttaagcttcagtgcgttcttcgtggtccaccattgtgttaatagggaggatgttagacttgcgtggatcatgacttgctgcccaggacggagctcgtattcagtgcaagtcaacgtccagccccccaactctaatgggacgaatggagaggcacccaaatgccccaatagcagtgcggagtcttcatgcacaaacaaaagtgcttcaagcttcaaaaattcctcccagggctgcaaattaacaaacttgcaggcggctgcagctcagtgccatgccaattctttacctttgaactccacccctcagcttgataatagtctgacagaacattcaatggacaatgatattaaaatgcacgtggcgcctttagaagttcagtttcgaacaaatgtgcactcaagccgccaccataaaaacagaagtaaaggacaccgggcaagccgactcacagtcctgagagaatatgcctacgatgtcccaacgagcgtggaaggaagcgtgcagaacggcttacctaaaagccggctgggcaataacgaaggacactcgaggagccgaagagcttatttagcctacagagagagacagtacaacccaccccagcaagacagcagcgatgcttgtagcacacttcccaaaagtagcagcacatgtgaaaagccagtttcaaccactagtaaaaaagatgcgttaaggaagccagctgtggttgaacttgaaaatcagcaaaaatcttatggcctcaacttggccattcagaatggaccaattaaaagcaatgcgcaggagggacccttgctcggtaccgatagcactggcaatgttaaggactggattatggaaacacgaaactactgtgtaacattgctgggcttccta

SEQ ID NO: 189022 - DNA, 2086 bp, Homo Sapiens
  misc_feature (1428)..(1489): n is a, c, g, or t
ttgggtttgttcttgttcaaagtgaccatgccatctctgtggagaaggtgctggggagggaagtccttccagtgccacatggagtgaggccctgcccatgctggggactttggggaggaatttggtattctggtggccttgctcagctctcattgagatcttttcctatcagaatgttagtgaatatacttcgcagctctttgttcagcaataaggaatattctttcaattcctgctcttcaagccaatttactacacccagttgtctttccagaagttcatcccagcggtaatatgttggtgtttgttcttctttggatttcacatctgttttctggtagaagtgagcactgttcacttgtgcagtcgtcttattttccttcttcctagatgactcagctctttgtaaatgttgtgctcaacttctaggggccagttctagactttggagatgcagtgtctcccaggtgtgcacggacacctggtccgtggaaacaggtgtgatgggcacaggctgctgcccttctgtctggtcgggggattcctcttcttcaagctgctcagctaacccagaagaggggagagagtactccggtggttcccagagcccctcccgttgtgccgcttcgacctgacacctgctcgatgctgacttaggcttcctgccaccaagcaggaaactagaaagagaacatttcagtgtaaggtctgttcccgacagcatggattagcttccgtgttctgaagttgttcttttcatggtgtctgacaccgagggcgttgttcgtccatcaggcgggattggatggagtcttggtgttttgccttctcagggaccaaaaatgtatcattgactccttaacagtgaccttcctcccaaggacatatccgtgttcatttttcataggttttactcatattcataggtagattctgttaatgtgagttggaaagaaaagaccaatttgtacaccagtcacaccacaagacagtttatcatataaaatacctcaattttttgtattcctcatttccacctcacaattgtactggtgatgaattttaagggtctgtcctttagcttataggtgatgtttcacatctggccagattcttatacctccattgtatacttgaaaaggttcagaattacaggaacagcagtgagaatttggcccactaccacgactcatttgtttcattcacattcctcacgtgcaacaacataattatattttaagaaaatgtaactttgttacatcaaaatatgttgtctagtaaaaagttgatattcagtagaacaaggatcatgtaaataaacatctatttcacatgtacccaaaagcatttaaaaagcagaatccagggcccagagcatgagccagggaggaggatgtttttcttcttttctctatttttccctaaatnnnnnnnnnnnnnnnnnnnnnnnnnnnnnnnnnnnnnnnnnnnnnnnnnnnnnnnnnnnnnntgggatggttcttcaaattgtttctaaaacaccggcactttcagcagtgttctggtggcctgagatgagagcaccgtgttcagaagtgcctgggagtggcacagtggaaactccgcttgcacggaccatggagtctgctcaggaccatgctgtaggacacacagcctcatgcgctgagaaagcaaaggaagtgctgggtgtaaagtttgcatgattccatgaagctttagttttcctttttttgttttaaaagaaagggttttatatgttctattgtaaaatatggaaattaaacagggacttcagaaagccgcacagaaagatcaccttccgatggtgtgatgtgctcctgacattcggccgaggtctgtattctgaaaaagatttaatggcctgtgaaacacgtggattctgttgcactggatttgtaataaatgacgctgaacttcctgcttccaagcagctcaaccctgatgctgaactgacaccaggcgaatgtcagggctcccaatcactagtgccaaagggtcatgttgaaaagttcagaatatttatttgtcacaatataatattggccccccaccttaataatttttg

SEQ ID NO: 189023 - DNA, 1532 bp, Homo Sapiens
ttgggtctgttttcatgaagaggcccttcttagttaatctgaaagctatggcttataccatagtcctccatcatatctaaagccaggaactagaacttgggcttgtgcttgagtcctgggtaaagaagggttgagtggtgctaattcttggctgtctgggtgctcttgattagtgatagaatcctagtcaacactgtcgcttatccagacccaggagaataaaaatctacttggctctcctactcttcattctggtagcatcttaggccagctgggaggtggaagcagcattgcccaagcctcccaggagtgacaggaattgtttctgcctgaggagacactctgcagcctgggctctgtgagactgaggtggcggtcagccggagtgagtgttggggtcctggggcacctgccttacatggcttgtttatgaacattaaagggaagaagttgaagcttgaggagcgaggatggcagtcaacaaaggcctcaccttgctggatggagacctccctgagcaggagaatgtgctgcagcgggtcctgcagctgccggtggtgagtggcacctgcgaatgcttccagaagacctacaccagcactaaggaagcccaccccctggtggcctctgtgtgcaatgcctatgagaagggcgtgcagagcgccagtagcttggctgcctggagcatggagccggtggtccgcaggctgtccacccagttcacagctgccaatgagctggcctgccgaggcttggaccacctggaggaaaagatccccgccctccagtacccccctgaaaagattgcttctgagctgaaggacaccatctccacccgcctccgcagtgccagaaacagcatcagcgttcccatcgcgagcacttcagacaaggtcctgggggccgctttggccgggtgcgagcttgcctggggggtggccagagacactgcggaatttgctgccaacactcgagctggccgactggcttctggaggggccgacttggccttgggcagcattgagaaggtggtggagtacctcctccctgcagacaaggaagagtcagcccctgctcctggacaccagcaagcccagaagtctcccaaggccaagccaagcctcttgagcagggttggggctctgaccaacaccctctctcgatacaccgtgcagaccatggcccgggccctggagcagggccacaccgtggccatgtggatcccaggcgtggtgcccctgagcagcctggcccagtggggtgcctcagtggccatgcaggcggtgtcccggcggaggagcgaagtgcgggtaccctggctgcacagcctcgcagccgcccaggaggaggatcatgaggaccagacagacacggagggagaggacacggaggaggaggaagaattggagactgaggagaacaagttcagtgaggtagcagccctgccaggccctcgaggcctcctgggtggtgtggcacataccctgcagaagaccctccagaacaccatctcggctgtgacatgggcacct

SEQ ID NO: 189024 - DNA, 728 bp, Homo Sapiens
ctttgtacaaaaaagttggcgagaatgtctccacagaagatggcaagcttgatatatggtccaaatccaactatcaagtattccagaaggtgacagaccatgccaccactgccctgctccactatcagctgccccagatgccggatgtcgtggtccgatccttcatgacctggttaagaagttacataaagctgttccaggccccgtgccagcgctgcgggaagtttctgcaggacggccttcccccgacatggagggatttccgaaccctcgaagccttccatgacacctgccggcagtagcccccacgctggccccagcctcagaccccacccagcaccttcccagacacgcaggaagcccacagaaggctcagctggttcctcactgcccagatgtgtacagctgctcctccctttcataaagcagcgccatgtgtgcagaggccactcttgaagagcagactccctctgtggctgatgggactaattattcccactagccagcggactgaaggcaaagaagacctttctagaacctggtagaaggaagctgtgcagcatgctcctcgtccatgtgtgtcggcagtgctggtgtctgtcgtctccgcgagctgttactggaatgagcccttgtgttcatgggtatcgtcatgcggggttcttgtgttttgtggggcttgggttttggtaacttatttttataagcaataaaccttttgtatcctg

SEQ ID NO: 189025 - DNA, 1034 bp, Homo Sapiens
ttgggtgataaatgtcagtgtgaacctggaggccttttcccaggccattagtgccatccaggcgctgcgctccagcgtgagcagggtgttcgactgcctgaaggatgggatgcggaacaaggagacgctggagggccgggagaaggcctttattgcgcacttccaggacaacttacattcggtcaaccgggacctcaatgagctggaacgtctgagcaatctggtaggcaagccatctgagaaccatcctcttcataacagtgggctgttaagcctggatcctgtgcaggacaaaactcctctctatagtcaactccttcaagcatataagtggtcaaacaagttgcagtaccatgcaggactagcatctggccttttaaatcagcagtcattgaagcgttccgctaatcagatgggagtatctgccaaacgtagaccaaaggctcagcccacaactcttgtcctaccacctcaatatgttgatgatgtgatcagccgcattgacaggatgtttcctgaaatgtccatccacttatccagacccaatggaacatcagcaatgcttctggtgaccttgggaaaggtgttgaaagtgatcgtcgtcatgcggagcctgttcattgatcgaacaatagtaaagggatataacgagaatgtctacacagaagatggcaagcttgatatatggtccaaatccaactatcaagtattccagaaggtgacagaccatgccaccactgccctgctccactatcagctgccccagatgccggatgtcgtggtccgatccttcatgacctggttaagaagttacataaagctgttccaggccccgtgccagcgctgcgggaagtttctgcaggacggccttcccccgacatggagggatttccgaacccctcgaagccttccatgacacctgccggcagtagcccccacgctggccccagcctcagaccccacccagcaccttcccagacacgccagaaagcccacagaaggctcagctggttcctccactgcccaaatgtgta

SEQ ID NO: 189026 - DNA, 1954 bp, Homo Sapiens
ttggcgatgttggcgcgctgccgcccgcttcgggccccgcctgggccgccgcctcttgtcagccgccgccacccaggccgtgcctgcccccaaccagcagcccgaggtcttctgcaaccagattttcataaacaatgaatggcacgatgccgtcagcaggaaaacattccccaccgtcaatccgtccactggagaggtcatctgtcaggtagctgaaggggacaaggaagatgtggacaaggcagtgaaggccgcccgggccgccttccagctgggctcaccttggcgccgcatggacgcatcacacaggggccggctgctgaaccgcctggccgatctgatcgagcgggaccggacctacctggcggccttggagaccctggacaatggcaagccctatgtcatctcctacctggtggatttggacatggtcctcaaatgtctccggtattatgccggctgggctgataagtaccacgggaaaaccatccccattgacggagacttcttcagctacacacgccatgaacctgtgggggtgtgcgggcagatcattccgtggaatttcccgctcctgatgcaagcatggaagctgggcccagccttggcaactggaaacgtggttgtgatgaaggtagctgagcagacacccctcaccgccctctatgtggccaacctgatcaaggaggctggctttccccctggtgtggtcaacattgtgcctggatttggccccacggctggggccgccattgcctcccatgaggatgtggacaaagtggcattcacaggctccactgagattggccgcgtaatccaggttgctgctgggagcagcaacctcaagagagtgaccttggagctgggggggaagagccccaacatcatcatgtcagatgccgatatggattgggccgtggaacaggcccacttcgctctgttcttcaaccagggccagtgctgctgtgccggctcccggaccttcgtgcaggaggacatctatgatgagtttgtggagcggagcgttgcccgggccaagtctcgggtggtcgggaacctctttgatagcaagaccgagcaggggccgcaggtggatgaaactcagtttaagaagatcctcggctacatcaacacggggaagcaagaggggcgaagctgctgtgtggtgggggcattgctgctgaccgtggttacttcatccagcccactgtgtttggagatgtgcaggatggcatgaccatcgccaaggaggagatcttcgggccagtgatgcagatcctgaagttcaagaccatagaggaggttgttgggagagccaacaattccacgtacgggctggccgcagctgtcttcacaaaggatttggacaaggccaattacctgtcccaggccctccaggcgggcactgtgtgggtcaactgctatgatgtgtttggagcccagtcaccctttggtggctacaagatgtcggggagtggccgggagttgggcgagtacgggctgcaggcatacactgaagtgaaaactgtcacagtcaaagtgcctcagaagaactcataagaatcatgcaagcttcctccctcagccattgatggaaagttcagcaagatcagcaacaaaaccaagaaaaatgatccttgcgtgctgaatatctgaaaagagaaatttttcctacaaaatctcttgggtcaagaaagttctagaatttgaattgataaacatggtgggttggctgagggtaagagtatatgaggaaccttttaaacgacaacaatactgctagctttcaggatgatttttaaaaaatagattcaaatgtgttatcctctctctgaaacgctttctataactccgagtttataggggaagaaaaagctattgtttacattatatcaccattaatgctactgctacactctgctttgtatttctggggctaatatttctttaaaaa

SEQ ID NO: 189027 - DNA, 875 bp, Homo Sapiens
ctttgtacaaaaaagttggcgtttcataagacacatcaaacaggcctatacaaaaggtttaggaaaagaaaacaatggtgagtcccggccctcttcgaattcactggcacctcatgcaagtgtaggaaggcacgctggatcgtctatctgattccaaagctgtcctttgccatctcatcccttggcctgccccccaaccctgaggatgcccctgccatccccccaacctcctcatattgcctctgaacccagatggcaatccatcccggttctctctgagggccacgggcttgggtagtggaaagggtgtttgggaaattgttaaatcagttacccgtagtagagctatttcttgtacttctaagttttctagaagtggaaggattgtagtcatcctgaaaatgggtttacttcaaaatccctcagccttgttcttcacgactgtctatactgagagtgtcatgtttccacaaagggctgacacctgagcctggattttcactcatccctgagaagccctttccagtagggtgggcaattcccaacttccttgccacaagcttcccaggctttctcccctggaaaactccagcttgagtcccagatacactcatgggctgccctgggcagccagcattcattgtaagttccctctttgaaaactggtgtgtgggtgttcagttctgtgtctggtgggtatggacagacagtaatctcctgtgatctgtgctagctgtgaggcagctctggaacgtgaagagctgtttggtttgaaccgtgaacaaaactgtgttttgagtttagctgacattaaagaaaaaagttcatcacgtgactgttaatgtaaacctggttattaaaataactatgaaatt

SEQ ID NO: 189028 - DNA, 1045 bp, Homo Sapiens
gtacaaaaaagttggcggaatacagtcccctaaatgtgagaaccagagaagttggaatccaagaaattcatcacaaagtacggccataccaggttgaattgtctaggagagattatgttgcaaatggtggctgggaaacattcttgtcatacaaagacccacatcaagacattttgattggcctcctacgattacgcaagtgttcagaagaaactttccgtttcgaattgggtggaggtgtctccatagtacgagagctgcatgtgtatgggagtgtggtccctgtgagcagccgggatcctactaaatttcagcatcagggatttggcatgctgctgatggaggaagcagaaagaatagctagagaagaacatgggtctgggaaaatcgctgtgatatcaggggtcggcaccaggaattattatagaaagatcggctacagattacaaggcccgtacatggtgaagatgctgaaataatggccacaccagtccactcttctgcagtatcctccctggcagaacacggagaatcaggatttcttaaatactcaacagagaggctgagcagagcaaatggggggcttcaccctcatcccgcagctgcagagactggaaactgccttcaaggccacggctggtcatctgctgaccacaccccagatccgccctctcctgcgtgcaccccaaaaaatcacttgcgtttttgaggcttaaatcatctatccagtttctacattttgcatgaggcctgcaggtggcctattttgactcagacggtgaaaaaagcaaattaactcatttggacaccataactcatgcaataaaactgattgtcattcgaggagcaaacttaagagtagtttatttatataccctggggacagaaagtcaggttgaaacaggaaaaccaccagactctaatctcagccctttaacgacatacgcattggagcgcaagttaggaaaatgagcttttgttttcacggaaatcattctgattacagtgctgatgtttagaaataaatagcagtgtgactgggaaa

SEQ ID NO: 189029 - DNA, 675 bp, Homo Sapiens
ttggattaactttcattttagattttaggtgactcataattcccattcacttagcctatcagaaaagtcattggcagacatatatgtccttgaaccttttttatttgtgtggattctgctcatcactgtctctgttagacttattttgtagtggctgcatcacatatttttcacttgaatttttttggaaatagctgaatgtaaatagcagggaggaagaagcaagcaaagtgagagcttttcttcatccagaattgccctctgggctcctttggtaacagatggagctccttcctagctagggagaccttatgagaagtggatggtaggaggagtcactaatgtttcaatctctatttctgtaatcttgggcaataatgcataggagttcttgataccccttcattgattactgtgtatcagttctttgttaggcatgaacgtctttattaatccatcattcttttcttcattcaacaaatatgtattgaacacctcctatatgccaggcactgtgctaggtgctgggaataccactgatgagacagacaaggtccctactcttgtggagtttacttctggtggaggagacagatgataagtaaacaaataaataatgtagtttgagatagtgattaagtgctatgaagaaaataaactagggtgatgatttta

SEQ ID NO: 189030 - DNA, 2061 bp, Homo Sapiens
  misc_feature (748)..(757): n is a, c, g, or t
gctgcttagttgaatgggaagagctacttgcatataggtggcagcaagttgttgatggaagttggatctctgcagaagcagcagaggcagagaagctgctgtcatgtcaacactaacagtcattcttgttttcttttgccaggcggccttctgatctgtttaccacgtgagcaagcagctcggttctgtgcagagataaagtcccccaaatatggtgaaggccaccaagcatggattattgggattgtagagaagggcaaccgcacagccagaatcatagacaaaccccggatcatcgaggtcgcaccacaagtggccactcaaaatgtgaatcccacacccggggccacctcttaatctagacagaaatagctgtttggttttgtttttaaatagatctatttcccttatcacttcaattaaagactataaacaacaaaaatctcattgtgtctacacatcggggtgaccttaggtcggtttgtaagtggatacaattaataaaataaaatccattgcctttttttcctgttacattaactgaagatgcacctaatcttgaggcagcttctgagttgagaattatattgttatccaatactgttgattcattttgaatctttagacacttatctcttgccgcataggctttttaaaggtgctttcacatagcacaggcattacccgtagtcgtgtcaaatagcagttggtgtcttcattttatgtatatttatcatataagtctgannnnnnnnnnaagcgtcttgaatggttttctggagagacagcattggtaagtggcacatgacggtatcccagtcataagagggttgcatgattcctttgagtgtttgatttgaaaagcctagtcttgtctctcaagagcatctcggacccagaacattctccagtagtgcattcagttcaacacagcaagtgcttcattgcatggaaaacactttgaagacaaaaaagaaatcttatttctttttttgtagccttcctgatatttacagtaataccattaactgttttatcgatagcaaaaaaggatactttttgcaatgttattagatgttctatagtgctacaaggaattgccttccgaatggaggttcatgtataatactcatttacaattcaatatataattacacaaataatttttaaatataatcaatagtaaagacgtctgttctgtggatggtagtgtttaatacattttctattttgtacagtgatttcaggccttttgttttcttaaaatcagcagctgtttggcctaattcttagcattattttgtcctttgcgccagtacttttttgtgcacgctttttgtgatctgtgttaaaaacctgcattgccaacattgcagctcgaacttaaacttgttattcaaataaatatttaattttttaaattgctcttgtataatcagatgccccttttagtattattttagaagcgttgggagggttttgcctaaagtacaatttatcgggaaaaactagattttagttttataaaacttttaagtctttcatgggacctatattttcttgaattaaattttgtagttctagaataaataggcaatctaaaaaggtgttctctgtgttatgtaaagtggaggcttccttatattttaacctactaagcaatgaggagggattcctgtcattaagcacaagggcgctggatcctcaagtgcccatcttcgtgagagaaaaagcagcacatcctgcccatttctggtgctttctgctcacaggcaccaaagctgcacatgtaaactgacttcttgccaaaggaaatgacccctgggaagttcaagctcctggaagaggctttaactcggacgcgccctcctccaggaaccagtgggcagggcagccttcatgcatgtgtaactggacctccagccataagcatggtgtgcagtatggaagagcctgctacggaactgaaagtgattggacattttataggaattgatacagatgttggtcctcaaaagctacaaaccagtggtctgcaaaataaagtgtgttggaaacctc

SEQ ID NO: 189031 - DNA, 1028 bp, Homo Sapiens
ttggcggcggtgactgtgacggtgacgaagacggcggcggcggcgacggcatttaacaaggcggtgtggtttactccatgcagttgtcaggagacctctgtatggcttttcaattttagttgaaattctctctccatggccttttggagtcccttgctgtatctccgaagtaaatttcaattactctacatttcatcaatgttggagtggcaagaaaaaggaggaacagatttggggtgaaaagttttgttttctaggtctaacaaactgtaaatgttaaaaaagcaaagatgggtgaaaaaaaaccagagcctttggacttcgtgaaagattttcaggaatacctgactcagcagacccatcacgtgaacatgatttctggatcagttagtggggacaaagaagcagaggctcttcagggagctggaacagatggtgatcaaaatggacttgatcacccatctgttgaagtttccttggatgaaaactcaggaatgttagtagacgggtttgaaaggacctttgatgggaagcttaagtgtcggtactgcaactatgccagcaaaggaacagcccggcttattgaacacatcagaatccacacaggtgaaaaacctcatcgatgtcatctttgtccatttgcatctgcttatgagcgtcatctggaagcccatatgcgttctcatactggagaaaaaccatacaaatgtgaattatgttccttccgctgcagtgatcgaagtaacttgtcccatcatcgaaggcgcaagcataaaatggtaccaattaaaggtactaggtcttccttaagcagcaagaaaatgtggggggttttacagaagaaaacaagcaatctgggctatagcagaagagcactaatcaacttaagtccaccttccatggtggttcagaaaccagactaccttaacgattttacccacgaaatcccaaatatccagactgactcctatgaaagtatggcaaaaaccacaccaactggtggccttccaagggacccccaagaactc

SEQ ID NO: 189032 - DNA, 550 bp, Homo Sapiens
gagatggagtctgggtgacagagtgagaccccatctctaaataaataggtcaaacccttaaaaatatttaaattcttaaaaaattgaaaagattattcttctcaaatttagttgagctttctaagagaagcaattggctttttcccactttaataatcattttcagtttgactcatacagttaacacaatgtgaatttcttcctcagcataacagagttatagaatgacagggctggaagtgaccttagagagtatccagttctttcattttacaggtgaggcaactgagactcaaaggtgatgtaatttgtgcaaagattatagctaattagtagcagagccctgactgggacatagtttgaaggtgaaaaacttcaccaagctacctttcttgaaaggtccaaatgtttatgttttcaactattctttccactgtaccataactttcactacatattaaatgacactttataactaatataataggacaatcatcaatgcatatatagccagcccttcatatctgtgggtgttgcatcccatggattc

SEQ ID NO: 189033 - DNA, 1737 bp, Homo Sapiens
  misc_feature (188)..(281): n is a, c, g, or t
  misc_feature (1467)..(1527): n is a, c, g, or t
ttggggttattcggcggcccgcggcggaccatggccctggcccggcgtcgctgggctttcctcacggcgtccccgagcagcgtcgcagagcgggccgacttccgggaaggaactgaccagcgactgagcggcggccggcgcgcttagcgccctgaacatgcggcagtccctgcgggcgaccccgggcnnnnnnnnnnnnnnnnnnnnnnnnnnnnnnnnnnnnnnnnnnnnnnnnnnnnnnnnnnnnnnnnnnnnnnnnnnnnnnnnnnnnnnnnnnnnnnagccctagggaggcagttcagcgcggcctcgggcctcgtcgagaaggatgctgtcccgaaagaaaaccaaaaacgaagtgtccaagccggccgaggtgcaggggaagtacgtgaagaaggagacgtcgcctctgcttcggaatcttatgccttcattcatccggcatggtccaacaattccaagacgaactgatatctgtcttccagattcaagccctaatgccttttcaacttctggagatgtagtttcaagaaaccagagtttccttagaactccaattcaaagaacacctcatgaaataatgagaagagaaagcaacagattatctgcaccttcttatcttgccagaagtctagcagatgtccctagagagtatggttcttctcagtcatttgtaacggaagttagttttgctgttgaaaatggagactctggttcccgatattattattcagacaatttttttgatggtcagagaaagcggccacttggagatcgtgcacatgaagactacagatattatgaatacaaccatgatctcttccaaagaatgccacagaatcaggggaggcatgcttcaggtattgggagagttgctgctacatctttaggaaatttgactaaccatggttctgaagatttaccccttcctcctggctggtctgtggactggacaatgagagggagaaaatattatatagatcataacacaaatacaactcactggagccatcctcttgagcgagaaggacttcctcctggatgggaacgagttgagtcatccgaatttggaacctattatgtagatcacacaaataagaaggcccaatacaggcatccctgtgctcctagtgtacctcggtatgatcaaccacctcctgtcacataccagccacagcaaactgaaagaaatcagtcccttctggtacctgcaaatccatatcatactgcagaaattcctgactggcttcaggtttacgcacgagcccctgtgaaatatgaccacattctgaagtgggaactcttccagctggctgacctggatacataccagggaatgctaaagttgctcttcatgaaagaattggagcagattgttaaaatgtatgaagcatacagacaagcccttcttacagagttggaaaaccgaaagcagagacagcagtggtatgcccaacaacatgnnnnnnnnnnnnnnnnnnnnnnnnnnnnnnnnnnnnnnnnnnnnnnnnnnnnnnnnnnnnncacagataaaaaattgcaaacaagtactctggttaataaatgctgcttcctttgtggaaattataaaattctaactttacatgtattttgttattagaaattttcttttattgaatgagaaaaattagtctatcattttaagagccaatatggcaaacactttcaaatactgtatattagaaactgttttggtattcttgatggaaaaaa

SEQ ID NO: 189034 - DNA, 1438 bp, Homo Sapiens
agtgggggaagggtgagagctcagcactcactgctttattatcacagtaggtgacaaaggccgcagggagagggggaaaggtccagagctgtggagaaagaaggggctccctgtctccagggtttgtttaaggttttctccatggcctagggcccagccacttccctcactggcctcaaagccctggagttgagccctctaggcagtcaagggcaggcaggagatgggccagagaggggaggatgtgttctttaggtacagaatccctgaccacggggtccagtgcctgtgggccaaccaccaggaagctgtgcatgcccacagcccgaggcccctggtaatcgcagaggtaattatccccaacatgggctgccactactggttccatatgagcaagccgcaaggcctcctggaaaatgcgggggtccggcttgggccagccagcagcctcggaggtcagcacaaagtcgaagtgttcacgcaggccaaggccctccaggatgccctctagccgtcggtcaaagttggagatcactgccagtctcagaccccgtgtgcggcactccctcagggtgtcctcagccccatccaacacctgccaggtgcaggggtggctgaagtctttataaagctgttcagcgatgggggctacagcctgagcatcctggacacccgccaggtggaaggtctgcaggaccacatccagccaccactggcgggaggttaggccgtggctcaggccgtagttggggaagctgtggctctgagccctgtatgcctgcctgaagccttgttccagggctgagggctccacctccagcccatgggcccgggccttggtggcataggcctcccctaaggggtggcggagcctgagcagcgtgtccttcacatcccacgtcagcagtcgtatctgcagccggtgtgccatggaggaggccaagtccaccccagttctgcctcaggtcccacggtgggtcccaggggaagctgagctggataagaccacctctgcgcaacctaacaatcacctctttccaggccttgtgggtcagatttgctggctaacatgaagcacttgggaaatgtcttcacagcacaagatcccaaggtcacagtgagtcagtggcacagccaggaccagaacccaaacttccagactctctggccagttcttccactgtaccatgagatatatttggattttaaaaattggtgaaccttttctccccacctccagggctcgggaaaggcgaagtccaggagcccggacctgacgcagaatgtctatagctgccgtcggcagcgtgagctggggcggcggtcctaggggccttggccgcggccgaccccttgggtccccttctcagctgtagggcgtccacggctccgggccggttcctgggcccaggacccacctgactcacaaggaagccaa

SEQ ID NO: 189035 - DNA, 1261 bp, Homo Sapiens
ttgggttccctcaggggctgctccatgagaactgcggaatgttctttatccctctttgtctaatgacgatcaatgatgactctgccacgtgcaaaaagatggcatccatgacaatcaagtccctacttggtaaaatcagcctcgagaaaaaagattggctgtttgatatggttaccacttggtttggagcaaaaaagcgcttaaatagacaacttgctgccctgatctgtggcttgtttgtggaaagtgaaggagttgattttgagaaaagacttggaactgtccttcctgtgattgaaaaggaaattgatcctgaaaactttaaagatatcatggaagaaactgaagaaaaagctgcagatcgccttctgtttagttttcttacactgataactaaacttatcaaggaatgtaatattattcagtttaccaaacccgctgagactttgagtaaaatctggagtcatgtgcattctcacctgagacatccacacaactgggtgtggctcacagcagcccagatttttggattactctttgcctcttgccagccagaggggcttattcaaaaatggaataccaaaaagaccaaaaaacacctcccagaacctgtagcaatcaagttcctagccagtgaccttgaccaaaagatgaaaagtatctctctcgcctcttgccatcaattgcattccaaattcttggatcagtctctaggagaacaggttgttaagaatttgttgttcgcagccaaagtcttgtatttactggaactttattgtgaggataagcaaagtaagataaaagaagacctggaagaacaagaagctttagaagatggtgtggcctgtgcagatgagaaggcggagtctgacggagaagagaaggaagaggtgaaggaagagctcggcaggccggccacgctgctgtggttgatccagaagctgtcccggattgcaaaactggaagctgcttattcgccgagaaaccccttaaagagaacatgcatctttaagttcctcggcgccgtagcaatggatcttgggatagacaaggtaaagccgtatctcccaatgatcatagctcctttgtttcgggaactcaacagcacctattcagagcaagatcccttgctgaagaatctatccccaggaaaatcatagaattactcaaaaagctggttgggcttgagagcttctcattaacctttgcctctgtacagaaacaggctaatggagaacagggcactccggaaaaaagagga

SEQ ID NO: 189036 - DNA, 1501 bp, Homo Sapiens
tacaaaaaagttgggactgcaaggctgggactgggaggcagagccgccgccaagggggcctcggttaaacactggtcgttcaatcacctgcaagacgaaggaggcaaggatgctgttggcctgggtacaagcattcctcgtcagcaacatgctcctagcagaagcctatggatctggaggctgtttctgggacaacggccacctgtaccgggaggaccagacctcccccgcgccgggcctccgctgcctcaactggctggacgcgcagagcgggctggcctcggcccccgtgtcgggggccggcaatcacagttactgccgaaacccggacgaggacccgcgcgggccctggtgctacgtcagtggcgaggccggcgtccctgagaaacggccttgcgaggacctgcgctgtccagagaccacctcccaggccctgccagccttcacgacagaaatccaggaagcgtctgaagggccaggtgcagatgaggtgcaggtgttcgctcctgccaacgccctgcccgctcggagtgaggcggcagctgtgcagccagtgattgggatcagccagcgggtgcggatgaactccaaggagaaaaaggacctgggaactctgggctacgtgctgggcattaccatgatggtgatcatcattgccatcggagctggcatcatcttgggctactcctacaagagggggaaggatttgaaagaacagcatgatcagaaagtatgtgagagggagatgcagcgaatcactctgcccttgtctgccttcaccaaccccacctgtgagattgtggatgagaagactgtcgtggtccacaccagccagactccagttgaccctcaggagggcagcaccccccttatgggccaggccgggactcctggggcctgagcccccccagtgggcaggagcccatgcagacactggtgcaggacagcccaccctcctacagctaggaggaactaccactttgtgttctggttaaaaccctaccactcccccgcttttttggcgaatcctagtaagagtgacagaagcaggtggccctgtgggctgagggtaaggctgggtagggtcctaacagtgctccttgtccatcccttggagcagattttgtctgtggatggagacagtggcagctcccacagtgatgctgctgctaagggcttccaaacattgcctgcacccctggaactgaaccagggatagacggggagctcccccaggctcctctgtgctttactaagatggcctcagtctccactgtgggcttgagtggcatacactgttattcatggttaagtaaagcatgtcaagggatggcattgaaaaaatatatttagtttttaaaatatttgggatggaactccctactgacctctgagaactggaaacgagtttgtacagaattcagaacttgggttgggaatgagatctaggttgtggctgctggtatgcttcagcttgctggcaatgatgtgccttgacaac

SEQ ID NO: 189037 - DNA, 1951 bp, Homo Sapiens
  misc_feature (67)..(113): n is a, c, g, or t
ttggggagccggctgagccacagcagggtcgccgcggggtcccggggccgtgctcccctgcccctcnnnnnnnnnnnnnnnnnnnnnnnnnnnnnnnnnnnnnnnnnnnnnnnagctgggccctcgcccctccctcgggcggtcacctgggcacgggcgctgcaggtgtcggggcctcaaccttgcggagccgacagccatcgatcctcgggtggcctcgaggtggtggcagggccgccccctgcagtccggagacgaacgcacggaccgggcctccggaggcaggttcggctggaaggaaccgctctcgcttcgtcctacacttgcgcaaatgtctccgagcttactcacatagcatattggtatatcaaaatgaaatgcaaggaaccaaaaataacataattgaaggcagtaaaagtgaaattaaataggaagatcatcagtcaaggaagacccactggagaggacagaaaatgaagcagtgttttatcatgtgtatttcagcaggtcttcttgaaatttaactaaaaatatgactgctctctcttcagagaactgctcttttcagtaccagttacgtcaaacaaaccagcccctagatgttaactatctgctattcttgatcatacttgggaaaatattattaaatatccttacactaggaatgagaagaaaaaacacctgtcaaaattttatggaatatttttgcatttcactagcattcgttgatcttttacttttggtaaacatttccattatattgtatttcagggattttgtacttttaagcattaggttcactaaataccacatctgcctatttactcaaattatttcctttacttatggctttttgcattatccagttttcctgacagcttgtatagattattgcctgaatttctctaaaacaaccaagctttcatttaagtgtcaaaaattattttatttctttacagtaattttaatttggatttcagtccttgcttatgttttgggagacccagccatctaccaaagcctgaaggcacagaatgcttattctcgtcactgtcctttctatgtcagcattcagagttactggctgtcatttttcatggtgatgattttatttgtagctttcataacctgttgggaagaagttactactttggtacaggctatcaggataacttcctatatgaatgaaactatcttatattttcctttttcatcccactccagttatactgtgagatctaaaaaaatattcttatccaagctcattgtctgttttctcagtacctggttaccatttgtactacttcaggtaatcattgttttacttaaagttcagattccagcatatattgagatgaatattccctggttatactttgtcaatagttttctcattgctacagtgtattggtttaattgtcacaagcttaatttaaaagacattggattacctttggatccatttgtcaactggaagtgctgcttcattccacttacaattcctaatcttgagcaaattgaaaagcctatatcaataatgatttgttaatattattaattaaaagttacagctgtcataagatcataattttatgaacagaaagaactcaggacatattaaaaaataaactgaactaaaacaacttttgccccctgactgatagcatttcagaatgtgtcttttgaagggctatgataccatttattaaatagtgttttattttaaaaacaaaataattccaagaagtttttatagttattcagggacactatattacaaatattactttgttattaacacaaaaagtgataagagttaacatttggctatactgatgtttgtgttactcaaaaaaactactggatgcaaactgttatgtaaaatctgagatttcactgacaactttaagatatcaacctaaacatttttattaaatgttcaaatgaaagc

SEQ ID NO: 189038 - DNA, 978 bp, Homo Sapiens
ttggcctttttaaacccgtcaaattggcaaagatcaaaaaagcttgttaagactcctagctggcaagcatgtgggaaataggtactctcataacagctgacagaagtacatattgaagaggacaatatggcaatgtccttcaaaattataaaagcactaactctttgatccagtagtttccacttctaggaacttaaccttcagatatattttcaccagatataaaatgacatacgtaagaagttattactgcatcatttgtaatagctaaagattagaaacaattaattgctatggaacccttaaaaaaggtggctctaaattccttaagaaagatatccaaaacaaattaaggggaaaagggagggttgcataacagcatgtaacataacactatttgtctaaagaatggggaaagagaagcggttgtctgttcacctcatccttgccactccgccttatacctcaccatcggagaacttaccatcccccaaatatatcctgctggcactacaccttcgtaactgctgttcccactgcccccacaacactccaatctccaccttcctgccaaccttgagatattgtatgcatatatacatatttcctttgtttaaaatacaaatagcatactatgcatgctgttctgcactttgcttttttcttatacttgcaattagagctgcctcatttcattttacagctgtatactattccattgaatggataaaccataatttatttaatcagtccctcactgacagacgtttccattgtttcctgtcttttgctataaataatgctgtaatgaatattcttgtgcatatttcacattaatttatgggattacatctgcaggataaattcttagaaccaatggtggtttgtggggaggtgacagggtggataggtacaagattgggagacttttcactgtatctccttttgtatttttttgaattttgtaccatattgtat

SEQ ID NO: 189039 - DNA, 1201 bp, Homo Sapiens
ttggggaaaactctaccgtccaagccctaactagctctgattgctctctggatgcacagtgcaatcatttggcctggactggaacgggcttctgaagtaggacagcctgacaagacttcctgctctctgttccctgcagttggggaggaaggtggagaccatcaccataatttatgactgcgaggggcttggcctcaagcatctctggaagcctgctgtggaggcctatggagagtttctctgcatgtttgaggaaaattatcccgaaacactgaagcgtctttttgttgttaaagcccccaaactgtttcctgtggcctataacctcatcaaacccttcctgagtgaggacactcgtaagaagatcatggtcctgggagcaaattggaaggaggttttactgaaacatatcagccctgaccaggtgcctgtggagtatgggggcaccatgactgaccctgatggaaaccccaagtgcaaatccaagatcaactacgggggtgacatccccaggaagtattatgtgcgagaccaggtgaaacagcagtatgaacacagcgtgcagatttcccgtggctcctcccaccaagtggagtatgagatcctcttccctggctgtgtcctcaggtggcagtttatgtcagatggagcggatgttggttttgggattttcctgaagaccaagatgggagagaggcagcgggcaggggagatgacagaggtgctgcccaaccagaggtacaactcccacctggtccctgaagatgggaccctcacctgcagtgatcctggcatctatgtcctgcggtttgacaacacctacagcttcattcatgccaagaaggtcaatttcactgtggaggtcctgcttccagacaaagcctcagaagagaagatgaaacagctgggggcaggcaccccgaaataacaccttctcctatagcaggcctggccccctcagtgtctccctgtcatttctaccccttgtagcagtcattttcgcacaaccctgaagcccaaagaaactgggctggaggacagacctcacgagctttcatttcagttatgcagaggaagagcgactgcagtgggtctccgtgtctatcaaatacctaagagtccccaggagctggctggccatcgtgatagatctgtctgtcctgtaaactgtgccaacttcacctgtcaggacagcgaagct

SEQ ID NO: 189040 - DNA, 1402 bp, Homo Sapiens
ttggctgagcctggaaaagttatagttcttgtcaataaggtactgctagttgaacagctcttccgcaaggagttccaaccatttttgaagaaatggtatcgtgttattggattaagtggtgatacccaactgaaaatatcatttccagaagttgtcaagtcctgtgatattattatcagtacagctcaaatccttgaaaactccctcttaaacttggaaaatggagaagatgctggtgttcaattgtcagacttttccctcattatcattgatgaatgtcatcacaccaacaaagaagcagtgtataataacatcatgaggcattatttgatgcagaagttgaaaaacaatagactcaagaaagaaaacaaaccagtgattccccttcctcagatactgggactaacagcttcacctggtgttggaggggccacgaagcaagccaaagctgaagaacacattttaaaactatgtgccaatcttgatgcatttactattaaaactgttaaagaaaaccttgatcaactgaaaaaccaaatacaggagccatgcaagaagtttgccattgcagatgcaaccagagaagatccatttaaagagaaacttctagaaataatgacaaggattcaaacttattgtcaaatgagtccaatgtcagattttggaactcaaccctatgaacaatgggccattcaaatggaaaaaaaagctgcaaaagaaggaaatcgcaaagaacgtgtttgtgcagaacatttgaggaagtacaatgaggccctacaaattaatgacacaattcgaatgatagatgcgtatactcatcttgaaactttctataatgaagagaaagataagaagtttgcagtcatagaagatgatagtgatgagggtggtgatgatgagtattgtgatggtgatgaagatgaggatgatttaaagaaacctttgaaactggatgaaacagatagatttctcatgactttattttttgaaaacaataaaatgttgaaaaggctggctgaaaacccagaatatgaaaatgaaaagctgaccaaattaagaaataccataatggagcaatatactaggactgaggaatcagcacgaggaataatctttacaaaaacacgacagagtgcatatgcgctttcccagtggattactgaaaatgaaaaatttgctgaagtaggagtcaaagcccaccatctgattggagctggacacagcagtgagttcaaacccatgacacagaatgaacaaaaagaagtcattagtaaatttcgcactggaaaaataaatctgcttatcgctaccacagtggcagaagaaggtctggatattaagaatgtaacattgttatccgttatggtctcgtcaccaatgaaatagccatggttcaggcccg

SEQ ID NO: 189041 - DNA, 1277 bp, Homo Sapiens
ggggcaactccccgaatgaagagcttcagcaggctggcggcatcatgctgtttgacactttcccaattaaaagtcccttcataaaactttgcttctagttcttggcaaagattcttgattctaatggcagctccagggatccgtaagaggtttctgtttccaaacctctctcttcaattcgagaaatcagtttttgaaagatcaagggtattcgcattcctggtactttcctctgatcttgttctaatagcgctgtcaatggaacgcaaaaaagaccagaatcttttgttttgattttcacagctttttgttgtttcagctcaatacccaatacatcatagagggcagtcagctcaattagggctaaatggcaaactttcttcatgtcctggggtgcgaggtcaccaatccttgtggtacccgttttgtcttttggcaatctgaaactaggtaatgtggcatcatcgcctttgctcttctggattttctccttggagctctctttctgattgagtgcttgctcggcaaatgatacctccaggttgatgtctgtttcaggggcaggcgtctcctcaggtgggatcagcttctcttcaccaacaaggttagatgcctcgtcatctcttccttggtatttgttttcatttgttctaagtgactgcgattcagtgccacctggagctgtttcttttgattctctctgttgagcaaatatgtctctgacgtcaggaatctggtactgtttgttttttttcctcaaggtctgggagaccgtctctactcgcttctgaactgctgctgcctgggtccgcgtcaatgttgataaaaacacaatgctttcctgtggatctccagcagactctccgaagagattggataaaccggcctctttaagccactcttcttccaattctccctcatcaggctctttgacaacaaccacctcttgatcttcttggctgttttcactagatttcttgatgttttctagttctatccaatagtcttccatagatagttcatccaaagaatcctgggaaattgatcgatcaaatggaggcttctccataactttgatggtggtgctttcctggttcatagtgtactggccatatctgcgactcgaggtggcttcctcccctgcctttgcatggctgttcccgacggcctggtccttgccgctggggtggtaggctgttagtaccactccctgggaactggagagccagctcatggtgagagaagggacatactttctgcgatcctgacacagccaa

SEQ ID NO: 189042 - DNA, 989 bp, Homo Sapiens
ttgggtcagattggtccaaactacttgagccaccgaatttctttcaaaagtatagacattatatagtattgactgccagcgcatcaacagaagaaaaccatctagagtgggttggattagtagaatctaaaatccgtgtacttgttggaaacttggaacggaatgaatttattactcttgcccatgtgaatccccagtcattcccagggaataaggaacatcataaagacaacaattacgtatcaatgtggttccttgggataatttttcggagagtagaaaatgcagaaagtgtcaacatagacttgacatatgatatacagtcatttactgatacagtgtacagacaggcaaacaatataaatatgctaaaggagggaatgaaaattgaagcaactcatgtaaagaaaaaacaacttcaccactaccttcctgcagaaattcttcaaaagaagaaaaagcaaagtctctctgatgtcaatcgaagctcgggcggacttcaatccaaaagattgtctctggatagcagttgtctggatagctccagagacactgataatggaacaccttttaattctccagcgtccaagtctgatagcccttctgtaggagaaacagaaaggaatagtgctgagcctgctgctgtaattgtggagaagccactgagtgtaccaccagcccaaggactttccattccagtgattggcgcaaaagttgactctacagtaaaaactgtatcaccccccactgtgtgtaccattcctaccgtagtaggacgaaatgtcattcctagaatcacaacacctcacaaccctgcccagggacaaccgcatctgaatggaatgtcaaatataactaagactgttacacctaagagatcccattccccatccatagatgggactcctaagaggttgaaagacgtagaaaaggatgccattgggaggagaatctatgcctattccaactattgatacatcacgcaaaaa

SEQ ID NO: 189043 - DNA, 1558 bp, Homo Sapiens
ttggaagaatttctccataaaagaaatctttgacaaggcgatttcagccagaaagatcaaccgccccatgctccaggcagctctcatgctcaggaagaaaggattcactactgccatcctcaccaacacctggctggacgaccgtgctgagagagatggcctggcccagctgatgtgtgagctgaagatgcactttgacttcctgatagagtcgtgtcaggtgggaatggtcaaacctgaacctcagatctacaagtttctgctggacaccctgaaggccagccccagtgaggtcgtttttttggatgacatcggggctaatctgaagccagcccgtgacttgggaatggtcaccatcctggtccaggacactgacacggccctgaaagaactggagaaagtgaccggaatccagcttctcaataccccggcccctctgccgacctcttgcaatccaagtgacatgagccatgggtacgtgacagtaaagcccagggtccgtctgcattttgtggagctgggctccggccctgctgtgtgcctctgccatggatttcccgagagttggttggcttggaggtaccagatccctgctctggcccaggcaggttaccgggtcctagctatggacatgaaaggctatggagagtcatctgctcctcccgaaatagaagaatattgcatggaagtgttatgtaaggagatggtaaccttcctggataaactgggcctctctcaagcagtgttcattggccatgactggggtggcatgctggtgtggtacatggctctcttctaccccgagagagtgagggcggtggccagtttgaatactcccttcataccagcaaatcccaacatgtcccctttggagagtatcaaagccaacccagtatttgattaccagctctacttccaagaaccaggagtggctgaggctgaactggaacagaacctgagtcggactttcaaaagcctcttcagagcaagcgatgagagtgttttatccatgcataaagtctgtgaagcaggaggactttttgtaaatagcccagaagagcccagcctcagcaggatggtcactgaggaggaaatccagttctatgtgcagcagttcaagaagtctggtttcagaggtcctctaaactggtaccgaaacatggaaaggaactggaagtgggcttgcaaaagcttgggacggaagatcctgattccggccctgatggtcacggcggagaaggacttcgtgctcgttcctcagatgtcccagcacatggaggactggattccccacctgaaaaggggacacattgaggactgtgggcactggacacagatggacaagcccaccgaggtgaatcagatcctcattaagtggctggattctgatgcccggaacccaccggtggtctcaaagatgtagaacgcagcgtgtgcccacgctcagcagtgtgccgtcctttccacctgctggggcaccattcttagtatacagaggtggccttacacacatctcgcatgaatggcagcattgttctgaagggtttgcagaaaaaaa

SEQ ID NO: 189044 - DNA, 413 bp, Homo Sapiens
ttttcagagcctcgatccagttccgccggatgcctgaggtcatgtccgacaaggaatagacagcatccttggtgtggatctggaagccatagttgcgttgcaccgcgtactcagtgacatccgtgcaggaacgcaggtcgatctcaccatccagctcatctgcctcctcagcaggggagtctctgtaatatttgagacttgaatctgtcagcacaaaccaatgtttcttccactgcgaagtagaggtggtggtgagcgagggggagggaggctctccaggctcgtccaagatcgacatccatcccttcttgaagttgagcagatcgggcgtcatggcggcgccccagggcggcgggagcaggaggcaggaacgtggacgcggctctcgggccgggctccgcggcgcgggaacc

SEQ ID NO: 189045 - DNA, 1239 bp, Homo Sapiens
  misc_feature (284)..(296): n is a, c, g, or t
  misc_feature (924)..(940): n is a, c, g, or t
tgtacaaataacttgcatatttactatacaaaatggttgacaagtgttctttttgcaaagacttgaatacattggcagaggtgctaatcacatcttccctaaggcacctggaagaattatttgaggaaaaaatgagttttcacattgttttataggaaattaaatttgtccaaagatttggagactatttttaaaacataaatacataaaatttcattatttcctgctatcttgtttgctggcagaagtgaatgtttggtgaggttattttgggataaattacnnnnnnnnnnnnnttagacactgcattaatttcttgttcttttggaatatcttagtaactgaggatcattttctaacaatgtggttgacataccttcagttgctttccacatctaaaagagttatctttcatatatgtacaagttattggtagtcttatttttgggctgtttgttgacttatgccccatttgttttacttgttctttaatataaacccttccattttttaacaattcctaacacttgatatcttaatatcagtcactaacattagtaacttcttgtatgttatattatggcagatctctttacgttttttctcacatctatctgctagtccaggaatttgttactaaatagattttcttggatatttggttgcctcaaagtgcttacatttgttaacagattgtaaaccacatttatttacattgatgaatgggctgttgaataatcattgtaaagcactttgtatatataaggtgctatataagtgtgaaatatcattcatttataaatgaaatgccttctaactttccatattgacttatgtatttggtcccaaattatatttaagtcttttttcttgcaacgtagcccattttttgaaagcaaaacatttctgaaattaggtcatggnnnnnnnnnnnnnnnnnaggttaggtcacttaatataggaggatgttttctcatgtacttgctatttgcaagttcaggtttcatttggttctttatgttaaatacgaataagtaacctcaaatcaagctaaatgtaattaagaattttcagcaactatattcaagtgtttgatttttaaattctttctttctttttaataagaaagatgacctaaaaatcagtggtatttgtttgtcctcagaagccgtagttgaagaaagatattagagtatacacagaactggagccatacattgtgctaattttttacattaa

SEQ ID NO: 189046 - DNA, 941 bp, Homo Sapiens
ttggcacgatgcagtggcttctggactgcgcgatgactggacgcaagtaacttctaggtctgcagacaagaggaagagaagatgaaggaagactgtctgccgagttctcacgtgcccatcagtgacagcaagtccattcagaagtcggagctcttaggcctgctgaaaacctacaactgctaccatgagggcaagagcttccagctgagacaccgtgaggaagaagggactctgatcatcgaggggctcctcaacattgcctgggggctgaggcggcccatccggctgcagatgcaggatgaccgggagcaggtgcacctcccctccacctcatggatgcccagacggcctagctgccctctaaaggagccatcgccccagaacgggaacatcacagcccaggggccaagcattcagccagtgcacaaggctgagagttccacagacagctcggggcccctggaggaggcagaggaggccccccagctgatgcggaccaagagcgacgccagttgcatgagccagaggaggcccaagtgccgcgcccccggtgaggcccagcgcatccggcgacaccggttctctatcaacggccacttctacaatcataagacctccgtgtttactccagcctatggatccgtgaccaatgtgagggtcaacagcaccatgacaaccctgcaggtgctcaccctgctgctgaacaaatttagggtggaagatggccccagtgagttcgcactctacatcgttcacgagtctggggagcggacaaaattaaaagactgcgagtacccgctgatttccagaatcctgcatgggccatgtgagaagatcgccaggatcttcctgatggaagctgacttgggcgtggaagtcccccatgaagtcgctcagtacattaagtttgaaatgccggtgctggacagttttgtgaaaaa

SEQ ID NO: 189047 - DNA, 1158 bp, Homo Sapiens
ggaccctctgctgggacccagtgcctccaggcagctcctcaggttcaggttcaccatggaacacgtctgagtcatccagttctaccctgctgggtgtggggccctgctgggctggctcccggggacctgggggtggaggatggacgggcattggggcagctccggggtgcctggtggcattccgcacggcctcttctaagagctccatccatgtgttcttgtctgatgacgtcaatgcaaccagctcatagatctggggtgggcccagcttggaggtgcagatgatgaagaaggcccgtttatctgtggccacagagcggatgagcacagcattgagcttgagcacggggctgaaggtctgcttgctgtctgaggagcccacagcagtcttgctgtggcacttcagcaatagcttctcatcctgtttctgtagcagcactaggaggtcctccagcagcagcacgtggaggtccaaggtcttatccttgctgatcctccaggtcaggggtccctcatggatcatttttctggttgtaagatccaggctcttgaactctgctgccagggggttgctggccctctccagggcggtggcatccaggcgtttctggtagccctctaaacggtggcggttctctgtttgttttaccgcttcattcacatacttgagaatctcccggcactggtcccgggcccggcacagcttctcatgctcagaggtgccacctaccaaaatggacagaagagatggttggggctcctgcctgagaagtccaacatggcgccagctgttatctgcctattcatccatggcagctggcttgcttcaaacccagcaggcgtgggtggaggggagccacccttgcctcacatgaggaccccaagtggtaagggtaacttttactgagcatcttcaggtctcagacagatcactgctttgaagacgctgatagctcctgggaatccctgcctctactacaaccagctctacagatgcaagggacagagactgtggtaaatggccacaattatgcctctagaaagcctgttcaaatcagattggggttcctaacacctctctgtcctgactccaatgtctgaaatttgggggtagtgaaagatgcccaggatcccagggagagtgataacctgagccaa

SEQ ID NO: 189048 - DNA, 922 bp, Homo Sapiens
  misc_feature (190)..(232): n is a, c, g, or t
  misc_feature (270)..(281): n is a, c, g, or t
ttgtacaaaaaagttggaataaaatgacctcccgataaaatcaggaacatgatataggaaggaaggattgtaggagatttgtgggggaaaaaaaaggagagtatagaatgatggagaaaaatggaccaaaggctaaaaatattgcagggcatcgggtgtttctattccacagagtattgttaatgtacannnnnnnnnnnnnnnnnnnnnnnnnnnnnnnnnnnnnnnnnnnacaaatctacatatacaaacaagggtttgggttttagnnnnnnnnnnnnaaggtgaggactcagaaaatcaaagggctagtagaaacagtgttatgttgggaagcagggtacccccaaagatgttccctgtaggtcacggcactcccaaaagcacacaagcacatacagacatatgcatccccacacacgcctatgcacaaacgtggattatcgcacagactgggaggtttagtggtgcatttctcctctgttttctttttaatatacatttaaaatacagtattatcactttataaaacatacattaagcctaataaatggaccaataagccaaactatcagtattttgtatatcctgcataaactctaatttagttcctcaacatattttcagtgtttatgcagacctttagagttaagcctttgtatttccatgttattccacaatatgcaatatttctctgagtagcttctgctatgatattcttatgaagaaaaggggcaactttctgtccactataggagagaattcagccgaagatatgagagtaatgagagacattttccagtcattggatcgtgttttcttttgtccattattgtactgtgctgtaccacatttatttctatattcattttgtaaaaaatttaaaagtgctattttgtttgtatttgaaaatctctgtgaa

SEQ ID NO: 189049 - DNA, 2622 bp, Homo Sapiens
  misc_feature (1989)..(2003): n is a, c, g, or t
  misc_feature (2208)..(2228): n is a, c, g, or t
ttggctcacccgtacgtcgggctgtgaaagacaccctttccaacccacagtccccacagccatcaccttacaactcccccaaaccacaacacaaagtcacacagagcttcttgccacccggctgggaaatgaggatagcgccaaacggccggcccttcttcattgatcataacacaaagactacaacctgggaagatccacgtttgaaatttccagtacatatgcggtcaaagacatctttaaaccccaatgaccttggcccccttcctcctggctgggaagaaagaattcacttggatggccgaacgttttatattgatcataatagcaaaattactcagtgggaagacccaagactgcagaacccagctattactggtccggctgtcccttactccagagaatttaagcagaaatatgactacttcaggaagaaattaaagaaacctgctgatatccccaataggtttgaaatgaaacttcacagaaataacatatttgaagagtcctatcggagaattatgtccgtgaaaagaccagatgtcctaaaagctagactgtggattgagtttgaatcagagaaaggtcttgactatgggggtgtggccagagaatggttcttcttactgtccaaagagatgttcaacccctactacggcctctttgagtactctgccacggacaactacacccttcagatcaaccctaattcaggcctctgtaatgaggatcatttgtcctacttcacttttattggaagagttgctggtctggccgtatttcatgggaagctcttagatggtttcttcattagaccattttacaagatgatgttgggaaagcagataaccctgaatgacatggaatctgtggatagtgaatattacaactctttgaaatggatcctggagaatgaccctactgagctggacctcatgttctgcatagacgaagaaaactttggacagacatatcaagtggatttgaagcccaatgggtcagaaataatggtcacaaatgaaaacaaaagggaatatatcgacttagtcatccagtggagatttgtgaacagggtccagaagcagatgaacgccttcttggagggattcacagaactacttcctattgatttgattaaaatttttgatgaaaatgagctggagttgctcatgtgcggcctcggtgatgtggatgtgaatgactggagacagcattctatttacaagaacggctactgcccaaaccaccccgtcattcagtggttctggaaggctgtgctactcatggacgccgaaaagcgtatccggttactgcagtttgtcacagggacatcgcgagtacctatgaatggatttgccgaactttatggttccaatggtcctcagctgtttacaatagagcaatggggcagtcctgagaaactgcccagagctcacacatgctttaatcgccttgacttacctccatatgaaacctttgaagatttacgagagaaacttctcatggccgtggaaaatgctcaaggatttgaaggggtggattaagcaccctgtgcctcgggggtggttgttcttcaagcaagttctgcttgcacttttgcatttgcctaacagacttttgcagaggcgatggcagagagcagctgcaggcatggtccctggagccgagccttcaccacgcactcgtccaagttcggatgcgggaacctggtcccagcttgagttcctgcctttcccaccacaaattatcaactggttgatgtgtacactaattacatttcaggaggacttaatgctatttatgttgtgcctctgcaggcaaagcccttaataaatattttacatcctttctaatgacaatgaatggaattaatcactcaacaggtatagtattacgactcatgtttactttttaaaatgatttagaccgattttcagattttatttcgttatgattaaagatgtctcatgtacttggaaaagtgagcannnnnnnnnnnnnnngtatttcactttcataccaggcttaatgtcaatgacatttttatttttgaagtactctgacacctccaccctctactttattagaattggaaggcaaatttttgtccaaaaacctacagacaagtactttgagagaatttccaatataatattaaacataatgataattttttccatactcagaatgaaaaactggatattacgnnnnnnnnnnnnnnnnnnnnngtacaaatttagctaatagctacaggctgagagaattgtaacatagcatgacaaattttgtgttgacttgaaaggaatcacaccattattccttagaagtaattacatgtgttctaacacatttgagacagggttggactcccatttctcatccgagaaattacttaacccttcctggcgctgtacagtcatcttttattctatttcctctttgctgtttgtagtagagacattttgaatgaaacttggcactgcttgattcaaaactgtggaaaccagatctgtttagtctcctgtttgtatgcgtttgctaatggtagctaaataaccagtttttgttgtaaatgcaccaattctgaaggcactttatgtactacatggaggtcatatctgg

SEQ ID NO: 189050 - DNA, 1345 bp, Homo Sapiens
  misc_feature (363)..(423): n is a, c, g, or t
  misc_feature (944)..(992): n is a, c, g, or t
  misc_feature (1058)..(1097): n is a, c, g, or t
ttggccattattatgtgtaccttggagtcatcctcttggtcttgtattcatattgtgggacagtgggaatagcagcttgtagtattgaaataatcaaagagataatttcagctcttacaacaagaacagaaaacatgctaattagaaaaagtcctgctttaagtaatatgtagccacatttgaatcctctaccacaagtcttttttgcaatcttgaactttcattagcttcaaagagaagctgtatttacaggagaaagaggtgattatggagggaatcaaaaatactgctttcagttagtagctagctttaagtcaggagttagtaatgagaaattttataaatgtgtatttctgtgtattnnnnnnnnnnnnnnnnnnnnnnnnnnnnnnnnnnnnnnnnnnnnnnnnnnnnnnnnnnnnntgaagggaaatggatttatatttgaatttgatatttgaatatttgaagttctctatttatatttcatttatcactcttctgtattcactcagcaaccatgcccttagtctgaagataacaaggatactttaatatccagtgccggttcagactcacctatgtggcaccttaaacttaaatatccaaagatgccttttgaatttcaaagattaaaacacagctagagtagtagtattgtagtctcaagatgtatggtgtgtcatttgtgaaaatagaaacgttatttttcctagtttagtatcaacattttagaatgtcaaatttgatgccttgtgaacaagtaattttatattgtgctttaattttttaaaaagtattctttattcatatgtatagaatgcttaaaatagcactgtagacaagatgtttccaaaactttaagtgcgcatatcttttctgtatacagcttaaaatcaaaaatgtatgttaagagaattttttctattacttatggatcatgnnnnnnnnnnnnnnnnnnnnnnnnnnnnnnnnnnnnnnnnnnnnnnnnnctctgggtgaggcatctggttactggttattttaaaaagaataaagacattcctggaatcactccnnnnnnnnnnnnnnnnnnnnnnnnnnnnnnnnnnnnnnnnaagtattattttacaaaatagaaaaaatatagattcatgccaaattattacctatttttacactaactttctgcagtccctccatctggtatgagtaaccacatagagcacaaagcatgagttcttgttcttcagttaaaagagcttctttcacagtgttgataacaaatgccttttgtagccaaaaccaggcgtctcaaccttacgtttttagttaaagaaatgtttagctaaacgttgttgaacat

SEQ ID NO: 189051 - DNA, 1520 bp, Homo Sapiens
ttggctccttttgtgttggcagggaatgtatcccagtcctctgccattgacctcaggaaacgctgcagccagctggaaggacattcaggtacccgggtaggctcctccctgcgacagaccttcagcttcctctcgggcatgaccggaaaggccaagacccgggaaaaggagaagatgaaggaagccaaggatgcccgctataccaatgggcacctcttcaccaccatttcagtttcaggcatgaccatgtgctatgcctgtaacaagagcatcacagccaaggaagccctcatctgcccaacctgcaatgtgactatccacaaccgctgtaaagacaccctcgccaactgtaccaaggtcaagcagaagcaacagaaagcggccctgctgaagaacaacaccgccttgcagtccgtttctcttcgaagtaagacaaccatccgggagcggccaagctcggccatctacccctccgacagcttccggcagtccctcctgggctcccgccgtggccgctcctccttgtctttagccaagagtgtttctaccaccaacattgctggacatttcaatgatgagtctcccctggggctgcgccggatcctctcacagtccacagactccctcaacatgcggaaccgaaccctatccgtggaatccctcattgacgaagcagaggtaatctacagtgagctgatgagtgactttgagatggatgagaaggactttgcagctgactcttggagtcttgctgtggacagcagcttcctgcagcagcataaaaaggaggtgatgaagcagcaagatgtcatctatgagctaatccagacagagctgcaccatgtgaggacactgaagatcatgacccgcctcttccgcacggggatgctggaagagctacacttggagccaggagtggtccagggcctgttcccctgcgtggacgagctcagtgacatccatacacgcttcctcagccagctattagaacgccgacgccaggccctgtgccctggcagcacccggaactttgtcatccatcgcttgggtgatctgctcatcagccagttctcaggtcctagtgcggagcagatgtgtaagacctactcggagttctgcagccgccacagcaaggccttaaagctctataaggagctgtacgcccgagacaaacgcttccagcaattcatccggaaagtgacccgccccgccgtgctcaagcggcacggggtacaggagtgcatcctgctggtgactcagcgcatcaccaagtacccgttactcatcagccgcatcctgcagcattcccacgggatcgaggaggagcgccaggacctgaccacagcactggggctagtgaaggagctgctgtccaatgtggacgagggtatttatcagctggagaaaggggcccgtctgcaggagatctacaaccgcatggaccctcgggcccaaaccccagtgcctggcaagggcccctttggccgagaggaacttctgaggcgcaaactcatccacga

SEQ ID NO: 189052 - DNA, 849 bp, Homo Sapiens
gactgcatagtttttgatcatatggatggctcataattgacttagacaatcctcttttgttagaaagttagatttgttgcaataaacacctttgtacttaaatcttctgtcacatctctgatatttcctcttcatcctcctttgccctctttcttccctcatgtggcattctgggagtatcttgggggtggtgtgtggaggttccctgggtgacccctggagtccttctgtagacagtcatcaccaccatgaccaccttgaagaagaacctggctgacgaggatgctgtgtcttgcctggtgctgggcaccgagaacaaggagctcctggtgcttgaccccgaggccttcaccattttagccaagatgagccttcccagcgtccccgtcttcctagaggtttctggccagtttgatgttgagttccggcttgccgcggcctgccgcaatggaaacatctatattctgagaagagactccaagcaccccaagtactgcatcgagctgagcgcccagcctgtgggacttatccgggtacacaaggtcctagtggtgggcagcacccaagacagcctgcatggcttcacccacaaggggaagaagctgtggacagtgcagatgcccgcagccatcctgaccatgaacctcctggagcagcattcccggggcctgcaagccgtcatggctgggctggccaatggagaggtccgcatttatcgtgacaagccctgctcaatgtcatccacaccccggatgcagtgaccagcctttgctttggccggtacgggcgggaggacaacaccctcatcatgaccactcgaggtggtggcctgatcatcaagatcctgaa

SEQ ID NO: 189053 - DNA, 1135 bp, Homo Sapiens
ttgggggagccttgacgttaggaacgaagtctaacctggatctggagccgggtgagatcaaattgggaatgctttcataatgaacgtcaaccagtcagttccacctgtgccaccatttgggcagccccagcccatctacccagggtatcatcagtccagctatggtgggcaatcagggtccacagcccccgccattccctatggagcctacaatggcccagtaccaggctatcagcaaacacctccccaaggtatgtcaagagccccaccttcctcgggggcacctccagcctcaacagcacaggctccttgtggccaggctgcatatggccagtttggccaaggagatgtacagaatgggccaagctccactgttcagatgcaaaggctgcctgggtctcagccatttgggtccccattggcccctgtgggcaaccagccacctgtgcttcagccctatggccctcccccgacaagtgcacaggtggctacgcagctgtctggaatgcagatcagcggtgctgtggccccagcccctccttcttcagggctgggctttggcccaccaacatcgctggcttcagcctcaggaagtttccctaactctggtctgtatggctcctatcctcagggccaggctcctccccttagccaggcccaaggtcatcctgggatccagactccccagcgatctgccccatcacaggcctccagcttcacacccccagcttcagggggtcctcggctgccttcgatgactggtccactcctgcctggacagagttttggagggccctcagtgagccagcccaaccatgtgtcttcacctcctcaagctctgccccctggcacccagatgactgggcccctgggaccactgccacctatgcactccccgcagcagccaggctatcagccccaacaaaatggttccttcggaccagcccggggccctcagtctaattatggaggcccctacccagcagcacccacctttggcagtcagcctgggcctcctcagccactgcctcctaagcgcctggaccctgatgccatcccaagccctattcagtcattgaagatgacaggaacaaccggggtacagagccatttgttactgggagtacagggccag

SEQ ID NO: 189054 - DNA, 1386 bp, Homo Sapiens
ttggctttgcggcatggcgatggcggagggcgagaggactgagtgtgctgagcccccccgggacgaacccccggctgatggagctctgaagcgggcagaggagctcaagactcaggccaatgactacttcaaagccaaggactacgagaacgccatcaagttctacagccaggccatcgagctgaaccccagcaatgccatctactatggcaaccgcagcctggcctacctgcgcactgagtgctatggctacgcgctgggagacgccacgcgggccattgagctggacaagaagtacatcaagggttattaccgccgggctgccagcaacatggcactgggcaagttccgggccgcgctgcgagactacgagacggtggtcaaggtgaagccccatgacaaggatgccaaaatgaaataccaggagtgcaacaagatcgtgaagcagaaggcctttgagcgggccatcgcgggcgacgagcacaagcgctccgtggtggactcgctggacatcgagagcatgaccattgaggatgagtacagcggacccaagcttgaagacggcaaagtgacaatcagtttcatgaaggagctcatgcagtggtacaaggaccagaagaaactgcaccggaaatgtgcctaccagattctggtacaggtcaaagaggtcctctccaagctgagcacgctcgtggaaaccacactcaaagagacagagaagattacagtatgtggggacacccatggccagttctatgacctcctcaacatattcgagctcaacggtttaccctcggagaccaacccctatatatttaatggtgactttgtggaccgaggctccttctctgtagaagtgatcctcacccttttcggcttcaagctcctgtacccagatcactttcacctccttcgaggcaaccacgagacagacaacatgaaccagatctacggtttcgagggtgaggtgaaggccaagtacacagcccagatgtacgagctctttagcgaggtgttcgagtggctcccgttggcccagtgcatcaacggcaaagtgctgatcatgcacggaggcctgttcagtgaagacggtgtcaccctggatgacatccggaaaattgagcggaatcgacaacccccagattcagggcccatgtgtgacctgctctggtcagatccacagccacagaacgggcgctcgatcagcaagcggggcgtgagctgtcagtttgggcctgacgtcaccaacgccttcttggaagagaacaacctggtctatatcatccgcagccacgaagtcaatgccgagggctacgaggtggctcacggagccgctgtgtcaccgtcttctctgcccccaactactgcgaccagatggggaacaaa

SEQ ID NO: 189055 - DNA, 924 bp, Homo Sapiens
agggataaaggatgatatagttacattccatgaactctgcaagtcagcatgaggcataacctggctgcaacgccataagacaggaggcactaaagaactcttggcaacttctccatgctacccgagaggcacgtgagcctctctttgcagtttctccttagtggctggtgacagtaactggtgtttagatgaaggtgaccgtcgctggactggcatgtggtacctgacattcttccagaaccttgtctttgcagactgtggtccctgtgtaaagtcccctgaccagcggatagccccatgtttctgcttaatgaatttaatcgattctggcattttctcatagtcttggattttctccagctcaagcaggacaactttaattccatcctgaacaagagcattatacatggctatttgctcttcagatgaaccacccagccagctgaagcctgatgtttctctgactaaaatgataatcagtcttctgcttttctttacgttttcattaatgacctcaacaatgtcttccccaacgtagtcatcccttccataaatgaacagcttatatccacactgtttttccaagacctcaggcaagactttaaacacaaaaatatcacagtcagaggtagacccttccccaacagtctttggatacagtatatatgcgtcataggtctttccatctgaagcttttattgggagaaaatcatagcaggaatccctgtaccaaagcacaatgtcaatcttgaagattttatagatgaaaacagaacacacaattatgactgtcaacgtgacacatataccaatcatgtgcttctggaaattagtgactggatatattaactggatatatgctgcatctataccatgtgtattcttggcaaaacaggtaaatggatgtttataaaatctacccaa

SEQ ID NO: 189056 - DNA, 1490 bp, Homo Sapiens
tacaaaaaagttggcaactccaatacgccagtgccagaagctgtggaagctgtgtctgcagggctccctgtacatcacccttatccgtgaggatgtgctgcaggtgcacaaagtcaccgaggacctgtttagcagtttgaaagggtatggcaagagagtggcagacataaaggagagcaaggaacatgtaattgcaaacagtggccagtttcattgtcaacggcggcaatttctgcggatggcagtgaaggagctggagactgtgttggctgatgaaccgggactactgggtcctaaggctctttttgctttcatggccctgtccttcattcgtgatgaggtcacctggctggttcgccacacagagaatgtcaccaagacaaagacacctgaggactatgctgactcgagcattgcagagctacttttcttgttggaggggattaggtctctggtccgaagacacatcaaagtgatacagcaataccaccttcagtacttggcaagatttgatgctcttgtgctcagtgacatcattcagaacttgtctgtgtgtccagaggaggagtccatcatcatgtcctcattcgtcagtatcctctcctctctgaatctcaaacaagttgataatggagaaaaatttgaattctcaggattgaggctggactggttccgcctacaggcatacactagcgtggctaaggcccctctgcacctgcatgagaaccctgacttagccaaggtgatgaacctcattgtcttccactcccgaatgctggactccgtagaaaaattgctggtggaaacttctgatctgtctactttctgctttcatcttcgtatctttgagaagatgtttgccatgaccttggaggaatctgccatgttgcgttatgccattgctttccccctgatttgtgctcactttgtccactgcactcatgagatgtgcccagaggagtacccccacctcaagaaccatggtcttcaccactgcaactccttcctggaagagttggccaagcagaccagcaattgcgtcctggagatctgtgctgagcagcgaaacctgagcgagcagcttctacctaagcactgtgccactacaatcagcaaagccaagaacaagaaaaccaggaagcagaggcagactcccagaaaaggagagcccgagagggacaagccaggagctgagagtcaccggaagaaccgcagcattgtcaccaacatggacaagctacacctaaacttgacagaactggcactgacaatgaatcatgtatacagtttctccgtgtttgaacatactatcttcccttctgagtacctcagcagccacctggaggccagactcaacagagccattgtgtggctggctggctacaatgccacgacccacgagatcgtacggccttctgagctgttggcacgagtcaaagcatacattggtttcatacagtcactggcccagtttttgggtgcagatgctt

SEQ ID NO: 189057 - DNA, 1606 bp, Homo Sapiens
  misc_feature (1442)..(1453): n is a, c, g, or t
ttggcttaatttttaaacggtcagtgtccagttgaaggcagaacactaatcagatttcaaggcccacaacttggggactagaccaccttatgttgagggaactctgccacctgcgtgcaacccacagctaaagtaaattcaatgacactactgccctgattactccttaggatgtggtcaaaacagcatcaaatgtttcttctcttcctttccccaagacagagtcctgaacctgttaaattaagtcattggattttactctgttctgtttacagtttactatttaaggttttataaatgtaaatatattttgtatatttttctatgagaagcacttcatagggagaagcacttatgacaaggctattttttaaaccgcggtattatcctaatttaaaagaagatcggtttttaataattttttattttcataggatgaagttagagaaaatattcagctgtacacacaaagtctggtttttcctgcccaacttccccctggaaggtgtactttttgttgtttaatgtgtagcttgtttgtgccctgttgacataaatgtttcctgggtttgctctttgacaataaatggagaaggaaggtcacccaactccattgggccactcccctccttcccctattgaagctcctcaaaaggctacagtaatatcttgatacaacagattctcttctttcccgcctctctcctttccggcgcaacttccagagtggtgggagacggcaatctttacatttccctcatctttcttacttcagagttagcaaacaacaagttgaatggcaacttgacatttttgcatcaccatctgcctcataggccactctttcctttccctctgcccaccaagtcctcatatctgcagagaacccattgatcaccttgtgccctcttttggggcagcctgttgaaactgaagcacagtctgaccactcacgataaagcagatttttctctgcctctgccacaaggtttcagagtagtgtagtccaagtagagggtggggcacccttttctcgccgcaagaagcccattcctatggaagtctagcaaagcaatacgactcagcccagcactctctgccccaggactcatggctctgctgtgccttccatcctgggctcccttctctcctgtgaccttaagaactttgtctggtggctttgctggaacattgtcactgttttcactgtcatgcagggagcccagcactgtggccaggatggcagagacttccttgtcatcatggagaagtgccagcaggggactgggaaaagcactctacccagacctcacctcccttcctccttttgcccatgaacaagatgcagtggccctaggggttccactagtgtctgctttcctttattattgcactgtgtgaggtttttttgtaaatccttgtattcctattttttttaaagnnnnnnnnnnnnccttaaagctgcatttgttactgaaatgattaatgcactgatgggtcctgaattcaccttgagaaagacccaaaggccagtcaaggggtggggggaactcagctaataagacctagttactgccctgctaggccatgctgtactgtgagcccc

SEQ ID NO: 189058 - DNA, 1748 bp, Homo Sapiens
acaaaaaagttggggctgctgctgcctgtggcccgggcggctgggagaagcggagtgttggtgagtgacgcggcggaggtgtagtttgacgcggtgtgttacgtgggggagagaataaaactccagcgagatccgggccgtgaacgaaagcagtgacggaggagcttgtaccaccggtaactaaatgaccatggaatctggagccgagaaccagcagagtggagatgcagctgtaacagaagctgaaaaccaacaaatgacagttcaagcccagccacagattgccacattagcccaggtatctatgccagcagctcatgcaacatcatctgctcccaccgtaactctagtacagctgcccaatgggcagacagttcaagtccatggagtcattcaggcggcccagccatcagttattcagtctccacaagtccaaacagttcaaatttcaactattgcagaaagtgaagattcacaggagtcagtggatagtgtaactgattcccaaaagcgaagggaaattctttcaaggaggccttcctacaggaaaattttgaatgacttatcttctgatgcaccaggagtgccaaggattgaagaagagaagtctgaagaggagacttcagcacctgccatcaccactgtaacggtgccaactccaatttaccaaactagcagtggacagtatattgccattacccagggaggagcaatacagctggctaacaatggtaccgatggggtacagggcctgcaaacattaaccatgaccaatgcagcagccactcagccgggtactaccattctacagtatgcacagaccactgatggacagcagatcttagtgcccagcaaccaagttgttgttcaagctgcctctggagacgtacaaacataccagattcgcacagcacccactagcactattgcccctggagttgttatggcatcctccccagcacttcctacacagcctgctgaagaagcagcacgaaagagagaggtccgtctaatgaagaacagggaagcagctcgagagtgtcgtagaaagaagaaagaatatgtgaaatgtttagaaaacagagtggcagtgcttgaaaatcaaaacaagacattgattgaggagctaaaagcacttaaggacctttactgccacaaatcagattaatttgggatttaaattttcacctgttaaggtggaaaatggactggcttggccacaacctgaaagacaaaataaacattttattttctaaacatttctttttttctatgcgcaaaactgcctgaaagcaactacagaatttcattcatttgtgcttttgcattaaactgtgaatgttccaacacctgcctccacttctcccctcaagaaattttcaacgccaggaatcatgaagagacttctgcttttcaacccccaccctcctcaagaagtaataatttgtttacttgtaaattgatgggagaaatgaggaaaagaaaatctttttaaaaatgatttcaaggtttgtgctgagctccttgattgccttagggacagaattaccccagcctcttgagctgaagtaatgtgtgggccgcatgcataaagtaagtaaagtgcaatgaagaagtgttgattgccaaattgacatgttgtcacattctcattgtgaattatgtaaagttgttagagacatacccttctaaaaaagactttaggcatggtattgaaggaattagaaatgaatttggagtgcttttta

SEQ ID NO: 189059 - DNA, 1128 bp, Homo Sapiens
catgatagcccacagttgtgtaggtgggtaatattgaactcgtgagctcctggtcatagatccacttgacattttcaaacttacagtcatataagactagaggaaattctacagccatactatattgaggcttttggggatttttctctatattcagcagctcatcaataatctctggcttctccattccttggccaatcagaaagaggatagccatcatacatcggacttgatgataaaggaatgcctggccagtcacttcaaactgacataactggaaaggttcttgccatctcccctcacctgggctctggcccactagctgtacttgagcagatagaatagtcctctgaaaattaatcacaccgttggctacatccattttacacaagttcctgaaatcatgggtgccaacatacttctgagctgcataatccatggttacaatatctaaatcagcacgagggaaaaaatagcggtaagtccgctcaaggcagctgaacctagcactgaagcttggttctacaggggcccaggccaatatacggatgtctggagggagtacccgattgagaatgtgggtataacggatctcttcagcagcagcattagcctcctcttttacattaaagtcctcggaatccctgccccttggaaactgagagcgaaggtcaagtgagatcacctgtccaaaggcactaactcctttatctgttctcccacatcggtgatagttggatgtctgtctgctttctactagtcgagtcttggttagagcttcaaacagtttctcttcaatggtattatttgtgttttcctgactagcaaagccctggtatccccagcccatataggctattcttagggctacgtgtcttcggccatgagcactgaaatcaaatgcacgcttagtttttccagctcctgatgaattttctctaatgtttgagtcctccttatttttggcctgttcctttttaagtctttgcacctcttgctccagttctcgtactctttttaggagcttctcagtctggtttctgtctgtgtcattataagccatgatatgacaaccccaggaataaacgaaccatacaggtctgccctgccaacttttttgtacaaagt

SEQ ID NO: 189060 - DNA, 1576 bp, Homo Sapiens
  misc_feature (1494)..(1506): n is a, c, g, or t
ttgggtttcgtttgttgcagctgtcagctaacatttggttgagctcatataatccaaacctaattgtccaactattgtattgccactattgttaatttgttccttccttactttcttattgttggatcttatatgactgtatgactgtagataatagacagctagctaaatgtagagcaccatttttctcaatgagtttgttttcaaaggctttgcactggagaagatatgtgtagaatttttgttttatttttaaaatgtgtaaaacatcttttgttttatatgcttttaagaatgtagattgtaatttaggaaatggcatatattctgcaaagtggtataatgttgtatatatgaaaaacaggtatatttggtttagttctgtgtttcagtgactgataaacaaaaatgaagctaaaatgaatcaacggctcattcatagttactaaagccatgtcatgactgtcattctattatgaagaaaacagttttatttgagtgctttaatataatgcaacatttaagtcatcttaaggtgaaaagttattgaagtgttcttctctcaagttaacaaaattttacaaatgttcctgaagtgtatcgattgagggaattattttattctagcctgtcatgagtctgtctgagcatgatacttaacatgaacttgatgtagtaggtgcacatttgcctaacaggataaattcagtgatagcccaagctggtcaggagagacagaagtgctggctaggaggtctcagcctcgggcactacaatgtttatctttttctttttgaacaatattgtgaaaatgattgcattctcattgagcatgaaagtcaaaactggaattttctaaagctttggagaaaaggagagaattagtagggcaagatcaaagcatacattggaaataaacagtagaaataagcaaacaatataaagagacacgggaaatgcttctcgtgaagggcaaatgtaacaccataacagtagggaataaactgtgtcccacctgtttacttgtgtttatttgttgttatgatgagtatgcacctaccattttcctttattgtgatcactaaaatgaggccaaggtttaggaggtgagaaaaagtatcccttttacggattcagttcctgctaggatgttgtatcagaatcatgtgagaactcaggaagaggtagagcagaaataaaaaggaagaaaatgtagattagaaaataagacttctgagaaaaagttcaaggaataaagattgtttgactctggagaggagaaagctgttgagatagtttgctaagtttgctaataaagctttattgagtcttttattgaagggttcaaagtaagaaatactatgccatagtgttctccatctctagtgaagacagaaccagagggaataagatcttttttttaaagacagcatggaaagtttaagatttaggaacttcttgagaaatcttcataatatcttctattcaaaatcnnnnnnnnnnnnnagggataaaattttaaaattaagagatatacagatgacttttagggtcgttctttcagcacatttttttt

SEQ ID NO: 189061 - DNA, 1733 bp, Homo Sapiens
ttgggccttagcagcagtggcgactgctatgccggctgagcatgtggccgtgcaggtcccggccccagagccaacacccgggcctgtgaggatcctgcggaccgctcaggatctcagcagcccgcggacccgcacgggggatgtgctgttggcggagccggccgacttcgagtcactgctgctttcgcggccggtgctggaggggctgcgggcggccggcttcgagaggccctcgccggtgcagctcaaggccatcccgctggggcgctgcgggctcgatttaattgttcaagctaaatctggcaccgggaaaacctgtgtgttctccaccatagctttggactctcttgttcttgaaaacttaagtacccagattttgatcttggctcctacaagagaaattgctgtacagatacattctgttattacagccattggaataaaaatggaaggcttagagtgtcatgtctttattggagggaccccattatcacaagacaaaaccagacttaaaaagtgtcatattgctgttggatctcctggcagaattaagcaactcatagaacttgactacttgaacccaggcagtatacgcctctttattcttgatgaagcagataagcttttagaagaaggcagcttccaggagcaaataaattggatttattcttccttgcctgccagtaaacagatgctggcagtatcagctacttatcccgaatttttggctaatgctttgacaaagtacatgagagatcccacttttgtaagactgaattccagtgatccaagtctcatacgtttgaagcagtattacaaagttgtcaattcataccctttggcacataacgtttttgaggaaaagactcagcatttacaggaactgttcagcagaattccatttaatcaagctttagtcttttctaatttgcacagcagagcacaacatttggctgatatcctttcttctaaaggctttcctgctgagtgcatttcaggcaatatgaatcagaatcagcgtcttgatgctatggctaaactgaagcactttcattgcagagtcctcatttccacagatttgacttctcgtgggattgatgctgagaaggtgaatctggttgtaaatctggatgtaccattggattgggagacatacatgcatcggattgggagagctggccgttttggtacattggggctgacagtgacctactgttgccggggagaggaagaaaatatgatgatgagaattgcccagaaatgtaatatcaaccttctccctttaccagatcccattccttctggtctgatggaagaatgtgtggattgggatgtggaagttaaagctgctgtgcatacatatggtatagcaagtgtacctaaccaacccttaaaaaagcaaattcagaaaatagagagaacccttcaaattcagaaagctcatggtgaccacatggcttcctctagaaataattctgtatctggactatcagtcaaatcaaaaaataataccaaacaaaagcttcctgtgaaaagccactcagaatgtggaatcatagaaaaagcaacgtcaccaaaagaactgggctgtgacaggcaatccgaagagcaaatgaagaattctgttcagactcccgttgaaaactccaccaacagtcagcaccaggtcaaagaagctttacctgtgtcactcccccagattccttgtctgtcttcctttaaatccatcagcc

SEQ ID NO: 189062 - DNA, 1042 bp, Homo Sapiens
tgtacaaagaggaaggcttggtgattcctggtaatgtgttattttgagaaaaagcttcggcagcacactccagaaaaaaacttcccaaaccctgggcaactgaggttctgatgtggagctctggatggaaagcgtgctgaagtcttgttaaactagcaagcttttgtttggaggtccaccgccgaaggcgcacaggcctgtgggaacacgagcgttgagactgggggcgtctagatgatccaagggctcggacctcaggcacatgcgaatgacccggagtgtggacaacgtccagttcctgccctttctcaccacggaagtcaagtgaggggccgacggctgcgcaacctgggctggctgagttatggggctttgaagggagacgggatcctcatcgtcgtcaacacagtgggtgctgcgcttcagaccctgtatatcttggcatatctgcattactgccctcggaagcgtgttgtgctcctacagactgcaaccctgctaggggtccttctcctgggttatggctacttttggctcctggtacccaaccctgaggcccggcttcagcagttgggcctcttctgcagtgtcttcaccatcagcatgtacctctcaccactggctgacttggctaaggtgattcaaactaaatcaacccaatgtctctcctacccactcaccattgctacccttctcacctctgcctcctggtgcctctatgggtttcgactcagagatccctatatcatggtgtccaactttccaggaatcgtcaccagctttatccgcttctggcttttctggaagtacccccaggagcaagacaggaactactggctcctgcaaacctgaggctgctcatctgaccactgggcaccttagtgccaacctgaaccaaagagacctccttgtttcagctgggcctgctgtccagcttcccaggtgcagtgggttgtgggaacaagagatgactttgaggataaaaggaccaaagaaaaagctttacttagatgattgattggggcctaggagatgaaatcac

SEQ ID NO: 189063 - DNA, 1991 bp, Homo Sapiens
ttggggaaatcttactgaaggcagtgaagcgaagaaaaggatcccagaaagtttcaggccctcagtaccgcctggagaagcagagcgagcccaatgtcgccgttgacctggacagcactttggagagccagagcgcatgggagttctgcctggtccgcgagaacagtatctctggagacaaagtagagatagaccctgttacgaatcagaaagccagcactaagttttggattaagcagaaacccatctcaatcgattccgacctgctctgtgcctgtgaccttgctgaagagaaaagccccagtcacgcaatatttaaactcacgtatctaagcaatcacgactataaacacctctactttgaatcggacgctgctaccgtcaatgaaattgtgctcaaggttaactacatcctggaatcgcgagctagcactgcccgggctgactactttgctcaaaaacaaagaaaactgaacagacgtacgagcttcagcttccagaaggagaagaaatccgggcagcagtgacactggcctccagcctcaatctgttccgtagctcagagcctgcctgccagggccaagtgccctagagcccacccggtgtcctgaagtcctcggggggaggccagcccctggctcactggcacagggcaggtgggctctcggggaaggtgtcgggggccccctaggagggagcgctggggacattgccatgggacggaagtctgcttggcagtggctttgataagcgatgcttgggggtcagaccaccccctagaggagccacgtgccgcccagccaccttcaatgcctgccaccctgcccgaggatgtacagagccgtgcccacacatttccttgcaacttgatcaaatttcttaaagcaaacaacaaaaatgtacatttctgtttttccttttaataaacaggtgtactctttatcatggttggtatgatggaccattctttggggcggaggattgattatgttactctctttaaaatctgttcccatattgaacaggcagattggaaaagctatggttcgatttctcagaagaaatgtttaggtcttagtcaatagttttaactatgccatttgtttaaatgagtgcatttgcttcgagggtagtgtcttactaaaagttaggaacagagacctagtggtgtgtccaaggccgtgtcactttccccttcagcacaccccagcttctgacctcagagcccaggagctgcgtggacagtgtggggtgccaggaggaggggtggtggctggtcctcaggcacgctgcactcccagccagacatggtctttccgtttcttaagtagcaagtgtaggtttcagctggcagttccacctgcatgttctctgcttcgctgccttggaaggggccacattccccattcctcttctccttacagcgcctgcctcctttttcaagcaggcggaaagctgctgtttctcacgtttcagggagaggggtgagcggagggagacctgtgtccgtgccgtccggctccctgggtgggaacaggcaagggatcagatgcccctgacaccacgcctctggccacaccagatgcctctgcagtcctcgacagcctcttcagtgtccctcctgcggtgatgtccttactgtccccagccagggccggggaccggtgtttcactgaggacctgcattagaaacattttttaaattgttgtacaggaagagatgtgtctaaaacagcatcttaaagctgagtgtatttctttgcacaaggggtcatgctgatgaattcttctttcattctgatctttgttcagccaacaggagcgtccttttctaatgtcttccattcctaccccccacccaaaaacaaaagaaatatttgtagcttgctatctgtatttgaatttttagcaattttatatttagatactttgaaaaatgtaaatgactaatttggtcattaaatcttgtgacattcgatattaaaatgata

SEQ ID NO: 189064 - DNA, 1042 bp, Homo Sapiens
ttggcttatacatatgaaatactgcaaactaatatttagttccaaattggcttttgtcttaaaatggttcaccaagtagtaataaaattctctttctattgtttgttttttggtaaatttaatttagcctgatgaaaacaaaggcgatatgcattatgatgctgagattatccttaaaagagaaactttgttagaaatacagaagtttctcaatggagaagactggaaaccaggtgccttggatgatgcactaagtgatattttaattaattttaagtttcatgattttgaaacatggaagtggcgattcgaagattcctttggagtggatccatataatgtgttaatggtacttctttgtctgctctgcatcgtggttttagtggctactgagctgtggacatatgtacgttggtacactcagttgagacgtgttttaatcatcagctttctgttcagtttgggatggaattggatgtatttatataagctagcttttgcacagcatcaggctgaagtcgccaagatggagccattaaacaatgtgtgtgccaaaaagatggactggactggaagtatctgggaatggtttagaagttcatggacctataaggatgacccatgccaaaaatactatgagctcttactagtcaaccctatttggttggtcccaccaacaaaggcacttgcagttacattcaccacatttgtaacggagccattgaagcatattggaaaaggaactggggaatttattaaagcactcatgaaggaaattccagcgctgcttcatcttccagtgctgataattatggcattagccatcctgagtttctgctatggtgctggaaaatcagttcatgtgctgagacatataggcggtcctgagagcgaacctcctcaggcacttcggccacgggatagaagacggcaggaggaaattgattatagacctgatggtggagcacgtgatgctgattttcattataggggtcaaatgggtctcactgagcaaggcccttatgccaaaacgtatgagggt

SEQ ID NO: 189065 - DNA, 1351 bp, Homo Sapiens
ttgggtctatcgatggcactcagattgctggagcctgtggaaatggacatgtcgtttttgcacatgtggtggaacaacattgggagtggaaaaattttcaagtaacattaacgaaaagaagagccatgcaggttcgtaatgttcttaatgatgcagtggatttactggaattccgtgatagagtcattaaagcatctttgaactatgcacacttagttgtttcaacgtctcttcaatgttacgtgttctccacgaagaactggaacacaccaattatatttgatctcaaagaaggaactgttagtttgattctgcaggcagaaagacattttcttcttgtagatggtagtagtatctatttatattcatatgaagggcgctttatttcatctccaaaatttcctggaatgagaacagatattctgaatgcacagactgtgtctttgagtaatgataccatagcaataagagacaaagctgatgaaaaaataatcttcctctttgaggcatcaaccggaaagccgttaggtgatggaaagtttctttctcataagaatgaaatcttggaaattgctctggatcaaaaaggacttaccaatgatagaaaaattgctttcattgataaaaatagagatctctgtatcacttctgtgaaacgatttgggaaggaagaacaaattatcaagcttggaacaatggtgcatactttggcatggaacgatacatgcaatatcctttgtggacttcaagatactcgatttatagtgtggtattaccccaatacagtttatgtggacagagacattttgcctaaaacattatatgaaagggatgcaagtgaatttagtaaaaatccccatattgtgagttttgttggaaatcaagtaactattagaagagctgatggctccctggttcacatcagcataacaccatatcctgctattctccatgaatatgtaagcagttcaaaatgggaagatgctgtgagactttgtcgctttgttaaggagcaaaccatgtgggcttgtctagctgctatggcagttgctaatcgagatatgactactgcagaaatagcctatgcagcaattggtgaaattgataaggttcagtacatcaattctataaaaaatcttccatctaaagaatcaaaaatggcccacatactactgtttagtgggaacatacaggaggctgaaatagtacttcttcaagctggccttgtttatcaagcaatccagatcaatattaatctctacaactgggaaagggcactggaattgggctgtaaaatacaaacacatgttgatacagttcttgcttaccgtcaaagtttttggagacattt

SEQ ID NO: 189066 - DNA, 919 bp, Homo Sapiens
ttgggtttatgataactgatgcactcactgctattgccctgtattttgcaatccaggacttcaataaagttgtgtttaaaaagcagaaactcctcctagaactggaccagtatgccccagatgtggccgaactcatccggacccctatggaaatgcgttacatccctttgaaagtggccctgttctatctcttaaatccttacacgattttgtcttgtgttgccaagtctacctgtgccatcaacaacaccctcattgctttcttcattttgactacgataaaaggcagtgctttcctcagtgctatttttcttgccttagcgacataccagtctctgtacccactcaccttgtttgtcccaggactcctctatctcctccagcggcagtacatacctgtgaaaatgaagagcaaagccttctggatcttttcttgggagtatgccatgatgtatgtgggaagcctagtggtaatcatttgcctctccttcttccttctcagctcttgggatttcatccccgcagtctatggctttatactttctgttccagatctcactccaaacattggtcttttctggtacttctttgcagagatgtttgagcacttcagcctcttctttgtatgtgtgtttcagatcaacgtcttcttctacaccatccccttagccataaagctaaaggagcaccccatcttcttcatgtttatccagatcgctgtcatcgccatctttaagtcctacccgacagtgggggacgtggcgctctacatggccttcttccccgtgtggaaccttctctacagattcctgaaaacatctttgtcctcacctgcatcatcatcgtctgttccctgctcttccctgtcctgtggcacctctgggatttatgcaggaagtgccaactctaatttctttta

SEQ ID NO: 189067 - DNA, 957 bp, Homo Sapiens
gccaactttgtacaaaaaagttggcaaaagatgaaaagagagaggacagaacaccttatcagctggtcaagaaacttcagaagaaaatcagacaatttgaggaacagtttgaaagggaaagaaatagcaagccctcctacagtgatattgctgccaatccaaaggtattaaaatggatgacagagcttacaaaactgcggaagcaaattaaagatgcaaaacacaaaaattctgatggagaatttgtacctcagacacgtccacgtagtaacacacttccaaaaagctttggctcttctctagaccatgaagatgaagagaatgaagatgaacccaaggtcattcagaaggagaaaaaaccatctaaagaagcaacccttgaacttattcttaaaagactgaaagaaaaacgtattgagaggtgtcttccagaagatatcaaggtgaccaaggaagaaaggcacattgttaaacctctctatgatagatacaggcttgtaaaacaaatgctgacaagagctagcatcactcctgtccttggatctccatccaccaagcgaaggggtcagatgttacagccaatcatagaaggagaaactgcacatttttttgaagaaatcaaggaggaagaagaagatggtgttaatctgtcctctgagttaggtgatatgttgaaaactgcagtacaggtacagtcttcattagaaaactctgaatctgatgttgaagaaaaatcaagaaaaactggctctggatctccgattgtcaagttctcgagcagcttctatgcctgaattattggaacaactttggaaagccagagctgaaaaaagaaactacgcaaaacgttgcgggaatttgaagaagcattttatccacaaaatggaaggaatgcccagaaagaaggatcgtggtcccagtgcctggaggagacagaaagtacaagaaaattaagcc

SEQ ID NO: 189068 - DNA, 944 bp, Homo Sapiens
ccccagcgtttgggtgctccggggatgacaccagtaagggttcagcagtgcccggtcagtacaggttggtcctgccgctggggaaggggatcccgttgtcggacgtgaagatcaccagtgtgtcgttcaggacaccggcgtcacgcagctcctggagcaccagtccaactccttggtccatgcggccgacggtggtgtactgagcggccaggtcggctcgggctgccggggtgttggggacgaagtaaggcaccagcacgtccagtgggtcgtaggcctggggggtccagtctgggatacgacccatgccgctctctccgttgccaaacttctcacagaaggttccgtactggggctgggagtgcccacagcggtgggggtcgtggaaggcgacgtagaggaagaaaggccggtcatcctgagtctgcaggaatttccggacgagcagcttaattctagtgatgttccgccccacctggaggacggagccattctcctccgtgtacgcaaagtcaaacgggtacacggtctccggccccacgtgcttcttcccgatgatgcctgtgcgcacaccagcttggctgagcagcagcggcaggctccgcaccttgtcgaaggagttgaagtggtgcacgtcctggtgcagcccgtacatcccattctgatgctggggcaggccagtgaggaggctggcgcggctgggagagcagctgctgaccgaggtgaaggcattgcgaaagaggaggctgcggcgggccaaggcgtccaggtgcggggtggcgatggcgctgttgttgtacgcgccactctcaaagcctccgtcatccgcgaggagcagcagtgcgttccggggacgcgcccggcagagccccaggactagcagcagcgcgcagcaggcgggccggggcagctcatggcggcggcggctcggactcgggatccaa

SEQ ID NO: 189069 - DNA, 931 bp, Homo Sapiens
ttggcagagccgcaacctgcacagccatgcccgggcaagaactcaggacgctgaatggctctcagatgctcctggtgttgctggtgctctcgtggctgccgcatgggggcgccctgtctctggccgaggcgagccgcgcaagtttcccgggaccctcagagttgcactccgaagactccagattccgagagttgcggaaacgctacgaggacctgctaaccaggctgcgggccaaccagagctgggaagattcgaacaccgacctcgtcccggcccctgcagtccggatactcacgccagaagtgcggctgggatccggcggccacctgcacctgcgtatctctcgggccgcccttcccgaggggctccccgaggcctcccgccttcaccgggctctgttccggctgtccccgacggcgtcaaggtcgtgggacgtgacacgacctctgcggcgtcagctcagccttgcaagaccccaggcgcccgcgctgcacctgcgactgtcgccgccgccgtcgcagtcggaccaactgctggcagaatcttcgtccgcacggccccagctggagttgcacttgcggccgcaagccgccagggggcgccgcagagcgcgtgcgcgcaacggggaccactgtccgctcgggcccgggcgttgctgccgtctgcacacggtccgcgcgtcgctggaagacctgggctgggccgattgggtgctgtcgccacgggaggtgcaagtgaccatgtgcatcggcgcgtgcccgagccagttccgggcggcaaacatgcacgcgcagatcaagacgagcctgcccgcctgaagcccgacacggtgccagcgccctgctgcgtgcccgccagctacaatcccatggtgctcattcaaaagaccgacaccggggtgtcgctccagacctatgatgacttgttagcc

SEQ ID NO: 189070 - DNA, 1106 bp, Homo Sapiens
ttggcccaggcacgccgcggtgaggaccgcggccacagctcggcgccaaccaccgcgggcctcccagccagccccgcggcggggcagccgcaggagccctggctgtggtcggggggcagtgggccatgctgggggcagtggaaggccccaggtggaagcaggcggaggacattagagacatctacgacttccgagatgttctgggcacgggggccttctcggaggtgatcctggcagaagataagaggacgcagaagctggtggccatcaaatgcattgccaaggaggccctggagggcaaggaaggcagcatggataatgagattgctgtcctgcacaagatcaagcaccccaacattgtagccctggatgacatctatgagagtgggggccacctctacctcatcatgcagctggtgtcgggtggggagctctttgaccgtattgtggaaaaaggcttctacacggagcgggacgccagccgcctcatcttccaggtgctggatgctgtgaaatacctgcatgacctgggcattgtacaccgggatctcaagccagagaatctgctgtactacagcctggatgaagactccaaaatcatgatctccgactttggcctctccaagatggaggacccgggcagtgtgctctctaccgcctgtggaactccgggatacgtggctcctgaagtcctggtccagaagccctacagcaaagctgtggattgctggtccatagtgtcatcgcctacatcttgctctgcggttaccctcccttctatgacggagaatgatgccaaactctttgaacagattttgaaggccgagtacgagtttgactctccttactgggacgacatctctgactctgccaaagatttcatccggcacttgatggagaaggacccagagaaaagattcacctgtgagcaggccttgcagcacccatggattgcaggagatacagctctagataaaaatatccaccagtcggtgagtgagcaaatcaagaagaactttgccaagagcaagtggaagcaagccttcaatgccacggctgtggtgcggcacatgaggaaactgtagctgggcaccagccaggagggg

SEQ ID NO: 189071 - DNA, 2332 bp, Homo Sapiens
tgaagtacttttcttgaactcagcattgctgccctgaaccctcccccagctgccttccctactttgggagcctctatttctagaacaggaaaacgctaggctaaatatatgtcctaatggtctcttccatcggtgtgaaggaaagaaaatgggcccaatgttgttgcaaggattaggaaggtcctgccttgccacccagtgggtttagaaatccatctttacggcctccagagaagctggtgatcaggttcccagacatcagcaatcctgtttcctgaggagcttgtgggggctctctctggggatgatctgggtcctagacaaagagccacaactgatgggggtcactgggattgcagggggccatggctggctttttgtcctgggatgtcaggcaggtaccagatcctgagttcctgatgagctgatcctgggccaattcccattcctcgtccttggggacctggctattcttgccagtgaagtgacagctcccaaggcccagagcacccttgctgacatgtagacacagctgctttgcgatgttgtggcgaaggtccctctgagttgtgtactcaaagtactggttgccgccaaggccgtggcaggagtacatgatgaggggcttccccccgcggttgttctcacccacatccaggcattggttggtgccgaggttcttgatggcaccatagaaggtgggcgtcaggtcaggaacaaacatctctgggtagacattgtgcaggtaccaggaaaagttgtgacagtgcagttgttccctcagctgcagtcgttccgaaatgtcaccgaaggatttctcttgggccatctttgctgcctgcagatttctcctatagaaaatcttcttgtagctgtccatccagacctctgccaggcgcacttgattgcgagcaatgacactagtgcccttggggaaggtgtgggggctcttggtccggaacacatggcctacgacagagcaggggatgatctccagctggcccccacactgccacacccggaaggacatttccacgttctcccctccccagatctccatctgattatcataggtaccgatgtgctcaaagtaggacttggagatggagaagaggccaccagcaaacgtcggggatttgatggggtaggtttcatccttgcgcctctgcttctcatgtggaggaagtgtttcccagccgaaggtcaggctccagtcaaagttgcctcggctatggactctgcccctctggacgggcttggcgaactcaaaagtattaaggtcgatggtgacgatgtctgggctcaccaccactgtcttgtcctcagcgattcgagccaggaggggctccagccagccgtggaagcactcacagtgggcatccaggaacgtgagcacctccgcctgtgccacgctggcccccagcagccgggcggtgatcagccccttccgctcctcctgccgcaccaccctcaccacctgcagctgcttcacgtactgctccagcttctcctttaggtgctcctctgtgctggcatcatccaccagtatgatctccttgagcaagatggcaggggtggtgtgtaggacgctgtacactgttcgcagcagtgtggaccaggcttcgttgtggaacacaatgatcacgctggtggtggccagtggggggcagcgccggaacttctggtccacacactcaggtggtcgggtgtctggccccagggacctctgcagggagatccggtcgctggcaaaggcattgaaacagtgcttcttatagccttcttccttttcctgggtctccaggggggtccacttgctcttctgaaatgcttttccatctgccccaggggcattggggtcctgtggtggccgttcccagaagggcttcagttcagctggggtatagaacccagggaggcaggactggtttatggagaacagagtctgctgggcttctggagccctgatttggagcttgggcattgaatctctaaggttgttcatggcctccagcatgaggtccaggacgtgatccttccggctcaccagggacttcagccacggcttctctgtggcctcctctctgctgctcacatccctatgcaggaggaagaggaagagcacaaaggcgcagcccaccatggccaggcgcaggggcatgtggcgtctgcggaggagcctcatcctccagaaccaaggggcaccccagctgcgtcagctctgagtcctgagcccaaccctggagatagcttgatacgttgtggtggccacaagctggggcctcagcctgagaaaggaggggacaagagagagaagtgagccaacacccaa

SEQ ID NO: 189072 - DNA, 1249 bp, Homo Sapiens
ttggctctccctctggctcctctctcagacacactgggaaccctcccacccgctctgagcctctgtccggtgactcttccccctccagatcgggctggtggtcatcctggcttccacggtggtggccatgtcggccgtggcccagctgtgggaggacgagtgggaggtgctgctgatctccctgcagggcacagcgccattcctgcatgtgggggctgtggcagcagtcaccatgctctcctggatcgtggcaggacagttcgcccgtgcagagcggacctcctcccaggtgaccattctctgtaccttcttcaccgtggtgtttgccctctacctggcggctctcaccatctcctctccctgcatcatggagaagaaagacctcggccccaagcctgctctcattggccaccgcggggcccccatgctggctccagagcacacgctcatgtccttccggaaggccctcgagcagaagctgtacgggctccaggctgacattaccatcagcctggacggcgtgcccttcctcatgcatgacaccaccctgcggcgcaccaccaacgtggaggaggagttcccggagctggcccgcaggcctgcctccatgcttaactggaccaccctgcagagactcaacgctggccagtggttcctgaagactgaccccttctggacagccagctccctgtcaccctccgaccacagagaggcccagaaccagtccatctgcagcctggcagagctcctggagctggccaagggcaatgccacactgctgctcaacctgcgtgacccgccccgggagcacccctaccgcagcagttttatcaacgtgactctggaggccgtgctgcactccggcttcccccagcaccaggtcatgtggctgcctagcaggcagaggcccctggtgcggaaggtggctcccggcttccaacagacatcaggctccaaggaggcagtcgccagcctgcggagaggccacatccagcggctgaacctgcgctacactcaggtgtcccgccaggagctcaaggactacgcgtcctggaacctgagtgtgaacctctacacagtcaacgcaccgtggctcttctccctgctgtggtgtgcgggggtcccatccgtcacctctgacaactcccacaccctgtccaggtgccttccccctctggatcatgcccccggacgagtactgtctcatgtgggtcactgccgacctggtctccttcaccctcatcgtggg

SEQ ID NO: 189073 - DNA, 2112 bp, Homo Sapiens
ttggcttgagggcagttggtgcggtcgggttggttcttacaccccggcgggagcgcccagacaagccgagctgactggacttctccggccggccccattcccgaggctgcggcagcttcggttgccgagaccgaccggagaggagcccgagtcccggcctctgggggattcgctctctgcagaccagtgggaccccgaaacttgaacgcaatctccagcccccttttttgccttcctttgtcacttgcccgggtttctcccaacgtgttcttttttttcctcttcattctccctccttcgaaggacacaaaagtggcttccgcggaaagatttggaggcggtgggagcttttctccccggagagcgactgtgtagaaaggatttttgggaagccgctttttaacacctctgctctccgtcccccaagcctctgtgtaatcctctgaggagaaaagcccatagcttgaaagttcgggggcattttgttgtgttctgtaggagagagggggaggaccctgttcgggtagtttggccggactggtactggccgttggaaaacccgaagtacatttccgtgtggaacttttgcagatatatatttttagatttttaaataccagataaaaaatatatgccttctatatatctcctggcgacctgcccctgacagcgcgatgtacaatacggtgtggagtatggaccgcgatgacgcagactggagggaggtgatgatgccctattcgacagaactgatattttatattgaaatggatcctccagctcttccaccaaagccacctaagccaatgacttcagcagttccaaatggaatgaaggacagttctgtttctcttcaggatgcagaatggtactggggggatatttcaagggaggaggtaaatgacaaattgcgggatatgccagatgggaccttcttggtccgagatgcctcaacaaaaatgcagggagattatactttgactttgcggaagggaggcaataataagttaataaagatctatcaccgggatggtaaatatggcttttctgatcctctgacatttaattccgtggtggagctcattaaccactatcaccatgaatctcttgctcagtacaatcccaaacttgatgtgaagctgatgtacccagtgtccagataccaacaggatcagttggtaaaagaagataatattgatgcagtaggtaaaaaactgcaagaataccactctcagtatcaggagaagagtaaagagtatgataggctgtatgaagaatatactagaacatcccaggaaatacagatgaagaggactgcaatagaagcttttaatgaaacaattaaaatatttgaagagcagtgtcacacacaagaacaacatagcaaagaatatattgagcgatttcgcagagaggggaatgaaaaggagattgaacgaattatgatgaattatgataaattgaaatcacgtctgggtgagattcatgatagcaaaatgcgtctagagcaggatttgaagaaacaagctttggacaaccgagaaatagataaaaaaatgaatagtatcaaacctgacctgatccagctgcgaaagatccgagatcaacaccttgtatggctcaatcacaaaggagtgagacagaaacgcctgaatgtctggctgggaattaagaatgaggatgctgatgagaactattttatcaatgaggaagatgaaaacctgccccattatgatgagaaaacctggtttgttgaggatatcaatcgagtacaagcagaggacttgctttatgggaaacctgatggtgcattcttaattcgtgagagtagcaagaaaggatgctatgcttgctctgtggtggccgatggggaagtgaagcactgtgtgatctacagcactgctcggggctatggctttgcagagccctacaacctgtacagctctctgaaggagctagtgctccattaccagcagacatccttggttcagcacaacgactccctcaacgtcaagcttgcctaccctgttcatgcacagatgccctcgctttgcagataaagaggaagtgggaagagaggtggttctctggcatttttttctacagttttta

SEQ ID NO: 189074 - DNA, 2214 bp, Homo Sapiens
ttggcacagccttcatctgcgccctggggccaggactgctgctgtcactgccatccattggagcccagcaccccctccccgcccatccttcggacagcaactccagcccagccccgcgtccctgtgtccacttctcctgacccctcggccgccaccccagaaggctggagcagggacgccgtcgctccggccgcctgctcccctcgggtccccgtgcgagcccacgccggccccggtgcccgcccgcagccctgccactggacacaggataaggcccagcgcacaggcccccacgtggacagcatggaccgcggcacgctccctctggctgttgccctgctgctggccagctgcagcctcagccccacaagtcttgcagaaacagtccattgtgaccttcagcctgtgggccccgagaggggcgaggtgacatataccactagccaggtctcgaagggctgcgtggctcaggcccccaatgccatccttgaagtccatgtcctcttcctggagttcccaacgggcccgtcacagctggagctgactctccaggcatccaagcaaaatggcacctggccccgagaggtgcttctggtcctcagtgtaaacagcagtgtcttcctgcatctccaggccctgggaatcccactgcacttggcctacaattccagcctggtcaccttccaagagcccccgggggtcaacaccacagagctgccatccttccccaagacccagatccttgagtgggcagctgagaggggccccatcacctctgctgctgagctgaatgacccccagagcatcctcctccgactgggccaagcccaggggtcactgtccttctgcatgctggaagccagccaggacatgggccgcacgctcgagtggcggccgcgtactccagccttggtccggggctgccacttggaaggcgtggccggccacaaggaggcgcacatcctgagggtcctgccgggccactcggccgggccccggacggtgacggtgaaggtggaactgagctgcgcacccggggatctcgatgccgtcctcatcctgcagggtcccccctacgtgtcctggctcatcgacgccaaccacaacatgcagatctggaccactggagaatactccttcaagatctttccagagaaaaacattcgtggcttcaagctcccagacacacctcaaggcctcctgggggaggcccggatgctcaatgccagcattgtggcatccttcgtggagctaccgctggccagcattgtctcacttcatgcctccagctgcggtggtaggctgcagacctcacccgcaccgatccagaccactcctcccaaggacacttgtagcccggagctgctcatgtccttgatccagacaaagtgtgccgacgacgccatgaccctggtactaaagaaagagcttgttgcgcatttgaagtgcaccatcacgggcctgaccttctgggaccccagctgtgaggcagaggacaggggtgacaagtttgtcttgcgcagtgcttactccagctgtggcatgcaggtgtcagcaagtatgatcagcaatgaggcggtggtcaatatcctgtcgagctcatcaccacagcggaaaaaggtgcactgcctcaacatggacagcctctctttccagctgggcctctacctcagcccacacttcctccaggcctccaacaccatcgagccggggcagcagagctttgtgcaggtcagagtgtccccatccgtctccgagttcctgctccagttagacagctgccacctggacttggggcctgagggaggcaccgtggaactcatccagggccgggcggccaagggcaactgtgtgagcctgctgtccccaagccccgagggtgacccgcgcttcagcttcctcctccacttctacacagtacccatacccaaaaccggcaccctcagctgcacggtagccctgcgtcccaagaccgggtctcaagaccaggaagtccataggactgtcttcatgcgcttgaacatcatcagccctgacctgtctggttgcacaagcaaaggcctcgtcctgcccgccgtgctgggcatcacctttggtgccttcctcatcggggccctgctcactgctgcactctggtacatctactcgcacacgcgttcccccagcaagcgggagcccgtgggtggcggtggctgccccgggcctcctcggaga

SEQ ID NO: 189075 - DNA, 838 bp, Homo Sapiens
  misc_feature (622)..(667): n is a, c, g, or t
ccaactttgtacaaaaaagttggcttggaaagtctctcttctgaacctggagcctgaatacattttcagagccaaattacaagtgggtgaagacatgctacaactactatttttagcaatgtttttaaatttgtgtctattggggtgggaaggggagtgaggccctaaagataggaattcactgatagctgaaatagatacaagcctaggagccccagcccccttttcttgaccatatcacaagtgattgaagcccagtgaattagtcggttagaattcgttctacaacatgatagaacttttcttactagcttcagaaatgcacattgatttgtgctatgatgggtggtgtttgtaacaatcactgttttataggcttatgatctgagcaaaatgtgaactcagtatgtttactattgctcttacttgaaaactttttttcaaaaaaagcacaaattaaagtagtaaattcatatccatagatagttcattcattcaacaaatatttaccaagttcctaatataagtgaaggaccacttctcatattagattactaagtcatttgtatgaatatgtgtggcagtgaagagaacaggtctttcaaaaagcatttgattatcnnnnnnnnnnnnnnnnnnnnnnnnnnnnnnnnnnnnnnnnnnnnnngttaatcatagcaggatatgacaactcttatttgaattgattttttcatctaatgtaataatggaagccaaagtattcatatttcttaagatagccctaaatgtactcttgaacttcttactggaacaatgtttgatactctagtatgtaagctgtatttatgtatattta

SEQ ID NO: 189076 - DNA, 1512 bp, Homo Sapiens
gggagttgatgtagccacagttggggctgatgcttagcacgacagggtcttctctgtactggaaggtccaggaaccaggtacctgggcaccccccacctgcaggctaagggggacactggccaccgtggccccagggggtgtggcacataaaagctgcccctcactgacccgtgctagcagacactcagtcccattgaccagcacagcccggctggtgcctacagacagactctggccttcaagagtgagacaggtgcctcctgcccgtgggccaaagaggggttgcactgctatcagcactggctcctaagaggacatagaggtggcttaggcaggtcctccactccaagcccctcccttcccgtaccatgcactggccaagggcacagacagggcaaggtagcctcaccatgaaagagaagcctctcagcacggaggtgccgtctacccggaagtgcttgcccggtggcatgttagtcacggtgaggctgacgttggtaggccccactgcctgggtgcccaagggctccagttcacactcaaactcctctacaaagtctttccggggcactggtctggggcaccaggggaacccctgaggtcagccaggaattacacaggcctagatgcatgcctgccacaagccacagggctcctctgagccagagaatggcatttctccacccatgcctccctccatggaaggaaggttctggtggggcagagattaaccttggctggtccatgagtgaacagacaggaagggcacatgaaagctcaaaaagggacagagacctttttgactctcaaaaagcagtcagaaccactgcagcttcccccatccccccttgcctctgataagcagagaacagggtctcatggggaaggggctgcttggtttcccccttcagggaaagggaggggagggaccagattgtacctgagttttgagctgtccttgggcagtggccggcagggactttggcccacagtgacctgatgggttccctcaggcaccagaccagaagggtgaaggtagaagttggagccacacagggtcagccttgtactgccccttagaggtccactgtgggggtggaactcagtaagcttaggtgggcagtggtcctgttgccaggagccaggacactccttctgctggccgcacatgttcccacaccagccacagcccatgaaatgccatgcccttaggcaacgcccacaggtcaggaagtggcggcagccagggcctcggataggtacctggaaaacctggtccccagaggcaaagagtaggtggtccccaagacgactgacatcccgctgcacgggctgcccactgtcacccagtgagaagttggacacatacagcaagtagtttagtgacctgaccagctccacctgcaggatacgcccatccattgtgcccatgtgtgccactgtgacgttgtcaaggcgtgtcacatacaatgcagtgacctgtactggtcccaacagcccattgaatccaa

SEQ ID NO: 189077 - DNA, 1525 bp, Homo Sapiens
ttggagaaacgtaagcataggtctcccactccaaagagcaaacgtaaatctaaggacaaaaagcgaaagcggtctcgaagtacaacaccagcccccaagagccgccgggcccaccgttcaacttctgctgactctgcttcctcctccgatacttcccgcagtcggtctcgaagtgctgcagctaaaactcatacaactgccttggctgggcgaagtccttcccctgcttcagggcgacgcggggagggagatgcgcctttcagtgaaccaggtactaccagcacacaacggcctagtagcccggagactgctacgaaacagcctagcagcccttatgaagacaaagataaagacaagaaggagaaatctgcaactcgacctagcccctctccggaaaggagcagcacaggcccagaaccacctgctcccactccgctccttgctgagcgacatggcggctccccacaaccccttgcaaccacccccttaagccaggagccagtgaaccccccatctgaggcctctccaactcgggaccgttcaccacctaagtctcccgagaaacttccccagtcttcttcctcagagagcagcccaccatcccctcaacctaccaaagtttctcggcatgccagctcttccccagaaagtcctaaacctgctccagctccagggtcccaccgagagatttcttcttctcccacatctaagaatcgctcacatggccgagcaaaacgggataaatcacattctcataccccctcccgtaggatggggaggtcccgtagccctgccaccgctaagagagggcgatctcggtctcgaacccctaccaagagaggtcattctcgatcccgatctccccagtggcgtaggtccaggtctgcacagaggtggggaagatctagaagcccccagcgacgtggccgctctaggtctcctcagcgaccaggctggtctaggagcagaaatacccagagaagaggcaggtctaggtcagcaaggcgagggaggtcccactctagatccccagccactaggggtagatctcgttctagaacaccagcccgccggggcaggtcccgctctagaacacctgccaggcggagatcacgatccagaactcccaccaggcgtaggtctcggtctagaacaccagcccggaggggcaggtctcggtctagaacacctgctaggcgcagatctaggacccgatcaccagtacgacgcaggtctcgtagtagatcaccagccaggagaagtggcaggtcacgctctagaaccccagctagacgtggccgctcacgctccagaaccccagccagacgtggccgctcacgctctagaaccccagctagacgcagtggtcgctcacgctccagaacaccagccaggagagggaggtctcggtctaggacaccaagacgaggaagatcccgcagtagaagattaggtagaacgttgaagatctcactctagaacacctcaaaaataggcagatctggctcatcttcagagcggaaaa

SEQ ID NO: 189078 - DNA, 2053 bp, Homo Sapiens
ttggggccaagcagacccgcagccttgctggagctgctgcatgaactctacaatttcctggccatccaagctggtaattttgagtgtggaaatccagagaatctaaaaagcaaatgcattcctgttatggaagcccaagaatatatagccaatgtgaccagcagctcctccgccaagtttgaagccgcactgacctggatactgagcagtaacaaggacgtgggcatctggttgaaaggagaagaccagtctgaattggtgacgactgtggacaaggtggtctgcctggaatctgcccacccccgcatgggtgttggctgccgcctgagccgggccttgctcactgctgtcaccaacgtgctcatcttcttctggtgcttggcttttttgtgggggctcctaattctcctaaaatatcggtggcgaaagttagaagaggaggaacaagccatgtatgagatggtgaagaagattatagacgtggtccaggaccattacgtggactgggagcaggacatggagcgctatccatatgtaggcatcctgcacgtgcgcgacagcttgatccctccacagagccggaggcgcatgaagcgtgtctgggaccgagctgtggagttcctggcctccaacgaatcccggatccagacggagtcccaccgcgttgcaggagaggacatgctggtgtggagatggactaagccctcttccttctctgactcagagcgataagccccgggcggggacttgttcctggtcagcctgtcccaggacagcccactccagaggcacaggagggtcaccaggcctgcggtgctgaattcacacttgccttgactttcagtctcgtcctgacacgattccaaaggtctgccatactcttcagaggagttcggctcgcaggaaaatgtgggcttcctttaaagggagggggagaagccagggtgatagcccagactctgccctgttgtgctggcagaaacggggagaagggttgagttttcatgaatagaaaacaagagcagcagctgtcaggcccagctgacaagcgtggggctggtgggctggggcatggccacgccagggagtctgtcacctgggaggtggggcagggatggtgtttcgggtggcgggatggggagcagcttggtccatgtgccttcagggggttgttacttgagagctccagggtgaagggagaaagcctgtgctctggctggctgggcctctatcctgaagagggaaggtgctagaaattagaacaagtgactgtaggggggaccgtctagaaacaccaggcccagacacacggtccctcaggtcaggaggagtgagcagccggcacagcctcctgggaggatcccgaagtagggactggggctgagagcagagaggagggtcgggcagccccagggcgggcgggcccgcctcagtgttgcttctcacagaagctgcgactctagaccaggcctgcagccagaacgccgattccgggagcttgggagccctgcgtcagggcccagagcctcgcacttgctgtgtgcgaagatcgccttgctttactgtgaccacagccccgacgcggggctgtttaacaagaacttcagcgcagccggcgtttctgttaccccggccgcggctcttggcggcgggagaggcgcagtggctgcaggctgccccctgccggccacaagggagcagcgtccgcgccgccgcccaccggccctcccgccagctcctcagcctgctccctgggaggcaggctccatatgcaccccgacggggggccttattaagtgcgagaagcctctccagcgagtcttccccgtgtgtcctcatctgcggcaggcaggagagggggagcaaacaggaaattccacagctgcctccagaaacattaaccacccctctctagtcttactggtattttttgtttccttaataaagctccagtctccctcatttgagcaatactctcatttcctctgatgtctggatgatcggcagggccgaatctgagcactggccccgtggtgaggccatgttctcataa

SEQ ID NO: 189079 - DNA, 1105 bp, Homo Sapiens
ttgggttattactttaaacaaaatgcaagtatggggggattgtttataaagtttgggtaatttataacaaaatttgctaaggtttgctaaaaattcatttttctgttctatatattacatttttaacataattttacagttcaattttatgatggagcctcttacagaaacattaacaaaatgcaggaatctgccacatttcttttttagtataacttaatagcttaattaccattttattttttatacttcttccattattaatctttaaatcatgatcctaattagctgtccttactttaacttgatctaattattgcttcctttcttattactttcctaatttttctatattttaaaaactacagtttccatgataaaaggaaaacgttttgatttatagtaccaagtgcttaaacacaaggatagtgttagattttcgagtgactttcctttttgcattttttggcagtaaaagccaaacgttgtatttgttcttttcagagttgtccagcccttttttcctttgtccaaaatgattctaaatagaatctaataaaccaatgtagcattatttttttctaaatgaagccccaaaaaagaaaagtgccttgcatcatttaaaaaaaataattaaatcctcatggcctctaaattagtatgtagaacactgaaaagttcttaacatttttgtgtaatttcctttctttttaaaccataaattagtttaaactgaaagtacgaggctggaagaaatattagtaaattatttggaatatagaatgtttactctttctttttatgttgtcttaatgattctgtgagattgttccggctcaaacagaagcttttctttggggaaggtgatttgtgggagactctagtgtattttaaattagcattttaatccattcttgacattcagttagtccagatctgccccataatttgctttagtaaagtcacttttatggatttttggctatgttttagtttgtgtgtataaaagttctaagaaaacatttttgctattttaagtatgtaagggagaagaggagtgtttttaactttttatagttgatgactttagggtagcacaaccaaa

SEQ ID NO: 189080 - DNA, 1620 bp, Homo Sapiens
ttggcgcaaggagtcctatgactatcaggcagcctgtgcccctcagccccctggcaacctgggtgctgcaccccggggtgtctttgtgcccaccgttgcagatttccttaacctggcctggtggacctctgctgccgcctggtccctgttccagcagcttctctacggcctcatctaccacagctggttccaagcagaccccgcggaggccgaggggagccccgagacgcgcgagagcagctgcgtcatgaaacagacccagtactacttcggctcggtaaacgcctcctacaacgccatcatcgactgcggaaactgctccaggctgttccacgcgcagagactgaccaacaccaatcttctctttgtggtggccgagaagccgctgtgcagccagtgcgaggctggccggctgctgcagaaggagacgcactgcccagcggacggcccggagcagtgtgagctagtgcagagaccgcgataccggagaggcccgcacatctgcttcgactacaacgcgacagaagatacctcagactgtggccgcggggcctccttcccgccgtcgctgggcgtcctggtctccctgcaactgctgctcctcctgggcctgccgccccggccgcagcctcaagtcctcgtccacgcctctcgccgcctctgagcaccctgccccaccccacctccactcccacctcacccggcctcttcgcctttcccaccctcctgccccacactccccgccttagagcctcgtccctccctcactgaaggacctgagctggccaggccctgagagtctggtctgcgccttgggatggggagtcccaaagcgggacgccgcaggtgtttggcacccaaatcacatctcacctccgaactgttcaagtgtccccagacccttcttgcctgctgggctccccccagtgggatgggacagggaggccacacgcactggtgccaaaaccaggcctctgctgccgcccttcctggaggctgcctatgttgggggggaccctgcctcagctgacccggcctctctgccccacccaagcccaaacttggtttctgtgagaatagtggaggaaggtgagatggccagtttgaagcctgtgcctcccagcttaaatcctagcaggagagaggctctggggcagcccccatgggctcctgcccctttcaggcctacagccacatccccaagcccaccaggtgtcaggatagtcacagtgataccagttcagacactaccccatatacacctggaacattgaggatggaaactggactcacattcgacataccccactgggcacacgcacaaacacacacactatggggtggggtgggtgtaggggcttacaaagccttacacagggcgaggggttggtgggagggttggcacctgcacactccatctcctgctcaccacctgcctctaatctgagctgcagcctgggctggtcctcccatttctaaagctgaatgtcaaacagtgccaaatgctgggggcagggggtgaagaaccctctgtcccacccctagccaccagtgtcttcaagtgccccctcacttctccaggtgctcattgtaaccatttctcactagtgtcaggcctcc

SEQ ID NO: 189081 - DNA, 931 bp, Homo Sapiens
gattcaaatgccattttacaggacaggagccctgtcagtttacagctttttggcacagtcgggacaatacacttgctcctggtggaaaacaaagcgcttgttggccagattcacggagcattttttgcagtggaagcagtagtcgtgccaggattgtccttcataggccaccacactggagcctttaccaaacccagtgatggggttcttgcatccagcacacttcttggccacaaagttcttgtagcaatccacgcagtaatactggtcctccacagcggtgaaacgctgcccagccagcttcttagagcaggtaacacacacaaagcaatcggcatgccagggctgatcctggtaagtgattcctccagatgtgatggccttgttgcacttcacgcaatgcttggcaaacttggtctcatggcaagtcacgcagtagaagtcctcccctttagggaagaagcttccagtcccgatgacttgcttgcagttactacaggtgaagcagtctttgtgccagacggtccccttgtactccacgttttgatctcctgccacaatggccttgaagcaccccttgcacttgggggagtcctcccgagtggtgcacttgttgcacaggatcttgttgtccttggccacaaaggtctcattggccaaggggtgaaggcacttggcacagcggaagcaggtgtcatgccagaagcggttcttatagtgcacctccttggagtccgcaccgatgggcttgcggcattccacacaggtgttggcacagaacttgtcaaagcatttcaggcagcagtggtggccatccttttgcacatacttcttcccctgcaagggatccctgcagtagtggcagtcaaacttctccgccatggtgcccaccttgtagctggagggaccgcagctcttccacccaacccaa

SEQ ID NO: 189082 - DNA, 949 bp, Homo Sapiens
ttggcttgatgacaacgtggtccctccagctacaaggtgggcaccatggcggagaagtttgactgccactactgcagggatcccttgcaggggaagaagtatgtgcaaaaggatggccaccactgctgcctgaaatgctttgacaagttctgtgccaacacctgtgtggaatgccgcaagcccatcggtgcggactccaaggaggtgcactataagaaccgcttctggcatgacacctgcttccgctgtgccaagtgccttcaccccttggccaatgagacctttgtggccaaggacaacaagatcctgtgcaacaagtgcaccactcgggaggactcccccaagtgcaaggggtgcttcaaggccattgtggcaggagatcaaaacgtggagtacaaggggaccgtctggcacaaagactgcttcacctgtagtaactgcaagcaagtcatcgggactggaagcttcttccctaaaggggaggacttctactgcgtgacttgccatgagaccaagtttgccaagcattgcgtgaagtgcaacaaggccatcacatctggaggaatcacttaccaggatcagccctggcatgccgattgctttgtgtgtgttacctgctctaagaagctggctgggcagcgtttcaccgctgtggaggaccagtattactgcgtggattgctacaagaactttgtggccaagaagtgtgctggatgcaagaaccccatcactgggtttggtaaaggctccagtgtggtggcctatgaaggacaatcctggcacgactactgcttccactgcaaaaaatgctccgtgaatctggccaacaagcgctttgttttccaccaggagcaagtgtattgtcccgactgtgccaaaaagctgtaaactgacaggggctcctgtcctgtaaaatggcatttgaatctcgttctttgtgtccttactt

SEQ ID NO: 189083 - DNA, 1599 bp, Homo Sapiens
ttggcttaaatataagactgtgaatcctaacagaattgcctattcttatataagtgtatataacagtatagtaagttttagaaatttaaggtattactatggtattcttgaaataagattttagataaatgtcatattaatcttgttctttttctgtctcttcatgtagaagttatatgagtgtttcttctgaagaaccaaagctgaaatttaatgagaatttctacaattaatggaattcctttcctgctataaaggagcatcccctccacccgttttctagagttcttgaccatcattttgaaaagatttattaaaactagctaaagacaacagactggatagcttttctaataattttcatcaataggaaaaaagaaatacgtctcattcttcaatactttaaaatggctttttccagtgtgctccttcttagcaatcaatatttttctgcattctttaaaagacaagagaatttggttataaaagaaatgggctgactaggcatgatttttttggtcttaaaagcttaacatgtaaaattggcaaaaaaaatttttttaccttttataatacttgaaaaataagtacctctttgttctacaagtagaatgaataggagaagagtttaagcctgtttttttaaaatattattgcaaagagctctatttgtagaagcaaattataggcagattaccaggttcttataaatacagcttgtacatggacattctgcaaacccagctgtcacatttttcttgcaactccttttgcaaaagcagactaaaatgttttaaaatgtgaaaaaacattattttttcaaagcaagaaaataatttactgccctcttacataatgtatttataaagtttttccagataaactaatcaaataaattagaataatgtgacaacattacaaatttaatttgttagctgcattccttctgatgttaccacgatagaatgttactgatgattcagggctatttctgaagtctgtatgttgctgctgtccccagtgatggtggacttatctttgccttacctgatcacaaattatgttggggaaaataaagatttaatatttctttaaatagaaaaagaatttggttttgctcgtttaagagcaatgagaaaatgatggaatgttgactgtgtttggcacacaggacacggaccttcatggaagtccttgctctgcgtggcatctgtcagcttttcacctttcattcttattcttcacttttgctgctgagcctagctgtacaaacttgcactttcatttgctaatataaattcagttttattttaccattttagagactactaatgattaaatgtagaaggagagggtgcacatgtttttatgtggagtgtttaaaagataaatttataccactgtaatgtgcagcttttattaaaagagaaattgggttgaactgctacgttgaatgagagacttcatctattggactattttttttaatccaggcatatggtctttagtaatgggcttgtaatttgtgaaaacataatttgggggtttttcctgttttcagttgtccatgtacacttagtcattatattagaaaagaaa

SEQ ID NO: 189084 - DNA, 1285 bp, Homo Sapiens
ttggcgcctcttcagagcccccaggtggtgaggaccccccactggacacagatgttcttgtccctggagctcctgagcgccactcgcccattcagaacctggaccctccactgcggccagattcaggcagcgcccctcctccagccccccgttctttttcgggggctcgaatcaaagtgcccaactactcgccatcccggaggcccttggggggtgtctcctttggccccctgccctcccctggaagtccatcttcactgacccaccacatccccacagtgggagacccggacttcccagctccccccagacgttcccgtcgtcccagccctttggctcccaggccgcctccatcacggtgggcctcccctcctctaaaaacctcccctcagctcagggtgccccctcctacctcagtcgtcacagccctcacacctacctcaggggagctggctccccctggcccggccccatctccaccaccccctgaagacctgggcccagacttcgaggacatggaggtggtgtcaggactgagtgctgctgacctggacttcgcggccagcctgctggggactgagcccttccaggaagagattgtagccgctggggccatggggagcagccacgggggcccgggggacagctccgaggaggagtccagccccacctcccgctacatccacttccctgtgactgtggtgtccgcccctggtctggcccccagcgctacccctggagccccccgcattgaacagctggacggcgtggacgacggcactgacagtgaggctgaggcggtgcagcagcctcggggccagggcacgcctccttcggggccaggagtagtccgggcaggggtccttggggctgcaggggacagggcccggcctcctgaggacctgccatcggaaattgtggattttgtgttgaagaacctagggggtcctggggatggaggtgctggccctagagaggagtcactccccctggcgcctcccctggctaatggcagccagccctcccaaggcctgaccgccagcccagctgaccccacccgcacatttgcctggctcccaggggccccaggggtccgggtgttaagccttggccctgcccctgagccccccaaacccgccacatccaaaatcatacttgtcaacaagctggggcaagtatttgtgaagatggctggggagggtgaacctgtcccaccccagtgaagcagccaccttttgccccccaccatttccccacggctcccacctcctgggattctgccccc

SEQ ID NO: 189085 - DNA, 1726 bp, Homo Sapiens
  misc_feature (1396)..(1416): n is a, c, g, or t
gagaaaaaaacctttcagataaaatgagacttgaagtcatacaaattttatacttgatctaaattaagcaagaaccctcaactctgtaataagtcgaaatacaagatataaggcaggaaacaaggcaagggaaaacacacacaggggcatctacttgctggaaacatgttgggagagaggcaggagcaggcatggctttgtttcttcccaaactgcctgatgtcaaaagtacgtcaaaaggagcctcacagtcccaggagagcatggtcccaggtattgctgtgacaggtggtgaccctggagccagatctggaaggccttcctgggggctgcccagggaactcacccatgaatccagaagcacttaacactggtggtggtgatttgtcacatatggcagcaagcagccattaaggctgtaggaggagagatgtgaaaagcaagatgcgtttgctcggtggcatgtgggcaggctgactgtggctctgcaggctgcagcaggtccagccggtgacccaacagggcatcgggcaacctggcaggtcacaagtcaatcatttcaccctcacgtcgagcagcacagcactcagtggctctgacaacagatgtagagaaggagattacaccactttaatgcaatgatgctgaagatgtaaaattaggaagagacgttcatgttctctgtacaatacatccatttacagaatcagccagtactgtgtacaacatataaatacatgataaaacattagaggtgcatagagcatacttacagaagccaaaaagttcactttatacatccaagaataaagagttaaaaatataaaaataagaaacacacactgctttgaaatgtaaaatgactttcacatacacaggtgcgtggagatgcccactcccatagggtccaaagtgacagggaggatgtcaagcagaggattcacctgcaaacatctggacggctgactcacaaggtctacagatggcattttcataggaaagacaaccctattccccaaccccattgtccaagcagagctattcaaggttccaaatgatcctgtgggttagtggatcacactgagacagaaaagttccaaatttgcttcagcaacagaaccaaggtcaaacttgctccgtcaactggcaaatgactcaactgtgaccctgaggtcagcaggtgcaccagccccctggtgggcaatgccaggagttactttaaccctgtgctggcttctttcctggccatcaactccccaaagtagcagaagaaaagatggcagggagggggtagtggaagactggcatttctacttagttcaggtaggttaactcccttggtggagaatgcaaccttcttgcttcagtttcaagtccctctgggagtcaggcagtnnnnnnnnnnnnnnnnnnnnnactccgtgccacatcaggctctgtcttgcaggagagctcaggctggctggccttgggcagcccaatgggttatacccaggaaacccctccagcaagaccagaagggtcgccaagtgacagagggctttagcagtgtaaattttgggggaaggcaagagtgctcctgcctaaagagtattatatcaatgatattctgtatacagatttaagatcaatcattatcaaaatacacacactaaatatacaatgtttcccatggccataatttattatctcaccacaaggcacaatacacagagctttgagccaa

SEQ ID NO: 189086 - DNA, 1186 bp, Homo Sapiens
ttggctttctgtaactctggaaggtggttataaatggacaaaaaggctggataggagctgtctcgtccgcagtttccagctattttcttacggtatgttctatagagattcattcatggacttaataagagccattaggaccatttccatcccgggaacagcagcacagtcaggagcaccgctgccaccctgtccaggtgtttgaccttcgtggatccccacgacctcagagcccataggcagctcacgtgggatttcatgaatcgaggccttagctcctcaaggatacacatttggggaaaggaagccctacgcgatgccaaagatagtgaacaccctgtggtctgcttaatttacaggacaacaaaaagatgaagaaatctctagaggaagaacagagagcccgcaaagacctggagaagctggtgaggaaagtcctgaagaacatgaatgatcctgcctgggatgagaccaatctataagggacgtcctcagttctttctgttgaagaccagttctgaggtgaagctgggcacccctgacccaagtcggggtgcactcaggaccacagggcagggctgggtggggcgccaccttgctctctgtatatagaaaagctggagcttattctgcgaatggagacgatcaaaccatgactgatgaatccagacaggagggattgactctgaggacctgagctacataatccactctgtgaacatctcagttacctcattctgcaataagttcagtgactgactaaaagtcttgtttttccagactttgaattgaatatataaatattatatatacatgtttcttgtaaatatcccattttgaatgcatacctgtggtggttctgtccgggctaatccccatgctagaatgtcctttccagctacgtgaataagaagtcccatgcccgcacccaccggaagcagaagcctggtggatgcctggttcgttccgcagcaccagggcctccaccgtgctgtggcagcaccccccatgtcggtatttctaaataaccttatttatacctgcagagatacacttcagtcccattcagaagtcttctcttaaagcagcattacagtcccagacctgcgggtttctgagggcagcttgctggctgacagactcagtcttgacctcaaggaagagcccatacggcactgccgcatcc

SEQ ID NO: 189087 - DNA, 1370 bp, Homo Sapiens
ttgggtctctctttcacagaaaaggtattaatgaagaaagctgtttctctttccttcgctttattgatatatctccagcagaaatggcaaaccttatgcttcagggacttttggccagatggttagctcttttcctgtctctgaaagcctcctacaggctccatcagctacgctcctggggagcgccagaaggggagagccaccagagatacctgaggaacaaggatttccttcttggggttaattttccactctcctttccaaacctttgcagctgccctttgttaaagtctcttgttttcagcagccactgtaaagcagtgagtggctactcagaccaggttgtccatcagcggagatcagctacctcctcgctgcgtcgctgcctgctcactgagctgccatcttttttgtgtgtggccagtccacgagttaccgcagtgccattggattcttactgcaatgaccgaagtgcagaatatgaaaggcgagttctgaaggaaggagggagtctggcagccaagcagtgtttgttgaatggggcccctgaactggctgcagactggctaaatagacgatcacagttcttcccagagccagctggaggtctgtggagcatcagacctcagaatggctggtctttcatcaggattccaggcaaggagagcctcatcactgacagtggaaagctgtatgcccttgatgtcctgctgactcggctcaagtctcaagggcatagggtccttatctactcccagatgaccaggatgatagacctactggaggaatacatggtttacaggaagcatacctacatgaggcttgatggctcatccaagatctcggagaggcgagacatggttgctgattttcagaacaggaatgacatctttgtgttcctgttaagcacacgagctggaggactgggtatcaatctcactgctgcagacacagtgattttctatgatagcgactggaaccccactgtggaccagcaggccatggacagggcccaccgcttagggcagacaaagcaggttactgtgtaccggctcatctgtaaaggcaccattgaagaacgcattctgcaaagagccaaggagaagagtgagattcagcggatggtgatttcaggtgggaacttcaaaccagataccttgaaacccaaagaggtggttagtcttcttctagacgacgaagagttggagaagaaactgaggctgcggcaggaagagaaacggcaacaggaggaaaccaaccgagtgaaagagcgcaagcggaagcgggaaaagtatgcagagaagaagaaaaaagaagatgaattggatgggaaaaggagaaaagaggtgtgaacctggtgatcccatttg

SEQ ID NO: 189088 - DNA, 2021 bp, Homo Sapiens
tacaaaaaagttggatccatggctcgtctctaggacaatggcgaggtatatggctggggttacaatggcaacggtcagctgggcttgggaaacaatggcaaccagctgacccctgtgagagtggcagctttgcacagcgtgtgtgtgaaccagattgtctgcggttacgcacatactctagcactaacagatgagggcttgctgtatgcctggggagctaacacatatgggcagctgggaactggcaataaaaataacctgctaagcccagcacacatcatggtggagaaagaaagggtggtagagattgcagcctgtcactctgcccacacgtctgcagccaagacgcagggtgggcacgtgtacatgtggggccagtgccggggtcagtcagtgatcctcccgcacctcacccacttctcctgcaccgatgacgtgtttgcctgctttgccactcccgccgtctcgtggcgcctcctgtctgtggagcatgaagactttttaacagttgcagagtcactgaagaaagaatttgatagtccagaaactgctgatctgaagtttcgaattgatggaaaatatattcatgtccataaagctgttttgaaaatcaggtgtgagcattttcgatccatgttccagtcgtattggaatgaagacatgaaggaagtgatagaaatcgatcagttttcttacccagtgtatcgtgcctttctccagtacctctacacagacacagtcgacctgccgccagaagatgctataggtcttctggatttggcgacatcttactgtgaaaacagactgaaaaaactttgtcagcacattatcaagagaggaattactgtggagaatgccttttcgctattttctgctgcagtcagatatgatgcagaggatttagaagaattctgctttaagttttgcatcaatcatttgacagaagttacacagactgcagcattttggcaaatggatggccctctgctaaaggaattcattgctaaagccagtaaatgtggagcctttaagaactgaagcgcaaggctgctgggttctgtgtgagtgctctggggcactgttgaggatgtgtccagtttgtgctctacgggtgatgtgattctgcaggtaaaagaccatcaggttgtttttttccacatctgggacacagttgtttgtgtaggaacataacaagggtgtacggcttttcttgagcccattttaaacaacccttgtttccagataagtgtattttaaatgtgacctttcgtaaatttgggctggaacatgtaaaagggtgaaagttagtcgtttttggtcttcttttcatttttgattagaggaacttctgaacttggaaaggggaagttggcagcaactctcctgggccacgtatcaacaatcttctgacagcaggagcagtgatagttggggaattgtgagatgaatggagaggccccatcgtgaattaaagatgctgacctggggattgttaagtgctgccttagttgctagtttagtagccttactgtgaaggaataattaagattgtttcagacttttgtttgtgtgcttgcgttgatgacttttttaacttcaagataaatcaaagtaataagtttaacgtatattaaacctgttgaaatgataattatgtaaagataaatattctaggttagtcaagatttctcttaagatttaagtgcataaagaatagtaatttagaagtatccgtgaaaagttgataatgaaagaaatttgatgaaggtgaatattttataaattagaatctccactacttatccaatggtgttttatttcattaaggtagaacttgagaactcaagtttaaattgtcccccaccaccttcttctataaatgcaaacttaagaggaaaataatgacatgtatagtatactcttgccttcctaaattatgactgctgaatcatcatatctactatatatgactggaagaagtggttcttcaagtcaaccctcttacagacttagtggaattt

SEQ ID NO: 189089 - DNA, 962 bp, Homo Sapiens
aaagttggagtactacatccatgacctatctgaccttattgatcagtgttgtgacttaggctaccatgcaagtctgaaccgggctctacgcaccttcctctctgctgagttaaacctggaacagtcgaagcatgagggtctggatgccatcgagaatgcagtagaaaacctggatgccaccagtgacaagcagcgcctcatggagatgtacaacaacgtcttctgcccccctatgaagtttgagtttcagccccacatgggggatatggcttcccagctctgtgcccagcagcctgtccagagtgagctggtacagagatgccaacaactgcagtctcgcttatccactctaaagattgaaaacgaagaggtaaagaagacaatggaggccaccctgcaaaccatccaggacattgtgactgtcgaggactttgatgtgtctgactgcttccagtacagcaactccatggagtccgtcaagtccacggtctctgaaaccttcatgagcaagcccagcattgctaagaggagagccaaccagcaagagacagagcagttttatttcacaaaaatgaaagagtacctggagggcaggaacctcatcaccaagttacaagccaagcatgaccttctgcagaaaaccctgggagaaagtcagcggacagattgcagtctagccaggcgcagctcaactgtgaggaaacaggactccagccaggcaattcctctggtggtggaaagctgtatccggtttatcagcagacacggactacagcatgaaggaattttccgggtgtcaggatcccaggtggaagtgaatgacatcaaaatgcctttgagagaggagaggaccccctggctggggaccagaacgaccatgacatggattccatagctggtgtcctgaagctttacttctgggggctggaacaccctctcttccccaaggacatctttcatga

SEQ ID NO: 189090 - DNA, 884 bp, Homo Sapiens
ctttgtacaaaaaagttggcatcttctcgcgggcagtctactgtaggtacagaagtgacctctcaggtagacaacttgcagaaacagcctcaggaagaacttcaaaaagagtctgggcctctccagggtaaggggaagccccgggcttgggctcgggcctgggcagctgccttggagaattctagccctaagaacttggagagaagtgctggacaaagtagtcctgctaaagaaggccctctagacctctacccaaagctggctgacactatccaaaccaatcctataccaacccatctctcattggtcgactctgcccaagccagccccatgccagttgactctgttgaagctgatcccactgcagttggccctgttctagctggccctgtacctgttgaccctgggttggttgaccttgcttcaaccagctcagaactggttgagcctctcccggctgagccagtgctgatcaacccagtcctggctgactcagcagcagttgaccctgcagtggttcccatctcagataacttgccaccagttgatgctgtcccgtctggcccagcaccagttgatctagcactggttgaccctgttcctaatgacctgactccagttgacccagtgctagttaagtccagaccaactgatcccagacgtggtgcagtgtcatcagccctggggggttcagcaccccagctcctcgtggagtcagagtccttggacccaccaaaaaccatcatccctgaagtcaaagaggttgtggattctctgaaaattgaaagtggtaccagtgctacaacccatgaagccagacctcggcctctcagcttatctgagtaccggcgacgaaggcagcaacgccaagcagaaacagaaga

SEQ ID NO: 189091 - DNA, 805 bp, Homo Sapiens
  misc_feature (71)..(116): n is a, c, g, or t
ttggaccttccagaacgtggtcttcaatgtcatttatcagagcgcggcggtcttcaagctctcagtaggtnnnnnnnnnnnnnnnnnnnnnnnnnnnnnnnnnnnnnnnnnnnnnntccaccttcacctctgccttctgctctgcttcatgctgcccgaggacgctgccatggctgtggtgagtggagggagggacgccaagcagggcaggcctctcacctgccacctgggcccactgatgcctgtccctgcagctgacggcctccaaccacgtgagcaacgtcaccgtgaactacaacatcaccgtggagcggatgaacaggatgcagggcctgcgggtctctacagtgccagccgtgctgtcccccaatgccacgctggcactgacggcgggcgtgctggtggactcggccgtggaggtggccttcctgtggacctttggggatggggagcaggccctccaccagttccagcctccgtacaacgagtccttcccggttccagacccctcggtggcccaggtgctggtggagcacaatgtcacccacacctacgctgccccaggtgctgatccgcagtggccgggtgcccattgtgtccttggagtgtgtgtcctgcaaggcacaggccgtgtacgaagtgagccgcagctcctacgtgtacctggagggccgctgcctcaattgcagcagcggctccaagcgagggcggtgggctgcacgtacgttcagcaacaagacgctggtgctggatgagaccaccacatccacgggcagcgcaagcatgtgactggtgctgcggcggg

SEQ ID NO: 189092 - DNA, 837 bp, Homo Sapiens
ggggaaggtcatgggttagaagaggagatgggggtcgggaatggggggaatgttttggctggcggggtcccccctccattccctggagtttgggggaaggggaatcattaaagtgctttcagaaaatgaagaaatggtccctgcccctggagtggctggtgaccccccaaaaatctagggcccagtgaccccccccagggtctggtacattcaaggggggagccggctcccctgacgtgcaaataaaggggtccagggccctgcccagtcagcagcagtggggtaaggggttcaagccccaagcactctcctctcaaatggagaaaaggggggaggggctaggcccactcaattcctgggaaggggaagctgtgtccctccccagaagctggggacaggcacagttttgggaagaggacatgttggggaagaggatggtcacgtgatcacgaaagcatcaggggtcagaggtcacgttcccagcaggctccagtgaaatcaaaccagtaaaagcaaaagcccagggaggggaaagaggggcggcccgggaagcctggctgcagggggagagctgggtccagtgtgggacagccccagcccagggccccgtcaccagttcatgatgcagttacggttcagagtcatgaagtaaacttggctgctgcccccagagcggactgaggcaaaaaacaccttgtcattccgctcacacaggaacttgagcctctgagctcgtttgtgcatgaagaccccgtcgaggtggcccgtctccacagagcggatctcaatggctttctcaccccagcccattatctggttggagcagatgtaggccaa

SEQ ID NO: 189093 - DNA, 1180 bp, Homo Sapiens
ttggcttctgcgcgccggggccgcctctccttccgccggtgccgcggcgcctcatggaagccccggagggcggcggaggggggcctgcagcgcggggcccggaggggcagccggcgcccgaagccagggtgcacttccgagtggcgaggttcatcatggaggcaggtgtcaagctagggatgcggtccattcccattgccactgcttgcaccatttaccataagttcttttgcgagaccaacctggacgcctatgacccttacctgattgccatgtcttcaatttacttggccggcaaagtggaagagcagcacctgcggactcgtgacatcatcaatgtgtccaacaggtactttaacccaagcggtgagcccctggaattggactcccgcttctgggaactccgggacagcatcgtgcagtgtgagcttctcatgctgagagttctgcgcttccaggtctccttccagcatccacacaagtacctgctccactacctggtttccctccagaactggctgaaccgccacagctggcagcggacccctgttgccgtcaccgcctgggccctgctgcgggacagctaccatggggcgctgtgcctccgcttccaggcccagcacatcgccgtggcggtgctctacctggccctgcaggtctacggagttgaggtgcccgccgaggtcgaggctgagaagccgtggtggcagatttataccatggacacagagatcccctaaggtcctggcccaggcctgcccaaagagaagcccaggatggtcggctgcctggggacattgtcaccacgtcgccatgacggctggtccccacaggaccagctgggaggactggttgtgctgctggagaagggctggagaaggcaatggcatgctgccgctttgccagtccctagaagtcgcggtgcaagtgatggtgggagccgcgcctccagcgggcaggccgggagtgtactgtgtgcagctgaccccaggcagccacatctgcgtttgtcctttgagaggactttgactacaatacaggcatgacatcaatgaaaggaaagtcatgaaatcgatgagactgaatccctacggatttcttaaaagccagatttgtaagggagaatgaatgtgcaacgtggctgaaatctattttgtgtattaaaaggtgatacaagtca

SEQ ID NO: 189094 - DNA, 1404 bp, Homo Sapiens
  misc_feature (1046)..(1123): n is a, c, g, or t
ttggcaagaggctgaggattgcgttagagataaaccagttcacgccggagccccgtgagggaagcgtctccgttgggtccggccgctctgcgggactctgaggaaaagctcgcaccaggtggacgcggatctgtcaacatgggtaaaggagaccccaacaagccgcggggcaaaatgtcctcgtacgccttcttcgtgcagacctgccgggaagagcacaagaagaaacacccggactcttccgtcaatttcgcggaattctccaagaagtgttcggagagatggaaggtgaggcaggagagggacggagctcagggggtgcaggtgtggttttcggctaggagggccttaggcaggtagtaggcaactcatgagcttcaactttgccaccccagtgactcacctgaatatcttaagagttccaggcagacgattttaggtttttacttatataagacttcgaaagcaaaatgctgttaaggaaaatgtggtccttaaagatgatcttgtcgtctttggatgtttataggtaacaattttgctgtatttttggctcttattttatgtccacagaccatgtctgcaaaggagaagtcgaagtttgaagatatggcaaaaagtgacaaagctcgctatgacagggagatgaaaaattacgttcctcccaaaggtgataagaaggggaagaaaaaggaccccaatgctcctaaaaggccaccgtaagtttaaaataacccaaattgctccttggatttttccttcagtttattaaactctgttgcttcctttcagatctgccttcttcctgttttgctctgaacatcgcccaaagatcaaaagtgaacaccctggcctatccattggggatactgcaaagaaattgggtgaaatgtggtctgagcagtcagccaaagataaacaaccatatgaacagaaagcagctaagctaaaggagaaatatgaaaaggatattgctgcatatcgtgccaagggcaaaagtgaagcaggaaagaagggccctggcaggccaacaggctcaaagaagnnnnnnnnnnnnnnnnnnnnnnnnnnnnnnnnnnnnnnnnnnnnnnnnnnnnnnnnnnnnnnnnnnnnnnnnnnnnnntaaatggctatcctttaatgatgcgtgtggaatgtgtgtgtgtgctcaggcaattattttgctaagaatgtgaattcaagtgcagctcaatactagcttcagtataaaaactgtacagatttttgtatagctgataagattctctgtagagaaaatacttttaaaaaatgcaggttgtagctttttgatgggctactcatacagttacattttaccgcttctgatgttgaatgttcctaaatatttaatggtttttttaatttcttgtgtatggtagcaca

SEQ ID NO: 189095 - DNA, 1139 bp, Homo Sapiens
ttggcgcagatagagtctgcctcccctgcccccttctcttctggattcctcgctgcccaccctcattctcccggtggaagcctcgcaacgaagggccggagccgcctttctgctcccggaatgcttcacctgtccgcagctccgcccgccccacccccggaagtgacggcgaccgcgcggccctgcctttgttccgttgggcgtcgcggcgacggcgggaagatggcggcggcgggagccctggcggagcttcgtggagctaagcggagctgagcgcgaaaggccgaggcactttcgggaattcacagtctgcagcattgggactgcaaatgccgtggctggcgccgtaaaatacagtgaaagcgcgggaggcttttactacgtggagagtggcaagttgttctccgtaaccagaaacaggttcattcattggaagacctctggagatacattggagctgatggaggagtcactggacataaatctgttgaataatgccattcgcctaaaattccaaaattgcagtgttttacctggaggggtttatgtctctgagactcagaatcgtgtgataatcttgatgttaaccaatcaaacagtgcacaggttacttttaccacacccctcccggatgtataggagtgagttggtagttgacagtcagatgcagtcaatattcactgacattggaaaagttgatttcacagatccttgcaactatcagttaattccagcagtacctggaatatctcctaattccaccgcctctacagcctggctcagcagtgatggggaggccctgtttgccttaccatgtgcttctgggggaatctttgttcttaagctacctccttatgacatacctggtatggtgtcagtcgtggaactgaaacagagttcagtaatgcaacgattgcttacaggctggatgccaacagctatcaggggtgaccagtcgccttcagatcgtcccctcagtcttgctgttcattgtgtggagcatgatgccttcatctttgctttgtgtcaggatcataaactacgaatgtggtcttacaaggagcaaatgtgcctaatggtagctgacatgctggagtatgtccctgtgaagaaagaccttcggcttactgctggaactg

SEQ ID NO: 189096 - DNA, 1494 bp, Homo Sapiens
  misc_feature (258)..(288): n is a, c, g, or t
aaagcaaacacatcctgtccagaatcccatcaagcaggatatttcaagttcactaaaatactaaaagcacaacaagcttcgtgccatggaaaactcagtgatggtaaaaatgttactacagcgcactgcactgtaatcaacattctgcataaattaataatttacaagtacctgagcaagtagacagagcaccatagcacagcacagcactgacggcagtagctcaaagttcttatagtaatgatgttttaaacattnnnnnnnnnnnnnnnnnnnnnnnnnnnnnnntccaactggagctgaaagatagtgcaaacttctgtcttcactgttgaaaaaaggtgtcggcttctcacttaatataggcggtgtgggtggatctgggcacttggtgtggatattgtggagcaggtctgaggggtgccaggcggagcccagtctcccattgtcctggggtcctggccaaggcatgagtgagccgagttgttctggccagaggatctgcaggcagaggcttctgaggggggtttggcttacaggtcccctgggcctgcctaagtgcaggcttggctggcaggggtctggcagggacgctaggtgcacgtggagcccggtggaggggaggaagcactcgctgagttgactggggctgagggacattcaggccgttgaggggtctgctgatgtcaacattctgacactgcagcaatctcctgggattgtccttcggtgggtaggaatctggcggcttcctcatcaggccttttccaaggtggccgaggtgagcctgacagggttggaagccacggggtggccgggaagggcgcacacaccttagtttttcaatggtggtcttcttatttgtaaacagcagtcgtatcaaggtcttccttttgagataaaccacaaatccggcagcaagaagacacaggatggtcaccagaattcctatggttaaaccttggttatctgcttgccggatggggccgctgtctgtgcttcctccaaagccaaacttgtcacagaagggaggtgcccagtgggcctcgcagtggcagttcttcctgttgttgcacacccctctgccgtggcactgcattgcacactcgtgaaccccaaagacactaatattttgacattgacgattcaggcagatttttccatctgcacactttgtgcctgcaagcacaagccctgggtccggcatgtcatcgcccaagtacacgtgggtcccccggcacagaatccggcctccttgctgcagggggatgtttgtttctatggaaacggcattggtaccaatgactggccggctggcacctccttgacactggatttttccacatttagcatctctcatctcgcatttggcaaaggaactcttcgagactttgccacagttgccataaggatcacctgcagaattgactctctcaaagcagatcccaggggcaggtttagcacctggtccccagagcgggacacactgcccaa

SEQ ID NO: 189097 - DNA, 905 bp, Homo Sapiens
caaattctgatcagaaccccaacacccaggccccaaagtcagtgtacgcgctgcgcatctccgcggctttttcagtggtgggtgcaaaccacaggcacctcccggactccttggaggtgctggttccgggctgagcctagtcccccaccccaccccgaatcaggggtttaccaagggtctcttcaaagtggcagccgcactgtgaaagtgaaaccagacacttgaaaactgtctttcctctctctaaggttgctggctgatggagccacccgcaggggtcccgggggtgctaggaattctgatggatgttctccgaggacccttcgctgctctcgttgaggggcgtctccgaggtctcctccagctcctcgtctgccccctcctcctgaatggtgaggtgcacgtccggggaggaggactcggagctcacgctgtccccttccatggaacagagggtgcaggacagcgcgggcgccacgctctcctgcagcatgttcagcatcaggggcacctgcaccgacctcaggcccgacaccacgggcagcggcttcatggcctccccccagagccgctcctcgtctttgtacagcagcaggaggctggacttcttctcccgcctcttggatttcatgtagcccagcatgattccgatcaagaaaatgccgtagaaggacatgacaaccagaatgtagaagtactcgttgccattgccgctgccgccgccggccgcacgggactccagggggctgctggaggcggcggtgccggggtgcgtgctgttcagaggctccattttcagcattgaggctgcctccacagcaggggcaaggctgacagtttgtcccaagttttgaattcccaaatcgtccagtccaagagggttcttctgctctgtccggctccaa

SEQ ID NO: 189098 - DNA, 1522 bp, Homo Sapiens
ttggcttcttatcagtttactatgcctatcttcagtttggtttttctttttctcagtacccagtagtttgagtgtttttatacctgagaatttatttatattcagatctgatatctgaaactaaaaacctcatgatatggcatttcacagggaactttctagtataccacaatcatgtgatttataacatgtgactaattgttcttatttcataggcaactttctagtataccgcaatcatgtgatttataacatgtgaccaattgttctcatttctagacacagtctggaaaattgatgatcttatggattggcatcaggaaaataaagacaagctgggaagtacggcaaaaagctttgaatgcactacatttggaaaactatgtcttcttagtacaaagtatctttcaagacaaaaacctcataaatgtggcacgcatggaaagagtttgaaatatatagatttcactagtgattatgctagaaataatcctaatgggtttcaggtacatggaaaatcattcttccattctaaacatgagcaaactgttattggaataaaatactgtgaaagtattgaatctggaaaaaccgtcaataagaaatcgcaacttatgtgccaacaaatgtatatgggcgaaaaaccctttggatgcagctgttgtgagaaagccttcagcagcaagtcataccttctagtgcatcagcaaactcatgccgaagagaaaccctatggttgtaatgaatgtgggaaagacttcagtagtaaatcatacctcattgtacatcagagaattcatacaggagagaaactacatgaatgcagtgaatgcaggaaaacattcagtttccattcacagcttgttatacatcagagaattcacacaggtgagaatccctatgagtgctgtgaatgtgggaaagtcttcagtaggaaagaccagcttgtttcacaccagaaaactcattcaggacagaaaccatatgtgtgtaatgaatgtgggaaagcttttggtttaaaatcacagctcattatacatgaaagaattcatacaggagagaaaccatatgaatgcaatgaatgtcagaaagcctttaatacaaagtcaaaccttatggtacatcagagaacccatacaggggagaaaccttatgtttgtagtgattgtggaaaagcctttacattcaagtcacagctcattgtacatcaggggattcacacaggagtaaagccctatgggtgtattcagtgtggtaaaggattcagtttgaaatcacagctcattgtacatcagagaagtcacacaggaatgaaaccttatgtatgcaatgaatgtggcaaagccttcaggagcaagtcataccttattatacatacaacgactcatacaggagaaaaactctcatgaatgcaacaattgtgggaaagccttcagttttaaatcacagctcattatacatcagaggattcatacaggagagaacctctatgaatgccatgaatgtgggaaagtcttcagtc

SEQ ID NO: 189099 - DNA, 961 bp, Homo Sapiens
ttggctatggctgcttaatacggacattgagggatccttccccagaaaatccacctgtttgttgctgcaattttcctctcctcagctgcgtcatttcctgcatgttgcctgccacttactcaccactggggtctttggaagataatcttcctctttggaaatgaatggaaaagcaaaaggccctattacttttaaccactggcttcatataaacacttgccatttttttctgcatagctgggggtggtttgtgtctttaattctttgatgatagtttatagttgccacactttattgattagtacttgacagggtgtaaagcctattttgggtttgatttgttttgggtggggtagacatgtttttaaggaacttattgcttatctttagaaaatgttctagtttggaaacagattcttgagattcagaaggcattttggagtacacttatctcttgtttgtgttgaactgaaggctaagtctcagtggacatggaaaagacttttgggtgatttatttttgaacctgcatttctttcttatgtgtagtgtatgaagaaagactagaatgtagctttaaaaaagtgttgtttactctcttagaactgacagacttattgccagaaatcactgatgttcattgtttttgcaactgtttgagctgctgtaagagtctaaagttgacaagttagttcatgttaggtgcatctttataaagcaaagatgttgtatatcctaggcctcccttttatatttgatagaagttatttgctaatagcttctattcttacgttgaaaatagttgtaaaagctgatgaacctgaaattgtgtagcctctacaggctgctgaggttctaaataaaaccttttagtggtgcctttatggtgaaacagaatttgtcacctgcccatttctacttgagctaaggtagtatttgtgtatcctcttttccttcttaag

SEQ ID NO: 189100 - DNA, 1008 bp, Homo Sapiens
ttggatttttctttaattccctatataggttaaagatagtctatttcattggcatatctccccccagtttttgtggctcaaggctggaatatttatgccttaatatatctatggcagacatttaagaatgcgctttatctagctcatggtaactttgcaacgccttagattaaaatgacagtaaatattactaaggcagtattttgaatgagtttgacactgccggcttccttccatccagcgaggtggtgctgacagtgtggacttgagcacacttatgccaaatgataatgatactgacttctgttgggagctctccaaagaaactggttggttttaagaaaatagtttcaagaagttcaactatattcttttagatattatgtattgttttactctgattaggttactgtgataggcatttattcatattctttctataccactgtcattaatatattaaaaagatgtatgtgttagactatcgaaagggccttattctctctttctcatagactgaccttcttttggaatttctgagtcatttattttccttagctttttccactcaaattaagggcaagcgaaaaagtaataatttggcattctttaagcctacagaatgtgattctttcacttgtttattacactggctcgtggacagaacaatttgaaaagtgaaagaattattttggtaaaagattttgctttacttttcgaagcattatttttttaaagagtgttttactccaacgattgaaacattttcctatttaaatttcattgttagaatcacaggaggcaaaaaatggaacggttgaatgaaattttactctttctgtgaaagaaaatccacagagttgttgcctccgttgtagttggtgggccccgttagcattggatgcctttgccaaatggttcatgtggacacaccaagggcaacagatctgccatggatcgcagatttctgtaaaaacacggatgtgcatgtgcagattccctttttgc

SEQ ID NO: 189101 - DNA, 1977 bp, Homo Sapiens
  misc_feature (757)..(766): n is a, c, g, or t
  misc_feature (779)..(894): n is a, c, g, or t
  misc_feature (922)..(1048): n is a, c, g, or t
  misc_feature (1360)..(1431): n is a, c, g, or t
  misc_feature (1472)..(1521): n is a, c, g, or t
ttggcgctttaccatgttagctgtgtattgttttaaaagttttaacttcaaaatatgttatgcacagaatgtttattataaactaatataaaatgtgctctaccccattggctcagagctagggcaaacagcagatattcagactttattacttaactagcggacatccctggagtcccagcagcgagctggtctggcgagggcacctcggcagcccccacgggttggctcctacgtttgcgtttgtggctggtctcctggtgtcagtgttctcttgtacgttgttgctttcgacttttcagagccctcctgctcacttgaccacgtgagatttggaataactgtaggacttctgtttcctggtaacaagatgaaccgagagagtgggctgggttctgttttctttggttttgatttgttttcattgtttacttaggagtggtgctttttctcagaaaacaggccacggtgtttcatacagaatgtcttcatatcatctgaaatggtatggctgaagttcatttgtttacagggtcgggaatgtcttcagttcttgagagtcaacagtaatgattggttgtaagccaagggacattttaagctagtgaagagttttttctggaattgatttttcccaaaagaatatattaattgaggttaagaagtcagtgggaaacacacagaaatttgttttaaaatctttcaggagctttactgaaagacttggttatcaagtcttttggggagagaatgacannnnnnnnnngagacagagtttnnnnnnnnnnnnnnnnnnnnnnnnnnnnnnnnnnnnnnnnnnnnnnnnnnnnnnnnnnnnnnnnnnnnnnnnnnnnnnnnnnnnnnnnnnnnnnnnnnnnnnnnnnnnnnnnnnnnatgcgccaccacacccggctaattttgnnnnnnnnnnnnnnnnnnnnnnnnnnnnnnnnnnnnnnnnnnnnnnnnnnnnnnnnnnnnnnnnnnnnnnnnnnnnnnnnnnnnnnnnnnnnnnnnnnnnnnnnnnnnnnnnnnnnnnnnnnnnnnnagaatgacatcttaaagccaccattgcgttcctcatttgtgaactgtcttctcatattttaagtcaagtctataagatcatttttaacctaagttccaactttgttggactccttaaaataagcacccatgaaagccagccagcccttcctccttccctcaccaccctccgtctcttcggctgcctgctctttagtgtagattagtggaagccattcacagaatgtagactcatgtataggtcaccgtttctttcccccactagaaatcacattcactaagcagtggattgaatttaagagtgctgcccctnnnnnnnnnnnnnnnnnnnnnnnnnnnnnnnnnnnnnnnnnnnnnnnnnnnnnnnnnnnnnnnnnnnnnnnnagtttggggctgcagtgcactatgcttgcacctgtgaatannnnnnnnnnnnnnnnnnnnnnnnnnnnnnnnnnnnnnnnnnnnnnnnnngagagcactgcctgaacctcggtggcactgggaagctctggcctgagagttaaacacccatgctgaatgatacagtgtgcattctctccagctgcaaactttcttcaactttcctaaattcttagtaaattcagaggaataggataaagatcacttagagaaagggtgcttatggacatagcctgagtttcctttaacctctctgcaatgggtgcttttaactagcttctacatggcaagctgtttcagtttgcaaaatcactgcccagcatgtttgaagtcagttggcaccttaaaacacctgttctccagcccttgggacagtggagagaatctgtaaaagtgtgaccctctctaagatttcgttttaaatgatcagattcggttccagttttattcttgttgagtttttccctatgaaggctccttttgaatgtgtcttgagacccaaattga

SEQ ID NO: 189102 - DNA, 1388 bp, Homo Sapiens
ttggcaactgtatttgccatttcttggggccaagttaaacttattcaggggttttggttgatagatcataatgactatgagagtggtttggatcttttgtttcatccagctactgcaaaacctttgtcatggcaacattcaaagattattcaggcattcatgagtcagggcgagcacagacaagccctcagatatattcagacaatgaagccaacagtgtccagtggtagcgatgttatccttcacctcactgttttgctttttaataggtgtatggttgaagcctggaattttttgcggcaacattgcaataggttgaatatagaggagttactgaagcacatgtatgaagtctgtcaggaaatgggcttgatggaagatttactgaagttaccatttacagacactgagcaggaatgtttagtgaaatttttgcagtccagtgccagcgttcagaatcatgaattccttttagtgcaccatttgcagcgtgccaattatgtgcctgccttgaagctgaaccaaactctgaagattaatgttatgaatgatcgtgatcctcgtttgcgggagagatcactggctcgaaattctatattagaccagtatggaaaaatccttcctagagtccatcgaaaattagccattgaacgagctaagccttatcatctgtcaacatcatcagtttttcgattagtttctagacccaaaccattatcagcagttccaaagcaagttgtaacaggaactgtgttgacaagatctgttttcatcaacaatgtgttatctaaaattggagaagtttgggcaagcaaagaacctataaatagcaccacacctttcaatagttctaaaatagaagaaccatctcctatagtgtattcgctcccagctccagagctgcctgaggcattttttggaacaccaatttcaaaagcatcacaaaaaatttctagactgctagatttggttgttcagcctgtcccccggccttctcagtgttcggagtttattcagcaaagctccatgaaatctcctttgtacctagtatcccgttcactgccctcaagttcgcaattaaaaggatcgcctcaggccatctccagggcttcagaattacatttgcttgaaactcctcttgtagttaagaaagctaaaagtttggccatgtcagttactacttctggattttctgagttcactcctcagtccatcctgaggtctactcttcgatcaacacctttagcatctccctctccatcacctggaaggtctcctcaacgacttaaagaaactagaatttcatttgtggaagaagatgtccacccaaaatggattcctggggctgcagatgatagcaaattagaagtatttactacacctaaaaa

SEQ ID NO: 189103 - DNA, 915 bp, Homo Sapiens
tacaaaaaagttgggccagtatggctttgcactagaggattttaaacaagctgcactgataagccggactaacgggagcctttgtcacgccactgccatgtgccatcacagaattaatgagtttgaagaagctgtcaatttctttacttgggctcttaaaattaacccatgttttctggatgcttatgttggacggggaaattcttacatggaatacggtcatgatgaagccaccaagcaagcacagaaagactttctgaaagcactgcatattaatccagcatacataaaagccagaattagttttggctataatttgcaggcccaaggaaaattccagaaagcttggaaccactttaccattgccatagatactgatccaaagaactacctagcctatgaaggaagagctgtggtctgtcttcagatgggtaataattttgctgcaatgcaggatattaatgctgccatgaagatcagtactacagcagaattcttaacaaatcgtggggtgattcatgagtttatgggccacaaacagaatgcaatgaaagactaccaagatgcaattactctaaaccccaagtactcgctggcttactttaatgcaggaaatatctactttcaccacaggcagttttcccaggccagtgactacttctcaaagctttaaaatttgatccagaaaatgaatatgttctcatgaatcgagctattacaaatacaatattaaagaaatatgaagaagcaaaagaagattttgcaaatgtaattgaaagctgtctcttttgggctgcagtatattttaatagagcacatttctactactgcttaaagcaatatgaactagctgaggaagaccttaataaagccctgtctttgaagcctaatgatgctctagtatataattttaga

SEQ ID NO: 189104 - DNA, 1139 bp, Homo Sapiens
ttggcacagttagaaggaagtttaagatagcacataaaataatgttgcaaaattaacaaaagcttataacattatttcaggattttaaacaagctgcactgataagccggactaacgggagcctttgtcacgccactgccatgtgccatcacagaattaatgagtttgaagaagctgtcaatttctttacttgggctcttaaaattaacccatgttttctggatgcttatgttggacggggaaattcttacatggaatacggtcatgatgaagccaccaagcaagcacagaaagactttctgaaagcactgcatattaatccagcatacataaaagccagaattagttttggctataatttgcaggcccaaggaaaattccagaaagcttggaaccactttaccattgccatagatactgatccaaagaactacctagcctatgaaggaagagctgtggtctgtcttcagatgggtaataattttgctgcaatgcaggatattaatgctgccatgaagatcagtactacagcagaattcttaacaaatcgtggggtgattcatgagtttatgggccacaaacagaatgcaatgaaagactaccaagatgcaattactctaaaccccaagtactcgctggcttactttaatgcaggaaatatctactttcaccacaggcagttttcccaggccagtgactacttctcaaaagctttaaaatttgatccagaaaatgaatatgttctcatgaatcgagctattacaaatacaatattaaagaaatatgaagaagcaaaagaagattttgcaaatgtaattgaaagctgtcccttttgggctgcagtatattttaatagagcacatttctactactgcttaaagcaatatgaactagctgaggaagaccttaataaagccctgtctttgaagcctaatgatgctctagtatataattttagagcaaaagttcgtggtaaaatagtctgattgaggaagctatggctgactataaccaagcacttgatcttgaagactatgccctcagtttatatgattacatagactgtggttgctatagtaagtttaaacagctgttctctctgaaacggaaacatatttgtttgtctaaaaaggttctac

SEQ ID NO: 189105 - DNA, 1688 bp, Homo Sapiens
ttggtgcagatttaaaaaaatattttgctaaaggagacatagtcttcgagtctgttttttatatcaaaatgaatacaggccttcagtgacctaacagctccaaatatgtctttattttcttagtgtaatgtctgtggctaaggatgaagaaccagagagtatggatttccctgctcagcctccacctccagagccagttccctttatgccatttcctgccggcaccaaggccccttccccctcacagatgccaggttctgattcatcaacactggagagcacattgagtgttactgtcactgaaactgaaactttagataaacccatctctgaaggagagattttatttagctgtggtcaaaaattggcccccaagattttagaagatataggactgtacctgacaaaccttaatgatagcttatccagcactctgcatgatgccgttgaaatggaggatgatcctcctagtgaagggcaagtgattaggatgtcccataaaaaatttcatgcagatgcaattctttcttttgctaaacaaaaccaggagtcagcagtttcccagcaagcagtctatcattcagaggacttggaaaacagtgtgggtgaacttagtgaaggacaaagaccccagctaacagcggcagcagagaacatcttaatgggacattctctctatatgcagccacctgtcactaatacacagtctttggatcaacaatgtgatcctaaaccattatctcggcaatttgacacagtttcaggtagtatttatgaagattcatgtgctagtcatggtccaatgagtttgggagaattggagttggagccaaattctaagctggttcttcccacaacacttctgacagcacaagaaaatgatgttaatttaccagtagccgctgaagatttttcccagtaccaactaaagcaaaatcaggatgttaagcaagttgaacacaaaccatcacaaagttacctacgtgttagaaataaatctgatattgcaccttcacagcaacaaggtaagacttgtttttatgtaataatacaatagtttgatacttgtctgaatattgaacaaatatgagaattctttactttttatacatcccactgctctctaggtttttgttttcttttgttttctctcatttagtccatttacatgaagaatcggtattgtatttgactatgttagttctttttaccagtaaacactatttctagtggattttttaaactcttagctggtgtctttcctttacccttgccttttagttcttgttcaattgaataccaaggtctttttatctgtatataggtctgtttgacattacaatatgttaaagacagggattatggctgtatttaatatgctttgtaaagcacattatttagtgcgtggtcggtgctgaccaagtataacttaaaagcaattgcctctcatattacatactgtgatatggatgaccatatcatagttctttatcaaactcgtgtggttacctttaattccacagtcagcgttcaagcattttgatgttgtctctatgttttctacaaggctgttggccttgtgttttgtttgccatcttgcttcttgtcatttacattttctaatacctaaaatcctgaaatttggcagtagaaatttagatcctcttctgtttaaaaactttctgccc

SEQ ID NO: 189106 - DNA, 741 bp, Homo Sapiens
ataatcccaccgtgccaccttagctcaaagcatgcctgtttttaaggaagtaaaggtacatctgttagaagatgcaggcatagagaaggatgctgttactcaggagactagaatttcacccagtggaattgattcagctacaaccgtggctgcagcaactgctgctgccattgcaaccgcagctccgttgataaaggtgcagagtgatttggaagcaaaagtcaattctgttacagaattacttagtaaattacaggagactgataaacacctgcaacgtgttacagagcagcaaacaagcattcagaggaaacaagagaaattacattgtcatgatcacgaaaagcaaatgaatgtgtttatggagcagcacataaggcatcttgaaaagttacaacaacaacaaatagatattcagactcattttattagtgctgcactcaagactagtagttttcagccttccaaagtcctgggattataggcatgagccaccatttctggcttagtatataattttgaggacttggaaaacagtgtgggtgaacttagtgaaggacaaagaccccagctaacagcggcagcagagaacatcttaatggggacattctctctatatgcagccacctgtcactaatacacagtctttgggatcaacaatgtgatccctaaaccattatctcggcaatttgacacagtttcaggtagtatttatgaaggattcatgtgctagtcatggtc

SEQ ID NO: 189107 - DNA, 1169 bp, Homo Sapiens
ttggctgttcattgtgctcagttctgagatgggtattctcacatccactgctctgcttcatcgcatcgttcggcaagtgacctctgatgttttgcttcaagaaatggtgttttttatccttggagaacagagggaaccagaaactctggcagaaatcagcagacatcctttaaggcataggttaattgaacattgtgatcacatatctgatgagataagcataatgacattacgaatgtttgaacatcttttacaaaaacccaatgagcacattctttacaacttggtcttgagaaatcttgaagaaagaaattatacagaatataaacctttgtgcccagaagataaagatgtggtagaaaatggattgatagcaggagcagtagatctggaagaagatccattatttactgacatttcaccagaaaacactttgccaaaccaagagtggcttagttcttcacctcctgctactccagaccaccccaaaaatgatggaaaaactgaagttcataaaattgtaaatagttttctctgtctggtaccggatgacgcaaaatcctcctaccatgttgagggcacaggatatgacacttacctccgagacgctcataggcagttccgagactactgtgctatctgcttaagatgggagtggcctgggtctccaaaagcattggaaaagtgcaatttagaagctgctttcttcgaaggtcattttttgaaagtgctgttcgacagaatgggaagaattcttgatcagccatatgatgtaaacttacaagtaacctcagtgttatctagactttctctcttccctcatccacacatccacgagtaccttttggatccttacgtgaacctcgctcctggctgtagatctctcttctctgtaattgtcagggttgttggagaccttatgcttcgaatccagcgtattcaagactttactcccaagcttctgttagtcagaaagcggttacttggtttggaacctgaagccctattattgaccacatcacactgctagagggtgtgattgtgttagaagagttctgtatgagctggcggcaatcgcatttgtaaaatatcatgcttcctccacaccataaataacatctttcatgtaactgggggaacagaactactgtgtacatttcaccaaaaaa

SEQ ID NO: 189108 - DNA, 1291 bp, Homo Sapiens
ctttgtacaaaaaagttggcataatgaagaccattcacaatttaaagatcatccaacgctaaatgacagatatttgttgttacatcttttgggtagaggaggtttcagtgaagtttacaaggcatttgatctaacagagcaaagatacgtagctgtgaaaattcaccagttaaataaaaactggagagatgagaaaaaggagaattaccacaagcatgcatgtagggaataccggattcataaagagctggatcatcccagaatagttaagctgtatgattacttttcactggatactgactcgttttgtacagtattagaatactgtgagggaaatgatctggacttctacctgaaacagcacaaattaatgtcggagaaagaggcccggtccattatcatgcagattgtgaatgctttaaagtacttaaatgaaataaaacctcccatcatacactatgacctcaaaccaggtaatattcttttagtaaatggtacagcgtgtggagagataaaaattacagattttggtctttcgaagatcatggatgatgatagctacaattcagtggatggcatggagctaacatcacaaggtgctggtacttattggtatttaccaccggagtgttttgtggttgggaaagaaccaccaaagatctcaaataaagttgatgtgtggtcggtgggtgtgatcttctatcagtgtctttatggaaggaagccttttggccataaccagtctcagcaagacatcctacaagagaatacgattcttaaagctactgaagtgcagttcccgccaaagccagtagtaacacctgaagcaaaggcgtttattcgacgatgcttggcctaccgaaaggaggaccgcattgatgtccagcagctggcctgtgatccctacttgttgcctcacatccgaaagtcagtctctacaagtagccctgctggagctgctattgcatcaacctctggggcgtccaataacagttcttctaattgagactgactccaaggccacaaactgttcaacacacacaaagtggacaaatggcgttcagcagcgggtttggaacatagcgaatccgaatggatctgatgaaacctgtaccaggtgcttttattttcttgcttttttcccatccatagagcatgacagcatcgattctcattgagagaaaccttgggcagctccagccaggccttgtaggaaaagccccgcccgaggttccagcgtcaacggccactgtgtgtggctgctctgagtgagaaaaatttaaaagaaaaa

SEQ ID NO: 189109 - DNA, 935 bp, Homo Sapiens
gccaactttgtacaaaaaagttggggcagaggaacagggaagatggcggctgtggtggagaatgtagtgaagctccttggggagcagtactacaaagatgccatggagcagtgccacaattacaatgctcgcctctgtgctgagcgcagcgtgcgcctgcctttcttggactcacagaccggagtagcccagagcaattgttacatctggatggaaaagcgacaccggggtccaggattggcctccggacagctgtactcctaccctgcccggcgctggcggaaaaagcggcgagcccatccccctgaggatccacgactttccttcccatctattaagccagacacagaccagaccctgaagaaggaggggctgatctctcaggatggcagtagtttagaggctctgttgcgcactgaccccctggagaagcgaggtgccccggatccccgagttgatgatgacagcctgggcgagtttcctgtgaccaacagtcgagcgcgaaagcggatcctagaaccagatgacttcctggatgacctcgatgatgaagactatgaagaagatactcccaagcgtcggggaaaggggaaatccaagggtaagggtgtgggcagtgcccgtaagaagctggatgcttccatcctggaggaccgggataagccctatgcctgtgacatttgtggaaaacgttacaagaaccgaccaggcctcagttaccactatgcccactcccacttggctgaggaggagggcgaggacaaggaagactctcaaccacccactcctgtttcccagaggtctgaaggagcagaaatccaaaaagggtcctgatggattgggccttgcccacaactactgtgacttctgcctgggggactcaaagattaccaagaagacggggacacccgaaggagctggtggtcctgttctga

SEQ ID NO: 189110 - DNA, 1275 bp, Homo Sapiens
ttgggtcaatcagtcaggagaatacaaattcagtgccaggtggaccaaagtcatgggcacagctgaatggaaagccagtaggacacgaaggtggtttaaggggctcaagccgactgttatccttctctcccgaggaatttccgacgctgaaagcagctggagggcaggacaaggctggcaaagaaaagggcgtcttagatctgtcgtatgggccaggaccaagcctccgccctcagaatgtgacaagctggagggagggcggtgggcgacacataatttctgccacgtctctgagcacctccccaactgagctgggcagcaggaactcgagtacgggagatggagccccctcctcggcatgtaccagcgattctaaggacccctctctccgcccggctcagcctgtccgaaaaggggcttcacagttcatgggaaatgtataccacccacctacataccatgacatgcttcctgcttttatgtgttcgccgaagtcatcagaaaaccagggtacagtggaacgaggctcttttccccttcctcagctccgccttgaacctcgagttccttttagacagttccagatgaatgaccaagacggaaaagaaaacaggctgggattgtctcgcccactccgcccactaaggcagctggtggagcgggcaccacggcccaccattatcaatgcggaaaacctgaagggccttgacgatctggacgccgatgccgatgatggctgggcaggcctccatgaagaagtggactattctgagaaactgaagttcagtgatgatgaagaggaggaagaagttgtgaaggacggcaggccaaagtgaagtcatcaatgggcagcatgtcccggcaacagtccatcgaggacaaggaggacaagcccccaccaaggcagaagttcattcagtcagagatgtccgaggcggtggagcgagcccgaaagcgccgggaagaagaggagcgccgagcccgggaggagaggctggccgcctgtgctgccaaactcaagcagctggaccagaagtgtaagcaggcacgaaaggcaggtgaggcccggaagcaggcagagaaggaagtgccctggtctccaagtgctgagaaggcatctccccaggaaaacggccctgctgtccacaaaggctccccagaattccctgcccaagagacccccaccacattcccagaagaggcacccacagtgtccccagcagtggcacagagcaacagcagtgaggaagaggccagagaggctgggtcccctgc

SEQ ID NO: 189111 - DNA, 1726 bp, Homo Sapiens
  misc_feature (984)..(1000): n is a, c, g, or t
  misc_feature (1014)..(1277): n is a, c, g, or t
ctttgtacaaaaaagttggagagaaggaggtcgaggtgattgggggagcagacaagtaccactccgtgtgtcggctctgctacttcaagaaggcctcaggccagcctgccgggccggacaacaaagagaactgcccagtgccaggaaagccaggggaagccgtggctgccaggaagctctttgccccacagcagattctgcaatgcagccctgccaactgagggacctgcgagggccgcccgctcccttcctgccactgccgcctactggacgctgccctgcatgctgcccagccactccaggaggaagtcgggaggcgtggaggatgaccacaccttggccttctgggaactctcctttgtgtggctgccccacctgccgcatgctccctcctctcctacccactggtctgcttaaagcttccctctcagctgctgggacgatcgcccaggctggagctggccccgcttggtggcctgggatctggcacactccctctccttggggtgagggacagagccccacgctgttgacatcagcctgcttcttcccctctgcggctttcactgctgagtttctgttctccctgggaagcctgtgccagcacctttgagccttggcccacactgaggcttaggcctctctgcctgggatgggctcccaccctcccctgaggatggcctggattcacgccctcttgtttccttttgggctcaaagcccttcctacctctggtgatggtttccacaggaacaacagcatctttcaccaagatgggtggcaccaaccttgctgggacttggatctcaggggcttatctcttcaagtgtggagagggcagggtccacgcctctgctgtagcttatgaaattaactaattgaaaattcactggttggtggacgcacatttctctttcacctgggtttccctgggtctcatggacagctccaacttgatttgggtggggattttcttccagatcnnnnnnnnnnnnnnnnngagacagggtctcnnnnnnnnnnnnnnnnnnnnnnnnnnnnnnnnnnnnnnnnnnnnnnnnnnnnnnnnnnnnnnnnnnnnnnnnnnnnnnnnnnnnnnnnnnnnnnnnnnnnnnnnnnnnnnnnnnnnnnnnnnnnnnnnnnnnnnnnnnnnnnnnnnnnnnnnnnnnnnnnnnnnnnnnnnnnnnnnnnnnnnnnnnnnnnnnnnnnnnnnnnnnnnnnnnnnnnnnnnnnnnnnnnnnnnnnnnnnnnnnnnnnnnnnnnnnnnnnnnnnnnnnccccagatctttctgtagtaatactgatctcttaaccacaacccttgaactgagaaatgatcatggggtgtgtcctaagcagaacatcatctgccttcctgtctgggccagtgtcaggacaaaaatgggtgtacagaggagcccggggcccagttggaaggaagaggcactgtcctgcccgctgggcctgtgaggtcaggttttgtttgtgaaacaaactcttggtaattcaggagtcaagacatctctcagctgtgcctcagagatgggctgttggcagctcacttgggggcaagcatcgctggggtaaggtgtgtcctgtgcaggcagtgtcaccactcccagggcctccccagcctccctctccccttcgctagtgatgtgtcccaagccaaagccatcgggtgaggctgggagcagtgccctgttagttcgtactggggattttt

SEQ ID NO: 189112 - DNA, 839 bp, Homo Sapiens
  misc_feature (339)..(369): n is a, c, g, or t
gcctcatggagagctgagaaagatagggaatctctccgtcgtactaaaaatgagactgatgaagatggatggaccacagtacgacgttaagtctcaagataatggatttaaactggtgtcttaaataggtttgatcacattcaaggattattatacttgtgcttcaaccaatctaaattggattctttaatgttgtttcaccataacacaaaaagcatgaacttgtattaatcctatataatagattgatcatgcaccatatccacaggaggttggaaaaaccatgccattttctggaatttaagggtgttgcattatttcatcaatcatttgttgacnnnnnnnnnnnnnnnnnnnnnnnnnnnnnnntgtgaaccttcaggtattgagtaacacctttatcttggtatagaactgatacttttttttgattttgaaatatctgataataatttggaatgaagtaaggttctgttaaaatatatttgaagaccctttaaagcagtgaatctgaaacaattttcacacccttaagtggttgatacgtacctattttaggtattttgaggtatttaccataaactaaatttagaaattttttagattcacttgaagtaaacattacaaacattggatacggtggggttttctttagattttacttgagagaaggtgagtacaaagcaatttgcagttgttgtaatgacaagattactgcgcaagtgtgaatccaaacagtatagcttttaattttaaagcatttgggtaaattatcgctgagtttttttctgttgccaatagcaaactgcttttccattaatggagaattcatgcctttc

SEQ ID NO: 189113 - DNA, 1333 bp, Homo Sapiens
  misc_feature (587)..(626): n is a, c, g, or t
ccactgccccagagggccctccttggttccctggtgtcttcacgagaggagaggccctagttctgctcagaagattcaagtccatattcagggaggggtcactgtccacacccccaggtccaagtgagggatggtaggaggagggaggcgaggctggggggccccggctcaggacaggatgggggacaagcaagcaaagcaaaacactggactccacagaagctggtgacaggaagggggtggccccgggccccagcatggtccctgccccagtgttcagggcggttggccccttggtgcccagggccaccttctccgagccaggtcaccgcaggggtctgaaagggcaggggtgggtggggcttacatgctgagcaaggggtggtggaaagagggccgacatggtggccacaggcggcctcggggatggggcgcggctggacgcaggcagtcggtccccggtggtccggcggctcctcatgcactctgtacagcgtgggggcggatgggcgggggcaggggcatcagtctagaggctgcaggcctcctggtccaccgagcgcttcctcagctccttgcctggcttnnnnnnnnnnnnnnnnnnnnnnnnnnnnnnnnnnnnnnnnagatgcaggacggagttctcccctggctgcacccgcaggtaggccttgaccttgtggtgccgggccttgccgtcgctgaagtcgatgacgcggcactcgtaggtgccttcgtccgtgggcttcacccgggacaggcgcagcttgtgggagatgttgctgcccaccaccttgacccacttattttggttgcctccttccatgcgtcttcctgctgagatgcttttagctggttcgaggcccacgcctgcttgtcggtccagtcccggtggctccgtacataccaccactggatctccagcgagtaggagggggagccgctgccgcggaaggagcaggccatctccacgtcctcgcccgtccgtgctgtcatgtcatggggtgtctctgtgaacagggcgtggccggagacgtggttgtcccagggcgcgtggccggcgggccgcgtggcgccgccgagttgcaggaaaagtgccaggtagtggagggcgcccagcgctacggcgagcggggcccccatcgtgcgctctcgggccgggggcgccgccgcctcacatctgggccccggagaccgcagaaccggcgccagctgtcccctgccctgagcggcctggctgcccggctccggcagctgcccctcgcccgctgtccccggacccggcccagctcccagccctcgcccggctccggcccagccccggcttcgccaa

SEQ ID NO: 189114 - DNA, 565 bp, Homo Sapiens
cctgaaccctcggagcctggagcagaaagtgaaaccctggtgctccagacaaagatcttagtcgggactagccggccaaggatgaagcctcacttcaaaacacagtggagcgaatgtatcgagacacattctcctacaacttttataatagacccatcctttctcgtcggaataccgtctggctgtgctacgaagtgaaaacaaagggtccctcaaggccccgtttggacgcaaagatctttccaggccaggtgcccaggtctttcatcagagccccatttcaagtgctcagtagcccctttggccagtgcgccccaccacatgggacagcgcaggtccagtggcctccccagctgaccgcaggcagggaacaaggcagaccctagagggccaggccacagcaggggctgaggatgcctggtgaatggatgcctgggagaatggatgccagaattcacgcatgaggctctgaacagggctgggaaaacttcctaacgaagggaagctcatgtcttggtgcactttgtgatgatgcttcaacagcaggactgaaatggggacattt

SEQ ID NO: 189115 - DNA, 1003 bp, Homo Sapiens
ttattttagaagttactttggattaatccttgaattgatgccttagagaaagactagagtgtagatctttggaacatcctgtctatttaggcactgattatgacttcctgcagtctctgcctcgcctggattaaggactccagataccactgttctgctgcagctgctgcttctgttttctaagtggctttgagtagccgttagtttctgggcttgctcaattagctgcagtaattccttcttgaactgctggttctctctgttgatgccacaggagtattcaaaaataaaccgctttgctgccaacttcaaggcctgggccttcatattaagctctcttctttttctctttcccagtagcctcctgtctggctcgctcagttgtttctccagtaatcttttctcctggaggagctgggcctgtacttcccgtgtctttgaagctgtctcagcttggactttctttgtctcctcctgtaatgtctgtatttctttctcctgcttttcctttaatatagcaatgtccctcattgcctgcaacttccgcttcaaactggattggatattttccttttgcaagagcgctgttttaagcactgaaatttgttctgcatatctggaggctgattcttgtcttcttcgttcaatctctccacttttttgtaaatagctgttccataccttctcaggttgctctgtgtactcttcagttttgttagtcaggtattccagaaagaatctgttttcagcctggacaagtaacttttctcggtgtagctccctggattcctccagtagctgtttccgctgggtttgagcttgttttatatgcttgttcagatccgtcatttccgccactatcttttctttaagccttgtctctacctttgttagcttctctggcttgacaaaattatttattagactatgatacggtggaaggagccttctggggccctcagcaaacccgctcctttctgacgctgtggtggttttcgtccaa

SEQ ID NO: 189116 - DNA, 1039 bp, Homo Sapiens
ttgggcaaaactctcaattcttaattagtcatgtctcagctcaaggatatcagacaggaatgaaacacacttgaaaatgagattgacctggagattttttttccctaatctctcataccttaattggaaaaataatcaattaattctatgttaattaggatatacaaagttcaccctccttgaaagtgactagggcaagccctgaagatcttcctcacctccttttatttttctataaccttgtctcctccagcaccacagggaagacaatcacagtgggtcaagagcgaccctctttcacgtgggctctgccatgacctctgagacctgcttatgatcagtgcaatgaagttagaagtaactgatgattgggagcctttgcagatagctgggcaaatgggtgatttacttatccccattctaaatggagtgagctctctttgaggctaagcaaggaggcgttgtatgctagtttctagactttgcctggagacccctttggaaatctgtcttctttttaaactcacttaatatgccttaatcatctgtgtgtaatggagtcatccgctcctcaatctaaccctcctcccctggggctttggctgtcctcaatgagagtttcatgcagaatggaaaatcctctatatgtacaatctctctccccctcatttctcttcctcctcacctccaccacccctttgcacatcagcattttaacagctgatcttttgagaagcctgtatctttttcctcttcagtagatacccttcttcatggtcctttgcctaatcaaacagaggcctttggcctttgaaaatccatgacaaggcctcagaaatcagtgttgtggaggattactccatgccaccggagaaactctggtgaaagagaaacctcgtggtctttaggatgttgggattttgagtgaacctgacctgatagcctcagattcagggaaaggacaatcagatggcggtgttttccagggggacgcgccaaatcatgtgggtttcagacaattgtgtttgcctttgtgcct

SEQ ID NO: 189117 - DNA, 960 bp, Homo Sapiens
cacagaaaacaggaatgcataggataaaactatgtacgtagctggttgaggaggaggttctctaggacagcattcctgtctacaaacagtaaaaatttgagttttatttaaagttatcaccacttggactatcatgctgtaaacttctgcttattctgttacaaccaggtggcttctctagtctgtttttctttagattatgtctaagaaataatgatagacctatggtcttttaaagatagttcatcaaacacaagtgaatacaactttagactttggtggaacctcttactaatgatgtagagttccgcctcttagattcatgaactgtgataactcagataaggatggtaactgcagaaataatatatataaagagaaatcactcctgggtgatgtcattttccatgtagcccagtatgcccatgttgaaaagttttgttttcaaagcagtgtactgatgtgataatggggaataacatttttttatgagggaaccctttaaaatggatgcacacagtggcattttctcctaggctcaaagctgagtacactcccgtaattttaataatattttaggcaagtcctatgacaattataccaacaagtttcttcaaccccaccaccaccccaccatctctatgctttgcttgcccagactcccttcaccctttcctctgctattaccgcttatggttgaaagtaaaaagcatctccagattacagcaaattcagtggccctgctccatagcctggcctctgctgaaggaagaaaaggggtgaaacatgaacagccatcatgggttgtgatgaggcactaccagaagcccagcttgtgtttcaaaaacaggctcttggacactttcccagcagataactcttcactggcttggagaacaggaaggactatttcacaaacaccactgtgccaacttttttgtacaaagttggcttttatag

SEQ ID NO: 189118 - DNA, 1147 bp, Homo Sapiens
caactttgtacaaaaaagttggggaaactatattgagcaaaccaatgttgttctttattaatgtacagaccaaaaaagacacctcaaaagaaaggacgtacgcgtttcttgtaaacacgaggcaccccaagataagaagacagatagagcaagggatggacatggtcatctcctcagtgattggagaaagttaccggcttcagtttgattttcaagaggcagtgaagaatttcttccccccaggaaatgaagtggttaatggagaaaatttaagctttgcatatgaattcaaagctgatgcattatttgatttcttctattggtttgggctcagtaattccgttgtaaaagtaaatggaaaagttctgaatttgtcaagtacaagtccagaaaagaaggagacgattaagttatttctggaaaaaatgagtgagcctttaatccgaaggagcagtttctctgaccgaaagttcagtgtaacttccagaggttcaatagatgatgtttttaactgcaatctgtcacccagatcatctctgacagagcctcttttggcagaattaccatttccaagtgttctggaatctgaagagacacccaaccaatttatctgattgaactgaacattgtagcagttgctcccgcactccaggcctgtgctagactataggctggggggagggtaggaggtgggaggcagatacttccacctgcgtgtcaatctccggctcctccatggcttctatggaggactcctctcttctgcttctgtggatgtgatgccctggcaggcccagggcagctgattcccctaaaacttatgattaccaggatggaaaggccttggtcccatggcactgggtggggctgggggatattctctactttgaacacttctccaaagaggcagaagggccacagagttctgccaccctgaacatttttctcagttccctgggagtttttgtggcagcctttgtgggagtggtctgactggctgttgacctagcatgcttcataaatcagggtttggccctctgcttggagcatccaaccccttgaactcaaacctgtcgagcaggggttaagagttctgttctcttgccaaactggctgggcaaagcctgtgccatctttcactgggagg

SEQ ID NO: 189119 - DNA, 1900 bp, Homo Sapiens
cctataaaagccaactttgtacaaaaaagttgggtgagttcgacccaccatgccgactgtcagcgtgaagcgtgatctgctcttccaagccctgggccgcacctacactgacgaagaatttgatgaactatgttttgaatttggtctggagcttgatgaaattacatctgagaaggaaataataagtaaagaacaaggtaatgtaaaggcagcaggagcctctgatgttgttctttacaaaattgacgtccctgccaatagatatgatctcctgtgtctggaaggattggttcgaggacttcaggtcttcaaagaaaggataaaggctccagtgtataaacgggtaatgcctgatggaaaaatccagaaattgattatcacagaagagacagctaagatacgtccttttgcggtagcagcagttctccgtaatataaagtttactaaagatcgatatgacagcttcattgaacttcaggagaaattacatcagaatatttgcaggaaaagagcactggttgccattggtacccatgatttggacactttgtcgggcccatttacttatactgcaaagcgtccttcagatatcaaattcaagcctctaaataagaccaaggagtatacagcctgtgaactgatgaacatatacaagactgacaatcacctgaaacattatttacatatcattgaaaacaaacccctgtatccagttatctatgatagcaatggtgtcgtcctttcaatgcctcccatcatcaatggggatcattccagaataacagtaaatactagaaatatttttattgaatgcacgggaactgactttactaaggcaaaaatagttcttgatattattgtcaccatgttcagtgaatattgtgagaatcaatttacggtcgaagctgctgaagtggtttttcctaatggaaaatcacatacctttccagaattagcttaccgaaaggagatggtgagagctgacctaattaacaaaaaagttggaatcagagaaactccagaaaatcttgccaaacttctgaccaggatgtatttaaaatcagaagtcataggtgatgggaatcagattgagattgaaatccctccaaccagagctgacattatccatgcatgtgatattgtagaagatgcagctattgcttatggatataacaacattcagatgactctcccgaaaacttacaccatagctaatcaatttcctcttaataagctcactgaacttctccgacatgacatggcagccgctggcttcactgaagcacttacctttgccctgtgctcccaagaagatattgctgataaactaggtgtggatatctctgcaacaaaggcagtccacataagtaatcctaaaacagctgaatttcaggtggcacgcactacccttcttcctggcctcctgaagaccatagcagcaaatcgtaagatgccccttccactgaaactgtttgaaatctctgacattgtaataaaagattctaatacagatgtaggtgcaaaaaactacagacatctctgtgctgtttattacaacaagaatcctgggtttgagatcattcatgggctgctggacagaattatgcagttgctcgatgtgcctcctggtgaagacaaggggggatatgtgatcaaagcatcagaagggcctgctttcttccccgggcgatgtgcagagatctttgccaggggtcaaagcgtcgggaagcttggggtccttcatcctgacgttatcaccaaatttgagctgaccatgccctgctcctccctagaaatcaatattggaccctttttgtgaagattggtctctgtggtgtgattctcttcccaggtgtccctttctcctcccctagtgtccttaagtcctcctccacaagga

SEQ ID NO: 189120 - DNA, 805 bp, Homo Sapiens
  misc_feature (555)..(592): n is a, c, g, or t
tttgtacaaaaaagttggatattctttacaaacctcgtatgctccccatagtggtataccctggaaaccccttaaacacccctccccacattctgcccgaatgatatttcgaaaataataattatattaaccgattattcccttttaaataatgaagcttcctttggctttatttgcatttccggagatcatgttttcttactcatgctggaatttaaaaattgttttacttgtatcgaaattacccttgatttataactatttttgtaataaaaccatgacagctgtactaactatgatgggtgtaacaacatttttttaaagaagggaatctgtttatcgcttttcaaaatattttctaaagtgggggaagaaagtttatagactttccaagcacatttatggttttttattactattattatggttttaaaaagagtaactttatttctttttgtaaggaattaagtaatatcctttacagttctgtgaaaggacttattttttaactgtaatatttattagttttaaaatatttgtatctcatttgtaacnnnnnnnnnnnnnnnnnnnnnnnnnnnnnnnnnnnnnnaaaaaacataccagttgaatggggttaaagctttcaatatcttaaaatatttataaaacatttcactgttgcaaaatcacttccaaaatgatagctatctaacaactaattactaattttcaaagaacaaatcacacatttaaaaaatctgtagaatttattttaactatgacctttatttgaaaataaataattcaaatatcagacatgttt

SEQ ID NO: 189121 - DNA, 916 bp, Homo Sapiens
actttgtacaaaaaagttggctctccggctaccaggaagagtctgccgaaggtgaaggccatggacttcatcacctccacagccatcctgcccctgctgttcggctgcctgggcgtcttcggcctcttccggctgctgcagtgggtgcgcgggaaggcctacctgcggaatgctgtggtggtgatcacaggcgccacctcagggctgggcaaagaatgtgcaaaagtcttctatgctgcgggtgctaaactggtgctctgtggccggaatggtggggccctagaagagctcatcagagaactcaccgcttctcatgccaccaaggtgcagacacacaagccttacttggtgaccttcgacctcacagactctggggccatagttgcagcagcagctgagatcctgcagtgctttggctatgtcgacatacttgtcaacaatgctgggatcagctaccgtggtaccatcatggacaccacagtggatgtggacaagagggtcatggagacaaactactttggcccagttgctctaacgaaagcactcctgccctccatgatcaagaggaggcaaggccacattgtcgccatcagcagcatccagggcaagatgagcattccttttcgatcagcatatgcagcctccaagcacgcaacccaggctttctttgactgtctgcgtgccgagatggaacagtatgaaattgaggtgaccgtcatcagccccggctacatccacaccaacctctctgtaaatgccatcaccgcggatggatctaggtatggagttatggacaccaccacagcccagggtcgaagccctgtggaggtggcccaggatgttcttgctgctgtggggaagaaaaagaaagatgtgatcctgggctgacttactgccttccttggctgtttatctt

SEQ ID NO: 189122 - DNA, 1089 bp, Homo Sapiens
ctttgtacaaaaaagttgggtctcctgtagacccagtggaacccataagtaattcagaaccatcaatgaattcagatatgggaaaagtcagtaaaaatgatactgaagaggaaagtaataaatccgccacaacagacaatgaaataagtaggactgagtatttatgtgaaaactctctagaaggtaaaaataaagataattcttcaaatgaagtcttcccccaaggagcagaagaaagaatgtgttaccaatgtgagagtgaagatgaaccacaagcagatggaagtggtctgaccactgcccctccaactcccagggactcattacagccctccattaagcagaggctggcacggctacagctgtcaccagattttaccttcactgctggccttgctgcagaagtggctgctagatctctctcctttaccaccatgcaggaacagacttttggtgatgaggaggaagaacaaataatagaagaaaataaaaatgagatagaagaaaagtaagaaccaagattcatatgaagtgatattagattgttccttttacaaaagtgtttagcttcaagactggaaagggaatatgagtgtaagtttactatatataaagctaagatgtggatttacaggaagaaccctggtttgaataactgatctgaaattagtagttacctgtaaatggcagatcttttaggaaaataagagaaaggtaagggctcttttgaataaactgctgttttatttgtggcacaactgatcaatcttggaaattctttaagtatttttaataagaaatgaattatcatttcttgccagaatttgctaccttaaggtgattgggaaaattctgttgcaagaacattaacatttagtatgactcctttttactgtattcttgcagttaataactgcagctattatgttaataacaagttgtttgtattttatttttgtttataccagtcttaaagatccaggttctgaataaaaaaattaattgatacaattgatgtgtgctggggtttggaactaaaagtagtttcaacagtgcgtgggttatgacatttcttatgtttctttgttc

SEQ ID NO: 189123 - DNA, 1506 bp, Homo Sapiens
  misc_feature (319)..(395): n is a, c, g, or t
ggcccagcttcaggccctcacaggaggacagtcaagggctgggagccctaggcccggactgcatttccgctcccgcaggagactttctatgaaataaatatagaaaagagggcatcccccagccccacagcacaagaccctggccctcagcgctggacagctgagacagacgcaggctcgctgctcagggggagtaagtgctgggctccagtaggctcccacaggcccactgaggcagaggcatgagtcgcccaagtgctggatggggcatggggagaaaggggcgtgggcagccctgctactgctggcaagaggtggnnnnnnnnnnnnnnnnnnnnnnnnnnnnnnnnnnnnnnnnnnnnnnnnnnnnnnnnnnnnnnnnnnnnnnnnnnnnnctttttagggggaggagagcggctcacactctgggaaacacagtcacctccccactggggagcagggccaggcaggaggggcctcagggcccatgactgcctggaggggacactcagcctctctgaggacatatggggggtaggcctctggggaagggtctttgcttggcatcaggcagggccaagtccagtaagggcaaggggagggggcattctggtgagaacagcatttctggcaagacgggcatccacttcaaaatctcggctcaaaagggcagcagggctgttctcaagccaggcaggcagggtcccccaatccctacaattctcctgagtccctcaccaccatggaggacccttgctagggtctaccgggagagtcaccacatctattatgaggcaagggcactgggatatgttcccaccatcccctaaacacaagagtaggctaggggagcgtgcaggcagcccccgctcacggccaggcctgcagcccaacccatgggccccttcgcactgggagtccacgtgagctcagtaccacggggaaggatagagaagggaacaggttaacgcgcgtgtacagcacctcagagaagccactgagacgggagagaaagagccaggtctagaaaggcctcccatcaccggcagcagagagggactggtgggctgaaaggggacagggactggcaggaggggcttccctgcctgggggtgaggagggagctcacgtgtgggctgtggattccttgctgtccagccaggctgggggcagggagtggccatggactgagccacctagagatgggagagaagttggtatggtaaaaaaataaatatatttgagttcggtttaagatgaggtgaaggttttccaaagcttggactgaggggcctggatcagaaagagagggacggaaagaggctgtggcaggggcctgggagagcagggaggaggggaagctcgctctggggcctgcagcgagctgcactttcagcttatttggactgtggggagcagcgccccaggtcagttggtggccgctggggaaggccctggagtggggtgagcaggctccctcctccctcttgctcagtccagagccaa

SEQ ID NO: 189124 - DNA, 1687 bp, Homo Sapiens
ttggctctttatcgtgctggtgctcgagttagaaatattgaagatggtggccgctacagggatatttcagctgaatttttccgtagaaatccagcttgccttcacagattagtcccctggttaaaacgtgaacttacagttctttttggagctcatggatctttagtgaatattgtccagcatattatcatgagtaatgttactcgctatgacttggagagtcaggcatttgtgtctgatttaagaccatttttacttaatcgaactgagcattttatacatgaatttatcagttttgcccgatctccttttaacatggcagcctttgaccagcatgccaattatgattgccctgctccttcatacgaagaaggcagccattctgattcttcagtcataacaatatctccagatgaggctgagacccaagagctggatattaatgtagccactgttagtcaggcaccatgggatgatgaaactccaggaccatcttactcaagctcagagcaggtacacgttactatgtcttctcttttaaatacttctgacagttcagatgaagaacttgtcacaggaggagccacgtctcagatacaaggagtacaaaccaatgacgacctaaataatgacagtgatgattcttcagataattgtgtcattgttgggtttgttaaaccactagctgagaggaccccagaacttgttgaactgtcctctgattctgaggacttaggttcttatgagaaaatggagacagtgaagacacaagaacaggagcaatcttacagttctggtgatagcgatgttagtagatgctcatctccacactctgtccttggaaaggatgaacaaataaataaaggtcattgtgattctagtacaagaatcaaatcaaagaaggaagagaaacgatctacatcattgtcatctcccagaaacctgaactcatctgtaagaggagacagagtatattctccatataaccatagacacagaaagaggggaagatcaagaagttcagattcacgttctcagagtagaagtgggcatgatcagaagaatcatagaaagcatcatgggaagaaaagaatgaaaagtaaacgatccagaagcagggaaagtagcagacctagagggagaagagacaaaagagatcaagaactagagatagcagttggtccagaagaagccaaactctgtctctaagtagtgaaagcacaagcagatcaaggtctcgtagcagtgatcatggtaaaagaagatcacggagcagaaatagagatcgttattatttaagaaataattatggaagcagatacaaatgggagtatacttattacagtagaaacaaggacagggatgggtacgaatcatcttacaggaggaggactctgtccagagctcattattctagacagtcttcaagtccagaatttagagttcagtccttttctgaaagaacaaatgctaggaaaaaaaataatcacagtgagaggaagtattactactatgaaaggcacagatcaaggagcctgtctagtaacagatcaaggactgcatctaccgggactgaccgggtgagaaatgaaaagcctgtagggaaacgaaaatacaaaacacggcatttggagggtactaacgaagtggctcagccatctcgtgaatttgcttctaaagcaaagga

SEQ ID NO: 189125 - DNA, 943 bp, Homo Sapiens
ttggcccaagggaaggaggctgactggggagtgtgcctagggccacgcatctcccttctgtacttttctgtcatctctgactagggaaggtgaactacctggaaatacagacaggtggctacctgtctgaaaatctacctgacgggtagatttaaaaccacaggttacctcatagttatgttagttaattttttttgttgttggttatgacaagactttgctagatttgggaatttaatattcctcaattcttttctggctgtgtaactttacatcctttatatctgtatgtttcttccccaagaaactcttccccaagacttcaattgagtgaaaactcaatcagacgtggttatacaatatcagtatttcctcgtgcagaaaaaatgagtcgttcctcctttgccctcttccccacaggaccgtgaatagtctcccacaatacgcagagccttcctgtcccagccttcctgccgggcccacaggtgttgaagaagataaaggtctttactcacctggagacctgtggcccactccgccagtgtgtgtgacaagcagcttaaactgcaccctggagaacggcgtgccttgtgtgattcaggagtcggccccggttcataatagtttcattgattggagtgcaacatgcgaaggccagttttccagcgcatactgtccattggaattgaacgaattacaatgcctttccagaagaaaacatgaactatgccaatggcttcccctgtcctgcagatgttcagacagactttattgatcacaactctcagtctacctggaacaccccacccaacatgcctgctgcctggggacatgccagtttcatcagctctccgccctacctcacaagcacccgaagcttgtctccaatgtctggactttttggttccatctgggccccgcaaagcgatgtgtatgaaaattg

SEQ ID NO: 189126 - DNA, 1846 bp, Homo Sapiens
ttggcttcgctgctgggcagttggctggaggggctgctgctgggaacacctggagtctccgcgggcagatctcatattttggattctggatatattataatgagtgacactttgacagcggatgtcattggtcgaagagttgaagttaatggagaacatgcaacagtacgttttgctggtgttgtccctcccgtggcaggaccctggttaggagtagaatgggacaatcccgagagaggaaagcatgatgggagccacgaagggactgtgtattttaaatgcaggcacccgacaggaggatcctttattcgtccgaacaaggtaaattttggaacagactttcttactgcaattaagaaccgctatgtgttagaagatggaccagaggaagatagaaaagagcaaattgttacaattggaaataaacctgtggagactatcggttttgactctattatgaaacagcaaagtcagctgagcaagttgcaagaagtttctctgaggaactgtgcagtaagttgtgctggtgaaaaaggaggagttgctgaagcatgtcctaatatcagaaaggtagatttgtcaaaaaacctgttgtcatcatgggatgaagtgatacacattgctgatcagctcagacacctggaagtccttaatgtcagtgaaaataaactaaaatttccctccggttcagtattaactggaacgctttctgtactgaaggttttagtcctcaatcaaacaggaataacgtgggctgaggtgctgcggtgtgtcgcggggtgcccaggcctggaggaactctaccttgagtctaacaacattttcatttccgaaaggccaacagatgttctccagacagtcaagttattagatctttcctctaatcaattaattgatgaaaatcagctgtatctgatagcccacctgcccaggttagaacaattaatcctctctgacactggaatttcttctctacattttccggatgctggaattgggtgcaaaacgtccatgttcccatccttgaagtacctggtagtaaacgacaatcagatatcacaatggtcgtttttcaatgagctagagaagttaccaagtctacgggctttgtcctgcctaagaaaccccctgaccaaagaggacaaagaagcagagacggcgcgactactcattatcgccagcattggccagctgaagacgctgaacaaatgtgagattctccccgaggagaggcggagagctgagcttgactaccgaaaagcttttggaaatgagtggaaacaggctggtggacataaggatccggaaaaaaaacagactcagcgaagaattcctcacagcccatcccagataccagttcctctgcctgaaatatggtgcacctgaagattgggaactcaaaacacagcaaccacttatgctgaaaaaccagctactaacactgaagataaaataccctcatcaacttgatcagaaagtcctggagaaacaactgccgggctccatgacaattcaaaaggtgaagggattgctgtcacgtcttctcaaagttcctgtgtcagaccttctgttgtcctatgaaagtcccaaaaagccgggcagagaaatcgagctggaaaatgacctaaagtcattacagttttattctgtggaaaatggagattgtctattagtgcgatggtgacaaccaactaataaaatttaaagaccacactgcttatcgtgtctggggttcaccggaaataaatgattcactggaacaattctactgtcaaaacaaagggggtttacaacttgtcctaaggtataacagggatgtattttttgttgggaagtgaccatttct

SEQ ID NO: 189127 - DNA, 1049 bp, Homo Sapiens
ttgggcaaacaaagggaagcctgcaacaagttaagctgaagaccgaagcaagagctggttcaggtggcagccacagcagcctcagggacctcagcaactatggcctcctgcccagactctgataatagctgggtgcttgctggctccgagagcctgccagtggagacactgggcccggcatccaggatggacccagaatctgagagagccctgcaggcccctcacagcccctccaagacagatgggaaagaattagctgggaccatggatggagaagggacgctcttccagactgaaagccctcagtctggcagcattctaacagaggagactgaggtcaagggcaccctggaaggtgatgtttgtggtgtggagcctcctggcccaggagacacagtagtccagggagacctgcaggagaccaccgtggtgacaggcctgggaccagacacacaggacctggaaggccagagccctccacagagcctgccttcaacccccaaagcagcttggatcagggaggagggccgctgctccagcagtgacgatgacaccgacgtggacatggagggtctgcggagacggcggggccgggaggccggcccacctcagcccatggtgcccctggctgtggagaaccaggctgggggtgagggtgcaggcggggagctgggcatctccctcaacatgtgcctccttggggccctggttctgcttggcctgggggtcctcctcttctcaggtggcctctcagagtctgagactgggcccatggaggaagtggagcggcaggtcctcccagaccccgaggtgctggaagctgtgggggacaggcaggatgggctaagggaacagctgcaggccccagtgcctcctgacagtgtccccagcctgcaaaacatgggtcttctgctggacaagctggccaaggagaaccaggacatccggctgctgcagcccagctgcaggcccaaaagaagagcttcagagcctgatgcaccagcccaaagggctagaggaggagaatgcccagctccgggggctctgca

SEQ ID NO: 189128 - DNA, 942 bp, Homo Sapiens
agctaaagcatgttatagtgctgtactttagattcaaacaatgcaacatttaaaaaaatcaattatacattctgaaaccatttgacaaccaaactgtaacactccaaaggttattacaactttgaactgaaatggtaccatctatatcatagatggctctcccttcttttgtcttttttaactatttaaaatatagtatgacatatataaaaattaaacttttgcatattcactcaagctactattactatacatactgtcttataaattagttttggattaaaaatcagttaaaatattgtgaaataagatatttcagtggtggggaagtggatatgaaaatgatacagttcaatgtgtaagaagaaatatagtttattaatgttaaacagcttttttcttacacaaattttattcccttcaaattaaattagaaacccatttagttatgggaagaatactcatggcgcttactgactagattttcctaaccgattgggattaaaacaaaaatgccacatcagaaacatgttgacataatcaaaggaaacagttgtttacaaaaaaagagaatcattagaaatcagtaaatggcattcaaatgtaaagctatcttgtttcttacagctaatgtcatgttagcaatgtgagacttaaagaaagtgaaactcaaacctcagtatatctgttaaagaccaaataacagttatattcactcagggaaaaataaatagcaacttcacaagttagggttttgtttctagttctactgtgaaagataatcactctttagcttaaaaaggctccctgatgtcctcattataaatctagacacaggaacagttatttgagcctgagtccctattatgaattaattgtaaagatgtgttaaatcaaaacatatattcattccaacttttttgtacaaagttcgcttttatg

SEQ ID NO: 189129 - DNA, 1050 bp, Homo Sapiens
ttggcagctgtacggtttcaggcagcggcagcgagccaggaaggagtggaggctgcaccgcggcctgtctcaccgcagggcctccttggaggagagagccgtttccagaaaccccctgtgcaccctgtgcctggaggagcgcaggcacccaacagccacgccctgcggccacctgttctgctgggagtgcatcaccgcgtggtgcagcagcaaggcggagtgtcccctctgccgggagaagttccctccccagaagctcatctaccttcggcactaccgctgagccggcgcccgggtgggcctggacacagatgacctctacgggagtctgaacgccaagatttagtctcaggattaaccttgcttgcacagaagttagaacactctcagttttttgtcatgtaagatactaacctagccaccctgggagagaacagaaagctgtccctggctgcgctttctcagccctgggaggggcgcctgaacccagaacatttccctaaccccaacctggtaggactcagccacttcttcaggaatttcacttatttggacgggattttaggtttccctcccttccccaaaccatacagttgagaagtaattcagaagtaggccagaagacactttattcgtttatattgtgagaaaacagccccatcaggcttgtgttaaggcaatggactgaatgagtgcgtgctgggtggggtggggcacggaggctggcgggttgcttcagccagtgcagtgagaacagcagccccacggccccatgggaggcggcgctgctctccccgagggcggctgggcagagcacatcccccaggacttgatgaccacacggggcagagagaaaccaaccaaggccagcacctccgtcggaagcatttggcacacacaccttcaatacacgtcaaggtcgcttccagttttagaaaacagaaatctgcatctcagcctgagacgcacagagaggtctcttcctgacccagacgcactcactagccaggtcctgggggtatgggggctgccaggggcgcccgagccctc

SEQ ID NO: 189130 - DNA, 1396 bp, Homo Sapiens
  misc_feature (910)..(919): n is a, c, g, or t
ttggctgagtatgctagtaataaatgggagtcatatatgactttgttcagatgaccttattttttcataattttgtagcttgttgctatccatgaacatacgcatccctcagtagacagtttcctttactgtgtgcatttttactgtacactgtatagagtagagtatctgttaagtaaaatatatatgtaaatttatgtcttcgtgttctgaatgttagatggaaaagcagaggagcaacactacactgtactgacccctgggaaaataaaatgattaatgtacctaggctgtcactttttcaaggatatacacatctgtgtttttatatatgtgtggtatgaaaatttgaaacctcctgttgtctccaaaagggtcttggtgaccactatatcaaggattttgtttgctgaggtaaagacaatttctcaatatagaaactattcactaagaacttaaaaccatcaggattctagatttacttagctataagaagttaaatcccacgttctgataatctttattcttctacatgttttcctggaatgatgtgtcaaaccagggtcatttttaagttcatataattttctttcataataatgaggacttcctttttctaggttattgttatatttctagtaacactgaaggtaaaataagcttataaaagaaggaaaacatcagaatggtgtatctagaatacacaatcttgctccttactcctccatcatctctaatgaaatttttcttgatgtctgtggctcagtcagtatatattttgaaagattcattgtggtgaatattttgagtcctgacagtttaaacgtgatagagggaacaaaggatttatatattttttgtacaaagttttttcttaaactgtataattttgtaaataatttgtttgggnnnnnnnnnngtgtactaaaactaccagcgtatagatttcaataagaattgttgtatttttgtatttggaaactgaaaattacagtaaataaatggaactctaagaaaaatttcagtagacagttcaacagaatgagattccttttcatatgatttttttgacctcaaaatggacatcttatttcactctcagtaaaaagttgaaaatttgactttttagtattgggggcagaagatagaagtgtgttaaagtgaaaaacagttttttcagtaaggtttgaggccctttctataagttttcagtacaccttaaacaggactaaaaatactttaaaagtgtgctttcaaagaattttaaaacatgtttgactcaaagatgaatttgaagtgagttaattataatactggaaaacttccggttagcataaaatagttttatatatatcccctgccccctttgggatttacttccaccatcaaattcttc

SEQ ID NO: 189131 - DNA, 615 bp, Homo Sapiens
  misc_feature (184)..(192): n is a, c, g, or t
ttggatagaattccatgaatcataatgactacgtaagacccttttctggtaatgaaagcatggagtcttaaccaaaaagctaagcagaattgttagatcttttggtttctgtcataatgtactattggaacttcaagtagatatagtacattaatatgaaatactttgaaatacaccatctttnnnnnnnnnggcacttacacaaaaatcatgtaacactaggtaggatgttgaaatgactggtatgcaatattttttaaagccttcatttttggtcagcataagtttcctttaattatttttctgtttccagttggacttcactttgaggcttaacatagcaaagtgagtataaagttctacaatttagtcattgtggatttcaagtcatttatgatgaaaatggaaatgtgtagtttacttaagaaaattttcttcttctgtaacatctaactcgtcatcctcatcatcttctgcttgttgatcctttcttagtcgacaagtggatacctgtcctgttccagatacacacttagctgacagtcacctcttcagagatcactttgaatttgctcttacaatatctaaaccagattattcatctcgtttagccaa

SEQ ID NO: 189132 - DNA, 1085 bp, Homo Sapiens
ttggcaggccttgttcatcaaaacaggtgacagtgagtaaccaaatgcagaccagttctatgcaggataatgataaattcccttctagctctattgtaaattgttgtacagatgtcatatttcaattactaagtttcagcagcttattcttgtacaaatgtttaaaatatggcttttctaattggatattgtattttttttaagtcttcttgaaggcactctaattgctgctaaatgatgttgcttctttgctaaaaaattaaatgacctagaaggtgcaagttgactgtacatcatagatattaaaaagcagacagtcattaacaatcaagatgtaaaagtgatccatgttggacataattgagtttttaaatcagtttattgggttctagggctgtagaacacatagatactagatttttaatttgttcatggttattctacatttctagaaagttcttatcagcaagatggtcccataagcaaatttcttgtggtttgtacagatttgttaaaatgtgaacgttttctaactgcctcgtagggtagaaaccaatatttttcaggatgctgtatttcactcctgtaaggactttttctttattgtcacattcataatgctgatacttacatgtaagttgttcatgttgcagaaaaaggttatacgtaccacggattctctttaatattgtacagttaaactgtatttctgatgttgcaagccattttgttttttcattgtacatagacacattgtctctttaaaatgctgctgaaattgtagagagtatagcccaaacagtaataaacaatgacagttaaaatgtaaagactatgaaaattacattggaagggagctttcaagatggtaggatattgactaactgagctccttcacttaaaaatcagctgaataaattccttaagtatacttcaagacaagtgtaaattgtttcaagctgttaaagttaaacctaataaccattatcaaggcaactcctgggtaagtaacacttagaaccatcaagagtggtttaaggggctggctatacccattcctctgtagagcacagagaaatcctatt

SEQ ID NO: 189133 - DNA, 1498 bp, Homo Sapiens
  misc_feature (434)..(451): n is a, c, g, or t
aaatcaaacaacctgccactcactcgacgtcacttgcaggagtcacatcacagcatgcttttaattgataatagcttctctacttcttctgagcagagaaacaaggcttggcatagcaaccatcccatctccaaagctcaacactgccagtgagaagcaaggctcagtctatctctagactgcgtgcgagagatggggaggaaggagagagggcaggagatgcttgtcttagaagcagaaccagtttagaagagaagtttgttatctgagttcaccactacctcatcttatagaaaataggttggagagcatctgtaaaaccaacagtatctttaaggtgaaattgcagaattttgctgcatacctggacacaagagaagtgaaaagttgcaacaagttttaactagcagcaacaaagaaagttcgataacagnnnnnnnnnnnnnnnnnnagcaatattcctttgcaagttcattaagaaacactgtaatttaatggggcgtacaatatggaacgatcttcttttgctatagtgctgttcgctgaatagaaccgacctttgcaaagatttcaactggggtgtaacctatttacacagtagtagctcctggtttgagtggtaaaattggtgctatgtgatatcctcttcttccgaacagtaatcccgacccttttcaattttttcatccagcattctgaagaattcttgttggctttcagagatgtgcatgtttgctctgggttgatgaactaatcccggaacctctttattagttttaagtcttacatttgagctggcacttttttccaagttttcttggttcctggctgctattttctgctcttcttctgccccatttttcatgtatttgacctcttccactggtttgatcctatactcatcgccaaacacatctccgttctggtagtttttccctttctgggcttcctcttcattttgaacagtggcaacatgcttggcggaggcacagcccatagtctcattcggtcagcttcagccgggctgaactgcaaatcatctctacagacacagggacattttttttctttaaacacaaagaaaatccaccttgctgctgagttggtcaagatgtgtgcacctgcaagaaaagaaagctagattagaatgggcagtgactgcagcaaaacacaagcctcactatgttggtgtgctgtgccctgcagtatactagaagtcatgcacagacccacccatcgcactggtgttgtggtgggcacagaagaaccatgtgcagcgtggcccattctcacttgatttcccactcagaaagcaagatggaaaggcatgtccctatgcaacacatggccaaggagtgaactttttgaggagataccaaaaatacgtatttattcaaatacgtatttgggcactactgcttgccatacatactcttaaagtacctgtaagtttactaatgttctgaaatctcaaaaactgtcgaggaaggagagccaa

SEQ ID NO: 189134 - DNA, 1539 bp, Homo Sapiens
aataaacactttagatttattctgccatttctgaagccacctcatttaatttatacataggatataaatggctatacatttttacacacttttatacaagtttaggttgtactactgagtttgttaaaatgtacccattatttactcaaaatatttattgttacaagaaaaccgtaagaagcttgtgtaacatgaacagcaagtattgaaaacgaatatgtaaagtaaatggttttgccctgactaaatcagcctcagtattttatgcttttagtagaaaagcccattaaacaaaatagaatcctgggggatcaaatcatatgaatgattcatgaaataacacttctgaagcaaccccagaatcatataaatgtaagggttaaaggtcatatgtactaagcatgggtcagaggaatagaatggatttgttaattttaccctaaataaaaggcgcttgtgggcaacagctctgccatcaatacacatgggcagatgtttccgaatccagccattcccagatttcactgacatgcccttttccacaggctccctgctgatgagatttccccagcagcagaagtttgacatcactgctcccggatgggagaatcagagctctcctcatttgggtcaggggtggctggctcacgaggtttggtccaaccagcagaaccagctccttggatcctggaaaatgcaggctacgaaaggaacaagaaaagccagaatgtttccaatttcctcatgggcaacctgtaaagaatgttctgcaaggtgaactcctcgaatgagattcagggcagcacacatgatgttgagaatgagggagaggatacccagggctgtcactggttccattcggaaattaggagcaggctccaagtgcatcggtgtgtgaccattcatcaccccatttgccacatctgtgtcctccagagtgagaaccgctggaggctgcaacttgagctcctcctgaattttttccaagctgcactccatctgagaggaacttacatagttaaaatgccacttcactttctgaatgatgctgtcaaactcaagaaaagcgtatggcctggaggctaggccaatgcaggtagtgtcataggaagctgtgaattcccaccacagggtctccaggaagcagaaggccatggctgctggacactggcaggagcagatagccatgcaggccacgtccccgaaagaagaaaaatgtatactaaagtcacaaccttctgcagaacctcgacctggatactgggccagtcgcaaggctaaactcttgagccgtctcctccattccaaaaaatcttgggtgtggtaaaaatcagtagaggctgagaggggcagtccatcccttacccgtaccacgcaggcaaaaaagatcacggacatggtccacaagagaagtcatgaggacacctcgcccggacggcggccttcggaagtcggcgcctgccagctacccgccgcctcctcagcaatcttagccgaccgggagggctcggcccaggtcaccggcagcccaggcgccaa

SEQ ID NO: 189135 - DNA, 1255 bp, Homo Sapiens
ttggcgaggaagagactggttcgccgcggggaccgggcagggctccccgtcggagtgcactgcgccggacacttcaagccctggagggacaggaaagccagaaatggacttcgtgagactcgctcgactgttcgccagggcccgccccatgggactgttcatcctgcaacacctggacccctgtagagccaggtgggcaggaggcagggaggggctgatgcggccaatgtgggcgcccttcagcagctcctcctctcagctgcccctcggccaggagcgtcaggaaaacacgggcagcctgggctctgacccgagccactccaactccacggccacgcaggaagaagacgaggaggaggaggagagttttgggaccctctctgacaaatactcctcccggagactattccgcaaatccgcagcccagttccataacctgcggtttggggaacggagagatgagcaaatggaaccggagcccaaattatggcgaggccggagaaacaccccgtactggtacttcttgcagtgcaaacacctgatcaaggaagggaagctggttgaagccctggacctgtttgagaggcagatgctgaaggaggagcgattgcagcccatggagagcaactacacggtgctgattgggggctgcgggcgggttggctacctgaagaaggccttcaacctctacaaccagatgaaaaagcgggacctggagccctcggacgccacctacacggccctgttcaacgtctgtgccgagtccccctggaaggactcagctctacagagcgccctgaagctccggcagcagctgcaggccaaaaacttcgagctcaacttgaaaacataccacgcgctgctgaagatggctgccaagtgcgcagaccttaggatgtgcctcgatgtgttcaaggaaatcatccacaaagggcacgtggtcacagaggagaccttcagtttcctgctcatgggctgcatccaagacaagaagacaggcttccggtacgccctccaggtgtggcggctgatgctgagtctagggctacagccgagccgggacagctacaacctgctgttggtggcagctcgggactgtggcctaggggacccccaggtggcctcagagctgcttctgaagcccagggaggaggcgactgtgcttcagcccccagtgagcaaggcagcggccaaggaggacagcccaggccaaagcaaggcaacctcatgtcagccatgctgcatgtggaggccc

SEQ ID NO: 189136 - DNA, 1268 bp, Homo Sapiens
ttggcatcatcctacaactcacattagagaacatcctggcttttgagcacttttcaaacaatcaagttgactcacgtgggtcctgaggcctgcagcacgtcggatgctaccccactatgacagaggattgtggtcacaacttgatggctgcgaagacctaccctccgtttttctactagataggaggatggtagaagtttggctgctgtcataacatccagagctttgtcgtatttggcacacagcagaggcccagatattagaaaggctctattccaataaactatgaggactgccttatggatgatttaagtgtctcactaaagcatgaaatgtgaatttttattgttgtacatacgatttaaggtatttaaagtattttcttctctgtgagaaggtttattgttaatacaaggtataataaaattatcgcaacccctctccttccagtataaccagctgaagttgcagatgttagatatttttcataaacaagttcgagtcaaagttgaaaattcatagtaagattgatatctataaaatagatataaatttttaagagaaagaatttagtattatcaaagggataaagaaaaaaatactatttaagatgtgaaaattacagtccaaaatactgttctttccaggctatgtataaaatacatagtgaaaattgtttagtgatattacatttatttatccagaaaactgtgatttcaggagaacctaacatgctggtgaatattttcaactttttccctcactaattggtacttttaaaaacataacataaattttttgaagtctttaataaataacccataattgaagtgtataatataaaaaattttaaaaatctaagcagcttattgtttctctgaaagtgtgtgtagttttactttcctaaggaattaccaagaatatcctttaaaatttaaaaggatggcaagttgcatcagaaagctttattttgagatgtaaaaagattcccaaacgtggttacattagccattcatgtatgtcagaagtgcagaattggggcacttaatggtcaccttgtaacagttttgtgtaactcccagtgatgctgtacacatatttgaagggtctttctcaaagaaatattaagcatgttttgttgctcagtgtttttgtgaattgcttggttgtaattaaattctgagcctgatattgatatggttttaagaagcagttgtaccaagtgaaattattttggagattataataaatatatacattcaatctga

SEQ ID NO: 189137 - DNA, 1286 bp, Homo Sapiens
ttgggtcccttctgaggtccacagccagacatgggaactggagcgacagaagcttctggaaaccatgcagcacttgcaggaggaccgggacagcctgcatgccaccgcggagctgctgcaggtgcgggtgcagagcctcacacacatcctcgccctgcaggaggaggagctgaccaggaaggttcaaccttcagattccctggagcctgagtttaccaggaagtgccagtccctgctgaaccgctggcgggagaaggtgtttgccctcatggtgcagctaaaggcccaggagctggaacacagtgactctgttaagcagctgaagggacaggtggcctcactccaggaaaaagtgacatcccagagccaggagcaggccatcctgcagcgatccctgcaggacaaagccgcagaggtggaggtggagcgtatgggtgccaagggcctgcagttggagctgagccgtgctcaggaggccaggcgttggtggcagcagcagacagcctcagccgaggagcagttgaggcttgtggtcaatgctgtcagcagctctcagatctggctcgagaccaccatggctaaggtggaaggggctgccgcccagcttcccagcctcaacaaccgactcagctatgctgtccgcaaggtccacaccattcggggcctgattgctcgaaagcttgcccttgctcagctgcgccaggagagctgtcccctaccaccaccggtcacagatgtgagccttgagttgcagcagctgcgggaagaacggaaccgcctggatgcagaactgcagctgagtgcccgcctcatccagcaggaggtgggccgggctcgggagcaaggggaggcagagcggcagcagctgagcaaggtggcccagcagctggagcaggagctgcagcagacccaggagtccctggctagcttggggctgcagctggaggtagcacgccagggccagcaggagagcacagaggaggctgccagtctgcggcaggagctgacccagcagcaggaactctacgggcaagtggtctccttgcgccagattcagcgcagagccgcccaggaaaaggagcggagccaggaactcaggcgtctgcaggaggaggcccggaaggaggaggggcagcgactggcctggcgcttgcattagctagagagggatagaaacctcatgctggtaggagacaggagggcagacaggcaggacactatggcccattcttggcctgggtcctggggcttaaggtgtggaaagaggaaggtgagggaggctctat

SEQ ID NO: 189138 - DNA, 1346 bp, Homo Sapiens
  misc_feature (1078)..(1094): n is a, c, g, or t
ttggcaaacacaagaggaatttggctatcactggaggagtgactttgtcggtcattgcatccccagttattgctgcagttagtgttggtattggtgtccccattatgctggcatatgtttatggggttgtgcccatttctctttgtcgtggaggcggctgtggagttagcacagccaacggaaaaggagtgaaaattgaatttgatgaagatgatggtccaatcacagtggcagatgcctggagagccctcaagaatcccagcattggggaaagcagcattgaaggcctgactagtgtattgagcactagtggaagccctacagatggacttagtgttatgcaaggtccttacagcgaaacggccagctttgcagccctctcagggggcacgctgagtggcggcattctctccagtggcaagggaaaatatagcaggttagaagttcaagccgatgtccaaaaggaaattttccccaaagacacagccagtcttggtgcaattagtgacaacgcaagcactcgtgctatggccggttccataatcagttcctacaacccacaggacagagaatgcaacaatatggaaatccaagtggacattgaagccaaaccaagccactatcagctggtgagtggaagcagcacggaggactcgctccatgttcatgctcagatggcagagaatgaagaagaaggtagtggtggcggaggcagtgaagaggatcccccctgcagacaccaaagctgtgaacagaaagactgcctggccagcaaaccttgggacatcagcctggcccagcctgaaagcatccgcagtgacctagagagttctgatgcacagtcagacgatgtgccagacatcacctcagatgagtgtggctccccccgctcccatactgcagcctgcccctcgacccccagagcccaaggtgcaccgagcccaagtgcccatatgaacctctctgccctagccgagggacaaactgtcttgaagccagaaggtggagaagccagagtatgaagtggaatgaatgctcctgttctgagaagcacacttgtaactgcatcttttggaannnnnnnnnnnnnnnnnccaaggggtagagatttatgtattttatttcacagattctctggtcacaggtttttgcccagggaaattctgagaaattcacaatttcttaccagataaaacatgaaaagtttgccgttagttcccctcccctcccctccctctttttagttttaatttattggttaaactgatggcagcaatccatgaggtgtgtcaaagagtgtacatatgtatgtgtgtatattgaatgctaaacatattactgaaaga

SEQ ID NO: 189139 - DNA, 1572 bp, Homo Sapiens
ttgggtccacattttccaaattgaagatggagatcaagaagagccggcgccatcccctgggccggccgcccacccggtccccactgtcggtggtgaagcaggaggcctcaagtgacgaggaggcatcccctttctccggggaggaagatgtgagtgacccggacgccttgaggccgctgctgtctctgcagtggaagaacagggcggccagcttccaggccgagaggaagttcaacgcagcggctgcgcgcacggagccctactgcgccatctgcacgctcttctacccctactgccaggccctacagactgagaaggaggcacccatagcctccctcggagagggctgcccggccacattaccctccaaaagccgtcagaagacccgaccgctcatccctgagatgtgcttcacctctggcggtgagaacacggagccgctgcctgccaactcctacatcggcgacgacgggaccagccccctgatcgcctgcggcaagtgctgcctgcaggtccatgccagttgctatggcatccgtcccgagctggtcaatgaaggctggacgtgttcccggtgcgcggcccacgcctggactgcggagtgctgcctgtgcaacctgcgaggaggtgcgctgcagatgaccaccgataggaggtggatccacgtgatctgtgccatcgcagtccccgaggcgcgcttcctgaacgtgattgagcgccaccctgtggacatcagcgccatccccgagcagcggtggaagctgaaatgcgtgtactgccggaagcggatgaagaaggtgtcaggtgcctgtatccagtgctcctacgagcactgctccacgtccttccacgtgacctgcgcccacgccgcaggcgtgctcatggagccggacgactggccctatgtggtctccatcacctgcctcaagcacaagtcggggggtcacgctgtccaactcctgagggccgtgtccctaggccaggtggtcatcaccaagaaccgcaacgggctgtactaccgctgtcgcgtcatcggtgccgcctcgcagacctgctacgaagtgaacttcgacgatggctcctacagcgacaacctgtaccctgagagcatcacgagtagggactgtgtccagctgggacccccttccgagggggagctggtggagctccggtggactgacggcaacctctacaaggccaagttcatctcctccgtcaccagccacatctaccaggtggagtttgaggacgggtcccagctgacggtgaagcgtggggacatcttcaccctggaggaggagctgcccaagagggtccgctctcggctgtcactgagcacgggggcaccgcaggagcccgccttctcgggggaggaggccaaggccgccaagcgcccgcgtgtgggcaccccgcttgccacggaggactccgggcggagccaggactacgtggccttcgtggagagcctcctgcaggtgcagggccggcccggagcccccttctaggacagctggccgctcaggcgaccctcagcccggcgggggaggccatggcatgccccgggcgttcgct

SEQ ID NO: 189140 - DNA, 1305 bp, Homo Sapiens
catgatgatcacagatgcagtcacattttctgagttcttgtctctctgccagtgccacccagatagcctcacaaaactttgacccagccactgttagtgtcgccaccgcccataaaggagctgagcccagcaggggcactgcctggggccctgtagccaaaaggctacagcaggagctgatgaccctcatgatgcctggtgacaaaagaatttctgcctaccctgaaagccttatcaaatggacaccatccatgaagcagctggcacagtgtatgaagatctgaggtataagctcttgctggagttcctcaatgactacccacctttacgatgcacccacagtgaagttcctcacaccctgctaccaccctaacgtggacacccagggtaacatatgcctggacatcctgaaggagaagtggtctgccccgtatgatatcaggaccatcctgctctctatccagtgcctgctaggacaactcaacattgatagccctttgaacacacatgctgggattacaggtgtcagccactgtacctggctgaatacttggttttcagtaccacaagaactatgagctggttatccacttcatgtggaatcataagcgtcccaaagtgacaatacatatagattgccaggcagtgaaacagttaagatgccaccatagctttcttttcaacatctttctaagattaccttactatttcttttgttccaagtttgtacttcctcacagttctcacatatggaaaggatgcacactttgtagaaacaagaactttatgttatccaagttctaggatagccatgagctccaattatctcagagctctgagtcctctactcaatacccattgagatttatgtgttctgaggcttttgtcttctagctacttacttcattctccatgggtaacgtcattcatccacattaactaatttcctcactccaagctcttttctagagataatctccagtccctgtgcagaaactgtcattgcactttctgctgaaatggcagtttcttctcagcaaggtgagattatggaatccagaatcttttttcaggggtcacatgcccatttccccacttgcatgaatgtcgacactgcagccacagttttggccgtaaatgtgaatttggcaagtaaccactgttcccagggaaatgtcccaatcagaagaagattatctgggacactgatactgacagggtagatgggacattctgagggacccggagcagggtgccacctcctcaacttccctgagggctgcctagaatctgtttcctctcact

SEQ ID NO: 189141 - DNA, 1747 bp, Homo Sapiens
  misc_feature (52)..(65): n is a, c, g, or t
ttggactttatcattgagggcttactgatacaatgaaatgagtttcatgacnnnnnnnnnnnnnnaaacactttttgaaatagagtgtgctgtgtttaaaaccaaaaatatgcatgttgtctctgaaaagtaggcattgaaacagacttttttgtagtcagtgttaataaaacggatcctgtttgggccttcattgttaaggtggacttcatggccactggaaggtctgttttggtgttacctgaatgtgacacaggccctggggtgtgcgtgtttctctaactgtctacacatgcacataggcagactttctcatagaatgttcttgaaaggtgattggcaaagtcatgcaggcccgccttaaagcgctgattagaacagtccaacacagtccgacctcactcaatacccacaaccatcgaaaatggattcttagtaccagacaatcccagtaatgaaggtttagtttccttgaaggaaactacagaaaaggaaagaagcagaatgagaaaggaatggtacttaggtgtttggtatgctgctcacgtgaagtcagcccacaccagccaaaccctcgtggaagatctgctgcaaccattatctttgttcttgagttcatcatgcatttaaaatgagatgcaagagcatttagcataccatgtaaatatggaccttttaaaattaaaatactattggaagtgctttcaactcagccacatcttagctattagttctttgtgttgtcttatcaaagtttaatggatacagttccacagttgttgatgtgtttgtgtgtatattcgatttttataaagatggtagtaagtcaatacatttatcctgatctgtgtattatttgttcacaaattcaagaagcttaaaggtcgtaaatatcagtatctcataaggtaaaccaatagctgattatgtggagccaagttacttcttttctttttgcattatcttgttttggttttgtgctgtaatagaagttcacttagctactttagataaccttgcattaccactggtctggccacgtttgttaaatccttatactgatattcttctaaagagtaaatctcatcatttttccagacaaattttgaggggtttctctgttttgtggacaggcagcagcctccgtaggcacccgcaccctgccttgctggaggagatgggatggggcgggaggtggcttcaccataactatttttaatatgggtcattcttagcatgatttgtaaaggtctcaggcaaacagttgttgaagcttgcttctgtggcatttctgaattgtggcagagcttagatcctgcacccaggggtctttttttcaaacagcatcttgctcagttctgtgaacagaaggctttgttactgaaggaggtggaagaggagtttagggtgaaaaggaggaagggatggacagacccaggtgaggagaggcctggggattggggaagctgtcatctcagtgttaataatcaacttgcttctaacacactggcttatcacgggaggtcatccagtccggtcggtggagttgagagcccttgggccagggtgtttggcggcacaggggcatccgctggatggcctgtagagtgggggaggggaacgtcttcactgggtggtgatcagctgggacagttcagtagggcagtgagggacccccgaggccctggagccttgtcctggatgggtttgaagactcatcactcatcactgttttcttttggctttg

SEQ ID NO: 189142 - DNA, 1307 bp, Homo Sapiens
ttgggcgagagccgacagctagtctgcaagccaccgctgtcgccatggggagccgcgtctcgcgggaagacttcgagtgggtctacaccgaccagccgcacgccgaccggcgccgggagatcctggcaaagtatccagagataaagtccttgatgaaacctgatcccaatttgatatggattataattatgatggttctcacccagttgggtgcattttacatagtaaaagacttggactggaaatgggtcatatttggggcctatgcgtttggcagttgcattaaccactcaatgactctggctattcatgagattgcccacaatgctgcctttggcaactgcaaagcaatgtggaatcgctggtttggaatgtttgctaatcttcctattgggattccatattcaatttcctttaagaggtatcacatggatcatcatcggtaccttggagctgatggcgtcgatgtagatattcctaccgattttgagggctggttcttctgtaccgctttcagaaagtttatatgggttattcttcagcctctcttttatgcctttcgacctctgttcatcaaccccaaaccaattacgtatctggaagttatcaataccgtggcacaggtcacttttgacattttaatttattactttttgggaattaaatccttagtctacatgttggcagcatctttacttggcctgggtttgcacccaatttctggacattttatagctgagcattacatgttcttaaagggtcatgaaacttactcatattatgggcctctgaatttacttaccttcaatgtgggttatcataatgaacatcatgatttccccaacattcctggaaaaagtcttccactggtgaggaaaatagcagctgaatactatgacaacctccctcactacaattcctggataaaagtactgtatgattttgtgatggatgatacaataagtccctactcaagaatgaagaggcaccaaaaaggagagatggtgctggagtaaatatcattagtgccaaagggattcttctccaaaactttagatgataaaatggaatttttgcattattaaacttgagaccagtgatgctcagaagctcccctggcacaatttcagagtaagagctcggtgataccaagaagtgaatctggcttttaaacagtcagcctgactctgtactgctcagtttcactcacaggaaacttgtgacttgtgtattatcgtcattgaggatgtttcactcatgtctgtcattttataagcatatcatttaaaaagcttctaaaaagctat

SEQ ID NO: 189143 - DNA, 1820 bp, Homo Sapiens
  misc_feature (995)..(1014): n is a, c, g, or t
  misc_feature (1025)..(1120): n is a, c, g, or t
ttggattacatcccaaatatataaaaatttgagtgcctttgcagttgggatggttcctaaaattgcgtatagaattaaggcacagaattgtgtgtaaggtcctgaatctggctaaaatacagtggatgtatgtattggaattatgaggcataagtaaccagtatctatagttagaatctacaaggcctcctttttgcacctgtagactataatataactgttattggtgcctttgaatgttatctctcagtggctagaggtgctgtttcaagcacaatttaaactagggttgaaccactcattgttcaaatcattggtgggctccaatgtaaaatatcactacatcagtccacaagcaacattaaggaaatctaaaggaaatggaatttgactttttagagtataatgatgttctagggcataatgaggaaaatttttaaaaaatagattataatgatacatattggtatcattaagacaacagatttgagcaaatacaattaaggtgtcttattttttgcatcaagtaattattgctgtggtctttctactccacaaaataattttttctttttgcagttgaaaattaactgcattattaactaattaataaaataaatcaagtggtataagggattagtttaccctcaagccgatgactccatggctactgatattagttagtttaggatttttaaaaagcatatcagacccccagtttcaggaattgagtataaatattgcttcttgtcaccctgggacagtaatgccttatagtggcactagtcaccttaagtagattacacatggttgaggtgaataaagctgcatgggaatttgctttcgtgatatatttcatttgcaaacttctacataatcaagttttatgtttaaaaccatcggttctatatatctagctttaggaagttgcccttacaggtgggaccttttgtgttaatctgttttctccccagtcatcttatttggctatgttnnnnnnnnnnnnnnnnnnnngcgagagagannnnnnnnnnnnnnnnnnnnnnnnnnnnnnnnnnnnnnnnnnnnnnnnnnnnnnnnnnnnnnnnnnnnnnnnnnnnnnnnnnnnnnnnnnnnnnnnatgagccacagtgcctggtcttagctgtgtttttaattatgccatgcatcaacataacaccgggccatcttcctatcccttcctatcccatatgtttaatgaaaacatattttatgtgctaaattaggttaatttaccagagatttagcttagtgtttttaaactatagaacaatacccctatagaacaatgtacagctgcacccaaggttaaaaagaggtagcagggaaaacaaacttaaactctttgtatatggtgaaacccatccctctcctgccctctaatggtatgtttacattatttcgttattatacaatgtagtggtataaacagtattattaaactgaaggcataagttaaaggaagtatgttactttgagctgatgtaggctcttccacttttatctgtattttacttatttggggactttgtattgctagggcttcagaatactaactttgacacagctcccagagaggtttgcaaacttttggtttccctctcaaatccatggtagtagtttcaaatgagtttgtggataatggatgtttagtccttatcatttgctgtgttttgacagtttttaatttgcagtattcactcacgaaactgttttattttaggaataatgcaaaaccaaccttcgtccggtgatgagaatagccgtatgatagagaatttggctcatcgtgctttaaa

SEQ ID NO: 189144 - DNA, 933 bp, Homo Sapiens
ttggatattcaacatgcccctaagctctcagctttgaaacaattgctgttggactgcggtttgggaaatggcagcacttccgagagtggcacagagtctgttgtggcccagcacaggatactgatattctgtcagctgaaaagcatgcttgatatagtagagcatgatctcctcaaacctcacttgccctctgtcacttatttgagattagatggcagcatacctcctggtcagaggcattccattgtttcccggtttaataatgatccatctatagacgttctgttacttaccactcacgttggtggcctgggacttaatttgacaggcgctgacacagtagtatttgtggagcatgactggaatcctatgcgagatctacaagccatggaccgggcccatcgcattgggcagaaacgtgtggttaacgtataccgattgataaccagaggaacattggaagaaaaaataatggggttgcagaaattcaagatgaacatagcgaatactgttattagccaagagaattctagtttgcagagcatggggactgatcagcttcttgatctgtttactcttgataaggatggcaaagcagaaaaagctgacacctctacttctgggaaagcaagtatgaaatcaattcttgaaaacctgagtgatctttgggatcaagagcagtatgattcagagtacagcctggaaaattttatgcattctctcaagtaactatcaaatattgtaaatgcaattgctgctagttcagttacatttctgctgatattcagcaaatttctaagtttatggtgaacttttaactcaatgtgtaaatagatctggagaatattcagcataatgctggctcttgtttcactgggggaaacagttattctcaatatttgcactgtattaaatttaaatgttaatgtgaaa

SEQ ID NO: 189145 - DNA, 952 bp, Homo Sapiens
  misc_feature (411)..(428): n is a, c, g, or t
ttttgccaagataaatcacttttatctctataggaaagggaggatctaaaaaaaatataaattacattagtaacacaacataagaaaaagacagggacaaaaacaacagagaagtctgaatgatgctaccctaacctatttataaaaaggccctgcatcagaaattcacaatcctacccacttctaaaaatatatttagacatgtacagaagcggtgggcttgtttttaaattgtttgctttttttgtaaaaatatattaaaggtgaatagaaatcctctctcccttccccctgtccagcccccagctagggactggagatcaggggtaactatctcatggtgttctaaaccttgattactaacactcccaacccctccccaactcacttcacttagaacctgaaacattnnnnnnnnnnnnnnnnnngacatcagcctctttggaaaagcataactctgagggtaaacttgcttttcattggaaacaacacaaaacaacaaacagggggctctaagaacccaactaagctaaatgaaacccagtcaaacagaggctgggtttcagctccacagaaaacttctaacaaagaaatagagggaaaaggccggaatcggggggatttgctagcaattagctgcctttgaaagatcaagaaggggtgttaatggacaaaagggctggggacctgatatgggttacagcagtcaccgcatagtcaggcagttgcctatacaggacagagtcttctcctgctctcccctcattaccctctgtttcctagaaatccccaaaataagcaaagctgggcagaaacagaggggaggggagtagggactcacgtgctaggggggaggtagccaggcttttgcctttggtgtgactagatggagaattgcttggcccctggggtccccaaggtagagaaagcaaatgggctaaaggaaccccaa

SEQ ID NO: 189146 - DNA, 878 bp, Homo Sapiens
ttggcttggttcctgtttgcactggctacagcagggcactggcccctactgtcaccgccacctacacaaagaccctatctctgagcgctgcagcctactgttcagccccaggtttgaggatggatgccctggacgcttcgaagctactggatgaggagctgtattcaagacagctgtatgtgctgggctcacctgccatgcagaggattcagggagccagggtcctggtgtcaggcctgcagggcctgggggccgaggtggccaagaacttggttctgatgggtgtgggcagcctcactctgcatgatccccaccccacctgctggtccgacctggctgcccagtttctcctctcagagcaggacttggaaaggagcagagccgaggcctctcaagagctcttggctcagctcaacagagctgtccaggtcgtcgtgcacacgggtgacatcactgaggacctgctgttggacttccaggtggtggtgctgactgctgcaaagctggaggagcagctgaaggtgggcaccttgtgtcataagcatggagtttgctttctggcggctgacacccggggcctcgtggggcagttgttctgtgactttggtgaggacttcactgtgcaggaccccacagaggcagaacccctgacagctgccatccagcacatctcccagggctcccctggcattctcactctgaggaaaggggccaatacccactacttccgtgatggagacttggtgactttctcgggaattgagggaatggttgagctcaacgactgtgatccccggtctatccacgtgcgggaggatgggtccctggagattggagacacaacaactttctctcggtacttgcgtggtggggctatc

SEQ ID NO: 189147 - DNA, 1767 bp, Homo Sapiens
ttggaaataggggtgagaggtgggaaaagccaaactgttctgtgggtttgggaatggtcatttcccgggaaaatgcatctggatcgatgactaaacctggcccttttctctgggctgtagtgaagccgcattttcacgctggctggcagtgtgctgagagcctcgaatgctctgcggcgtagtgcccttctgccctgcctgacgatgtatcgaaaagatgagagtgaaggagactttgtgcagcaggaaacgggtaggtgaggtgttgggcagttgtgggaacttctgagagtattacagagtggtagaatcggtaagaactctgatttggacttcgctttggtggaactgtgtgcctatacctgcctgtgtgtgtgcaagtgtgcaggttcctttgtatgtatgtgtacgtgtgggaacctgtgtttgtcatatttttcttcatttcacaaaggctttttttgaagcagtggcagtatgcctttgtttcaagaacacatgaaattcttttaacaccagattagtgtgttaccccaaatgaacggttctagccctctattaagaaataaagggaccataagcattttggctgcttatggctgtgtgttactacttacaagagtcttgaaaattatacagaactttgccttctttttttaatgtcttccacaatgttgtgactgattataaccctgtttcccctcagagaagagctatggctcagggatctgtgttgactctggcatttagtggctttgtgaaggaaagaaaccattaaatgacctgacaaaaactgactcatgtctttaaagtagttgaagccacttttagaatgttactctcggttgcttttgtctaattctaatggcttaaagccaagaaaaccatagtataaatctttttgtgtacctatgctagtgtttaaatggcagttcgttgtgataaagtatcagtcacttcaagttttctgtgaaagtttttaattaggttaaaaataattttggcatacgtctctactcagtttataaagcagttccacaccatgcaaacaaaactctaacagcaaaggttatcttgacctgatgttacttgaatctgagagaaagtcattacttactactgcactcctgcttttgtgggaaaaattttcttcttccccagaagagttaacagttgagtgttcagctcctgacttacctttaatttagaggcaatattattactgtttaagtgattatttgcttaacacaggttttattttgtctttttgctggtagattatacaagggacaactttagtgatgaggcatgtggatgatttggtgggagtaggtatatacttagtggaatggtttattttatggaagagaattcattggaggtgagattgaagtatattgtgaagtgggatttgaacagcacatatgctctggtttgctcaaataactgcagtttatgcttacatctaaattttgtttctgttacctaaacgggagcttctagaattacgaaggccatacctgccacatttataaaataatggttttatccctgcccccaaatcatcaggttcctcgggtttaagagaagtggtctaatagacaggaatagaagttgtggtggaggtgatttgggatagactaggtttccttatgcaagtggatatgagctcctcatagaaaccagacctactgtattagacagtaacctctaacctcacctccaagcccaagtatatggccctgctggttacctggtgactacatt

SEQ ID NO: 189148 - DNA, 1186 bp, Homo Sapiens
ataaaagccaactttgtacaaaaaagttggctctgtgctcgccttgtcttggggtggggcccatccgccgaggtggggaccgataggaaaaaccggtgggttgtacccttacacttgtggagtctcctcttgcctctacctactccgcctttgtccttaaggtttttgcaggccagtgccaaacacacactaactgtcctggcctctccgtgacacaagtctcttcccagccttcctcacaggcttctgccgcccccctcatctccaccctcccccatatctgtttgcattaggagttccacgaccatggtggaatgttaaggtgaaccccaccccttcttacagatggggacccagagcctgctcttgggaacagccagagtaagattggaacccagacttgcagtccagcgctgtttgcattaaaagggtgggtgagtcaggacccctggctcaggagccgcctctcctaaaagagggtttcaaggccaaatgggtttgtcaacggtgctgtctccctttcttggagatgctcattagcttatcaaagactgagaagtcccgctgttacagaaataatttagtttgctgtattaactgctcctgggcctggagcagtattcccaccttaagattcccagcatccctgtgctgtcccggctctcattcatgccgaagggcccaacccattggctgtgttctgtttgaagatttggggggcgccttctctttcttccccagggaattctctagcagagggaggggacccaccccagtgaggaagtagattgctgcctctagccagagacctgaactggggaatttgaacattcctttacattgttggagaaatgaagccaaagttattcagatggttttcccaggctaaaggaaagtcacctgcaagagatcccggcactgatctggagcagctgacagggtaagtctcccttaccaaagagaagaaccactctctggcgctggggtgacctgctggctgggcctgtaaggtttccatgttgctgaggccatggagattcccagagctggtcacaccgaccgctctcagggcccgctgccctgggctggcaacaccattctggccttggcctgcagaagctttcagagtcttcactggcagtaggggagatgggggaggaatgatctctgcccagccccttccttt

SEQ ID NO: 189149 - DNA, 964 bp, Homo Sapiens
ttggcagggagaaatctcaggatggcggggagctcaccagtccagccctggggctcgcctcccaccaggtgcccccgagccctctcgtcagtgccaacggccccggcgaggaaaaactgttccgcagccagagcgctgatgcccccggccccacagagcgcgagcggctaaagaagatgttgtctgagggctccgtgggcgaggtacagtgggaggccgagtttttcgcactgcaggacagcaacaacaagctggcaggcgccctgcgagaggccaacgccgccgcagcccagtggaggcagcagctggaggctcagcgtgcagaggccgagcggctgcggcagcgggtggctgagctggaggctcaggcagcttcagaggtgacccccaccggtgagaaggaggggctgggccagggccagtcgctggaacagctggaagctctggtgcaaaccaaggaccaggagattcagaccctgaagagtcagactggggggccccgcgaggccctggaggctgccgagcgtgaggagactcagcagaaggtgcaggacctggagacccgcaatgcggagttggagcaccagctgcgggcgatggagcgcagcctggaggaggcacgggcagagcgggagcgggcgcgggctgaggtgggccgggcagcgcagctgctggacgtcaggctgtttgagctgagtgagctgcgtgagggcctggcccgcctggctgaggctgcgccctgagccggggctggttttctatgaacgattccggcctgggatgcgggccaggctgcaggcggcatagttgggcccattcgtcctggaaagggactggggggtcccaacttagccctgggtgggccgggccgggctgggctggggtgggccccagtcggctctggttgttggcagctttggggctgtttttgagcttctcattgtgtagaatttctaaatccccc

SEQ ID NO: 189150 - DNA, 856 bp, Homo Sapiens
  misc_feature (713)..(749): n is a, c, g, or t
ttggtgctcctctgctctaaaattggtgtttgggtgatcagaagcaggtagccaatgggaagagcacttctgagtgataactaaagcagtttggtggccttttcacattctccaatgttcaaacatattttccactttccattttctctttcacctcattttgcctctctatcccccatccctgcttatttcttaagcccattgatggcactcattaaattgtatttagggctaatgagtcattgttccttaatatcgttttcaatatgccacaatttaggacacatttaaaattttctaaaacaatatcctaatcaatattgactaatttgagccacattcccaactctaactcagcacacactgccagtcttccccaatatctgtctcctctcaattccccaccacaccttataaaattgtaatcaaagatatctcactctgtcattgttaatctaagaataaaaacactgactttaatacggttttactaagtttcaaccttctaattaggtaggcctctaggtattctgcagatcactgctggtcttgatagccattaatatatgtttgtattatgttatttttcaactaaatcgcagttggaaaaaaacatatttaatattatgcccttggatctgttactgcatcactagcacttgtgatgcaatagaacacttcgcctgtactgaaagggccaagagtaaatgccnnnnnnnnnnnnnnnnnnnnnnnnnnnnnnnnnnnnngttaaaacatgtctatagagttggcagttaatgctgaatttgtcaaataccccttccaaaattatacttgtatttaaaaaataaatggatctacctaatttctattg

SEQ ID NO: 189151 - DNA, 1074 bp, Homo Sapiens
  misc_feature (247)..(309): n is a, c, g, or t
  misc_feature (641)..(652): n is a, c, g, or t
ttgggtttcctgagcagccgctgggtgctaggcgcagtgccagcgcggaatgtccagggagacctggtgcccaaagcttggacccatcgtgagaaatgagaagcagatacaaagcagtgtgggagtgcagaggagacaaagcaagcctcatcaggcccattgcttgctctgctctcccttgtacttaccagtgcttgacaatatacagttatttactagcttggttattgacttcctacccagcacnnnnnnnnnnnnnnnnnnnnnnnnnnnnnnnnnnnnnnnnnnnnnnnnnnnnnnnnnnnnnnnctattggcgggaagaataaatccggaagagcaggaccagtggacttgctacataatctgtagtcttggagccgcacagggttggtggtaccctcgagcacaccagacttgcagaaaaagcatactccagaggaagctgaggcatgcctgctcgagagccagctgttccatgtgcaattttcctctgatagtttctggtcactgttgccacggtgataatgactgggctatgtcattatctatccgccaacagtaagagaagctttgcagtcgagatattgtttagcagatggagtgttttctgttgaacactaagtactgccacaagttacnnnnnnnnnnnnaaactttgagtatttttttacaatgttgctggaggtgatctgtttatgctttgagagtgttcgaatttaaaatcactaaaatcatgtcagtgagtgagtctttcaaataatccttcggcatgaaacctgagcctagtaaactatgaaagtaaactcggcacattacccgaaagtctcaatgtcatattttcacccccatcaatattattgatgattgctcattttctaatgtgggacctgaaatttaccaggtgcttaaagaatctttttgtttttcagattcattgattccaggtaaatcagaggaacaagcaacatgaacagaaatatgtagaaaaagctattatgcagaagcataattgttgtttcagaagtccagcatctggtgcacttaacaatagagaatatattaaactctttcc

SEQ ID NO: 189152 - DNA, 501 bp, Homo Sapiens
caagaaagaactcgtttgaaaccatgtttcatcatcctgtaggtacatctggtcttccttgtgtgctgggggactgcagataggtcaggggtatcagcctcagccactcagacaaggaaagggggcaccacatgagctcagggacccccacccccatccctggcctgggtgatggtacagcgtctggccctgccaggtccttggcctgcacaaagtcagtgacagcaggtgaaatgcccagctgggtgcctgcctggagcgggtgtggggcagtgagcccctgtgggtgtgggcttgggagtggctgtgacagggtggtgagcagggcaggggcaatcagacagccctcagaaggcctcatggcccccggtgagctgcaggaagaggtcttcatccagctcctccccacgggcccgctcccgcgtcgacaggaaaatgtagcccccaatatactcgtgtacaattcggggagctggcagacccaacttttttgtacaaagt

SEQ ID NO: 189153 - DNA, 784 bp, Homo Sapiens
aatttaaaaaaagttttattaaatcatttagacttgaaagaagtcacaagttaacacacttaagtgtgttctgtacaccaccaacccaaatggattgatttcagaatttttataaataaaacataaacatatttacagtgaaaaataaaaacatgttagcaagtgagatgattaaactgttacctataatcagtttgggggaagtaccaacctacaggattacatataagacacttaagatttcattaggcttaaaaagtccatagttgaagaagttagttgtaatatatatgatccatttcttactacggcttttttcctcccaaaactagacctttcaaccaatttacataaaaagcttcattttccctttattggaggtaaaagtacaaaaagctgtaaacccaccctagaaccatctaaggaataaagctattgaatgctacaaataggactataaaactacggacataaaccgttatacagtttgtgctacttgtcctccaaaatagtgcagattcctaatttacccgccagggacaaaaatggagtcagctttttctagaaatcagtttcaaaatcatcatatctctagaaagcatatttctagaacaatacagttaccacacagggggactttccttcttctgcattataaaaatatatccattttagttctcactatatatatatattagggattgctgctacctccttaggcaaatggtgagggctataaagcttggccagcagccagtttcaagccaacttttttgtacaaagt

SEQ ID NO: 189154 - DNA, 1503 bp, Homo Sapiens
  misc_feature (1027)..(1035): n is a, c, g, or t
ttggctttatttaattcatgttatttattcgcggagctcagttcgtgttggggagatgccctcgcctgagccgtctgggcctaccgtggtcactgcgtagcctctttttcttctgacttgagagctcccccagtcagatctcaggcttgtccccctgtcagctgcctccagaagggaaggtagccagtgcctgagaagacagtcccttttctacccaccgcactccataacctccatcttctcccacactgatggcgagcagcccctgagcactttctgggactgggagactgcttggtgttccctgaggacaagagacatcctgacagtgttgggcatctgctccccgtggacacagccccactctccactttctgagcctcagacaacctcattcagcctcttgggctccttttcaaggacattaataacctcaccaacatagctcatgcccttcagctttgacaagaactcacggcttcccaaactctgctttctgcccaccttggatgggaactgtggaccaagcaattaccatcgccttggaacctgcaggaaatggaacagcaattgagacaacttgaacagtcatcaacggaagtccctccactggattcctttgtttctgtcccctccgaggagtcattttggtcgacaggctctcaaggcaactccccattttcaagaggctgctcctgcctgcttcgatcatttctccctgcagctgcctagaccccgttcacagtggggaggagtcaatgtcattctacccctcgctaaacgaagatattaacatctattgctttttcccttcatctgtcacaggaaacagaagcccaggcacaatcttttccagctttgcctgttacccctgtttctgaattgcatctttaaggtattattttgttgacaatagatcctttattcactagttacgcaaattggttcctagggggatactccttaccttcctttgtgatggcccaaaatgtctctaggtatctcaagtgataagtaaatttctacnnnnnnnnntggttaatgttcattgactggctttttaagtgtatattttggaggacgggtgaagaggtaataacgaaagcaagcgagtgaattaggatttcaaagtgccctaatagtgtgagtctccagttcctagaatatgaagagtgctgtcgttggggtgaaaccatgagactgacagatctgcctgaaatggggggtgtgggaggtggtggcgggggttattctctttccttcaggaaatgaacccttcttacatcattcaagttctgctctgaggatcaagcttgggtctgatttaactcagcgacactgtcatttctgcttcattactggactagagggttgagccacccacttgccatttgctcctgtccttccaggaaatcacaattttcatcaatagcccaagagattatttgagactcaggattcagatcagaggttcgactgtggctgggacaggagttgtgtgta

SEQ ID NO: 189155 - DNA, 977 bp, Homo Sapiens
ttggagcagtttctaccttcaagcaatgaagaatcctaacaatagagattgctttggtgaccatgataggaggaaacgaaacttgtaagattggagttgttatttttatgaaattactttaaatatgaattgtactaactgtacctaaatagcaaagccctgtgtagattctggtaatgatctgtctcagggtatgtgtatttttgaagagtgttatgtccttagttttaattttgagtaaagaaaaggctaaaatcatgaattagttacaagcaacagtaccaacttatgtgacccctgaggggtggggctgtgagctcttaatttgtttttgattctgaaaaactctgcttcctggcatccaggagttagagattgagcctttcatcttctttctcaaaactagtttttgatgctttctttcatgggaatagtcacttttttatttagtaaatcgcattgctggaaccaccaaggagtgtggaatgtccttgagtgtattatttatgcaagtcacagtcacgttgccatcatggcagctatgtgaaacactaataaatgtgtttttactttttattcccgttaaaactgatgtaaaacaggataaaggcttgttatagtcacttataagtatctgggtctaagtaatttccttagatgtttctaaagaaacattttcagctttgctcccattatgattccaataaggaacgctttcctagtgcaattttaggagtaaagtttgaagagataaaaatagccaaagataggagacgtctgaattttgaatgataaacagtgatgttttaaaaaagctgttgttcttcagaggcatttgcctaagatattgctggattataccccattggagcttttaattttatttgtatgaattttccaggatttcattaaaaattattattgtattttttaccttaatgaaagattttgggttcaaatatctttctatattaaaa

SEQ ID NO: 189156 - DNA, 1300 bp, Homo Sapiens
ttggaaaaaagttggtttggcattaaaggaccttgctaagcagtactctgacagactagaatgctgtgaaaatgaagtagaaaaggtaatagaagaaatacgttgcaaggcaattgagcgtggaacaggaaatgacaattatagaacaacgggaattgctacaatcgaggtgtttttaccaccaagactaaaaaaagataggaaaaacttgttggagacccgattgcacatcactggcagagaactgaggtccaaaatagctgaaacctttggacttcaagaaaattatatcaaaattgtcataaataagaagcaactacaactagggaaaacccttgaagaacaaggcgtggctcacaatgtgaaagcgatggtgcttgaactaaaacaatctgaagaggacgcgaggaaaaacttccagttagaggaagaggagcaaaatgaggccaaactcaaagaaaaacaaattcagaggaccaagagaggactagaaatactggcaaagagagcagagacagtggtggatccagaaatgacaccgtacttagacatagctaaccagacaggcagatcaatcagaattcccccatcagaaagaaaagcccttatgttagctatgggatatcatgagaagggcagagctttcctgaaaagaaaagaatatggaatagccttgccatgtctgttggacgctgacaaatatttctgtgagtgttgcagagagctgctggacacagtggataactatgccgtcctccagctggatatagtgtggtgttacttccgcctggaacagctggaatgccttgatgatgcagaaaaaaaattaaacttggcccagaaatgctttaaaaattgttacggagaaaatcatcagagactggtccacataaaaggaaattgtgggaaagagaaggtactgtttctaagactctacttacttcaagggatccgaaactatcacagtggaaatgatgtagaggcttatgagtatcttaacaaggcacgtcagctctttaaagagctatatattgatccatcaaaagtggacaatttgttgcagttggggtttactgcccaggaagcccggcttggcctgagggcgtgtgatgggaacgtggatcatgcggccactcatattaccaaccgcagagaggaactggcccaaataagaaggaggaaaaagagaagaaaagacgccgcctcgagaacatcacgtttctgaaagggatgggctactccacgcacgcggcccagcagtactccacgcagccagcgggaacttggatgaggccctgaa

SEQ ID NO: 189157 - DNA, 751 bp, Homo Sapiens
ttggcacacctcgggctccctcagctcccgcttctccgaaccatctgtggaccagggccccggggcaggcatccccagtgccctggttctcatcagcattgtccttatcatcctcatcgccctcaacgtcctgctcttctaccgcctctggtccctggaaaggacagcccacacctttgagtcctggcacagcctggccctggccaagggcaagttcccccagacggccacagagtgggccgagatcctggcgctgcagaagcaattccacagcgtggaggtgcacaagtggaggcagatcctgcgggcctccgtggagctcctggatgagatgaagttctcgctggagaagctgcaccaaggcatcacagtctcagaccctccctttgacacccagccccggcccgatgacagcttttcctgaggaccccggccacgcagctgttcccccacatggacagatggacacacagagcctcggcggccactgctggcacggtgtgagcgccaggcatctcccacccgcccctcccgacggcccaaccaggggctgtgcagacgtggggaccacggaaccgagatgcactttagaccagggagctggcccggcctctggcaggccccccactaacttattttgcccggctgaggttgtggggggcgcctcctggggtgcacgattccctcagctctgggtttaatgtattatatttatttggggccgacagtgcctcaataaagggtcagagtg

SEQ ID NO: 189158 - DNA, 1220 bp, Homo Sapiens
  misc_feature (368)..(671): n is a, c, g, or t
ttggatagaatataatgaaatatattttgaacttaaattatattctatatgtgtatcttcctaggcaaaagctgtaatttccagagagaccattaggaacaggtagtatctatttttctccattatttatttctagaaactcataaaatggattgtatttttctataagaacaaaatattaattaaggtatagatgactgaccaagggcttaatcaaataaaatgactaacagcatctatcataaagccacacaagccttatgttctcatctcaaaaatgctgtgacagctttttggctgctttaaccataagaaaaatgattggtggatgattttattagcccaggcttttaaaaactttcatctannnnnnnnnnnnnnnnnnnnnnnnnnnnnnnnnnnnnnnnnnnnnnnnnnnnnnnnnnnnnnnnnnnnnnnnnnnnnnnnnnnnnnnnnnnnnnnnnnnnnnnnnnnnnnnnnnnnnnnnnnnnnnnnnnnnnnnnnnnnnnnnnnnnnnnnnnnnnnnnnnnnnnnnnnnnnnnnnnnnnnnnnnnnnnnnnnnnnnnnnnnnnnnnnnnnnnnnnnnnnnnnnnnnnnnnnnnnnnnnnnnnnnnnnnnnnnnnnnnnnnnnnnnnnnnnnnnnnnnnnnnnnnnnnnnnnnnnnnnnnnnnttttaatttaatccttctgtagcaaacaggcattcagaaccattccattgatcttaataaagctgctctttactgtttctagtcaaaaatgagacttcgatcaaaccataagattttatactgcagatagtcagcttcaccaaagccgcagaggaaacatgtcgagatcaggcttcctgcttgatagtctcttgactaccattaaaacgaatattgggaggtcatgaaagtcattggtaggccattagcattgatatctttaaaacatctaccctaaaccatctgctatggacccataataagaggcctgttgtatatgaaattgtctagaattcaggtgcaggtctttgccggttaagtaagggagcaacacgtaaaatgggagaggagtggggtgtactcacttgcctcctcttttgtcctgatttaaccagcatttttcaaccctgggaaaatttgcagaatctaagttgattgtaatgattttgagctgcagcagctttactcttaccctttttccacatagttatggtgtttgagttgggaaaa

SEQ ID NO: 189159 - DNA, 1428 bp, Homo Sapiens
ttgggtggccaggaaggcacaggcctgagaagtctgcggctgagctgggagcaaatcccccaccccctacctgggggacagggcaagtgagacctggtgagggtggctcagcaggcagggaaggagaggtgtctgtgcgtcctgcacccacatctttctctgtcccctccttgccctgtctggaggctgctagactcctatcttctgaattctatagtgcctgggtctcagcgcagtgccgatggtggcccgtccttgtggttcctctctacctggggaaatcaggtgcagcggccatggctacagcaagacccccctggatgtgggtgctctgtgctctgatcacagccttgcttctgggggtcacagagcatgttctcgccaacaatgatgtttcctgtgaccacccctctaacaccgtgccctctgggagcaaccaggacctgggagctggggccggggaagacgcccggtcggatgacagcagcagccgcatcatcaatggatccgactgcgatatgcacacccagccgtggcaggccgcgctgttgctaaggcccaaccagctctactgcggggcggtgttggtgcatccacagtggctgctcacggccgcccactgcaggaagaaagttttcagagtccgtctcggccactactccctgtcaccagtttatgaatctgggcagcagatgttccagggggtcaaatccatcccccaccctggctactcccaccctggccactctaacgacctcatgctcatcaaactgaacagaacaattcgtcccactaaagatgtcagacccatcaacgtctcctctcattgtccctctgctgggacaaagtgcttggtgtctggctgggggacaaccaagagcccccaagtgcacttccctaaggtcctccagtgcttgaatatccccgtgctaagtcagaaaaggtgcgaggatgcttacccgagacagatagatgacaccatgttctgcgccggtgacaaagcaggtagagactcctgccagggtgattctggggggcctgtggtctgcaatggctccctgcagggactcgtgtcctggggagattacccttgtgcccggcccaacagaccgggtgtctacacgaacctctgcaagttcaccaagtggatccaggaaaccatccaggccaactcctgagtcatcccaggactcagcacaccggcatccccacctgctgcagggacagccctgacactcctttcagaccctcattccttcccagagatgttgagaatgttcatctctccagcccctgaccccatgtctcctggactcaggggtctgcttcccccacattgggctgaccgtgtctctctagttgaaccctgggaacaatttccaaactgtcagggcgggggtgcgtctcaatctcccttggggcactttc

SEQ ID NO: 189160 - DNA, 893 bp, Homo Sapiens
ttatatccataagaaggagtgggaccccggaaaggaccttgggggacctggctcacctccccactggcgtgtttcttttccagaccacagaggataagggctggtgggaaggagagtgtcaaggacgaagaggagtttttccagacaactttgtactcccaccacccccaatcaagaagctgcttctcttccccagacccatgctggactggaagggaggggactgtccacccctccttccagggcccaggcttgaatgtgtcccctggccgagctctggtctagtcacgcagggttaatgattgttggactccagctttgagccagggcccggccagcagtctcgcagaccccagcgtggggcctctgtgcctgcgagctcctgcgctcttgtgcaccaagcagcttgtggcggcttgtggcagatcccaccccatcccgtcccccaccccaaggctaaacctgcctgtgctcacacacgcatttcccacctgggcttgtgcatgcaatgtggtgtgtgatcagtgtgtgtggcggggggcttccttctgccctgtctccacggggcccccccatcatggacctcccctcccttgctggagctagaatgagggggaggccgccttggcgggagccttggagaggaggaggaaagggggagaggaaattgcagacatagctgaaggcgctgcctgaggcctgtgggccagcgaccctctccctgtccgggctgcagacctctactctctcagtcccgagactgggttcaagtagagggcagatctagatgggggaggactaggactgactcctatggggatggaaaagggactcctgggtgtctttgtgactgtttagtgtgttctgtgaatgtgcgggcaggtatttttgcc

SEQ ID NO: 189161 - DNA, 1183 bp, Homo Sapiens
  misc_feature (576)..(633): n is a, c, g, or t
tggggcggcttccaggtagggcgcgcaaggccgtggtcctgctttgtgcctctgacctgctgctgctgctgctactgctaccaccgcctgggtcctgcgcggccgaaggctcgcccgggacgcccgacgagtctaccccacctccccggaagaagaagaaggatattcgcgattacaatgatgcagacatggcgcgtcttctggagcaatgggagaaagatgatgacattgaagaaggagatcttccagagcacaagagaccttcagcacctgtcgacttctcaaagatagacccaagcaagcctgaaagcatattgaaaatgacgaaaaaagggaagactctcatgatgtttgtcactgtatcaggaagccctactgagaaggagacagaggaaattacgagcctctggcagggcagccttttcaatgccaactatgacgtccagaggttcattgtgggatcagaccgtgctatcttcatgcttcgcgatgggagctacgcctgggagatcaaggactttttggtcggtcaagacaggtgtgctgatgtaactctggagggccaggtgtaccccnnnnnnnnnnnnnnnnnnnnnnnnnnnnnnnnnnnnnnnnnnnnnnnnnnnnnnnnnnagaaggaaggagatctgaaatctcggtcttccaaggaagaaaatcgagctgggaataaaagagaagacctgtgatggggcagcagtgacgcgctgtggggggacaggtggacgtggagagctctttgcccagctcctggggtgggagtggtctcaggcaactgcacaccggatgacattctagtgtcttctagaaagggtctgccacatgaccagtttgtggtcaaagaattactgcttaataggcttcaagtaagaagacagatgttttctaattaatactggacactgacaaattcatgtttactataaaatctccttacatggaaatgtgactgtgttgctttttcccatttacacttggtgagtcatcaactctactgagattccactcccctccaagcacctgctgtgattggggtggcctgctctgatcagatagcaaattctgatcagagaagactttaaaactctttgacttaattgagtaacttcttcatgccatatacatcattttcatatggtaaagggtaaaatatgcttttgtgaac

SEQ ID NO: 189162 - DNA, 1538 bp, Homo Sapiens
  misc_feature (200)..(491): n is a, c, g, or t
  misc_feature (506)..(517): n is a, c, g, or t
  misc_feature (556)..(573): n is a, c, g, or t
atttctaaaactctttcctttgatattacttcaaacacttcccttaagtgtttaaaccttaaacttatttagtattaaggttaatacttaaacattactattaacttatttagtattacctgtaaccttatttaaggtttaaaccttatttagtattacctgatgtacccttgttaaacacttggtaggtttttaaaatnnnnnnnnnnnnnnnnnnnnnnnnnnnnnnnnnnnnnnnnnnnnnnnnnnnnnnnnnnnnnnnnnnnnnnnnnnnnnnnnnnnnnnnnnnnnnnnnnnnnnnnnnnnnnnnnnnnnnnnnnnnnnnnnnnnnnnnnnnnnnnnnnnnnnnnnnnnnnnnnnnnnnnnnnnnnnnnnnnnnnnnnnnnnnnnnnnnnnnnnnnnnnnnnnnnnnnnnnnnnnnnnnnnnnnnnnnnnnnnnnnnnnnnnnnnnnnnnnnnnnnnnnnnnnnnnnnnnnnnnnnnnnnnnnnnntaaatttggtagccnnnnnnnnnnnngagacagagtttcactcttgttgcccaggctccatctcnnnnnnnnnnnnnnnnnngggatcacagatctctttgaaaatcagtggcccctttagactttctgtgccaaaaaagttatgctttcacctcagcacccagttttccctagtttatctgaagtttcatggacatatgatgtgcccgaatttcctggagctccagagaccccacgtcaagaattcctagtgtatataaaagcccgtttgagctctaacatccatgattaacagtctctgggttgggtaactctgttggcttaaatacagaggcaatgacatgcctgtttaagttcagtgcaggtcccagttcaattcccatgtgagtcattatcttctgaaaatgggaaaactctgctccatagcagtggacagaacctccaaaaccagtcaggtgacacagctcatagtttctgaaaaagacaaaacaccaagctcaaaaataaggtggttggatctatggcattgcaaagcgacaacccaaaggttgtgagggttgctgcctgctgctgacatagcaataatactcattgggctcctccacttcatatacgttctcttcaatggtatagatgttttcttctgagcgaattccctctgctactgcatttgccaatcctgagggagggaggttggccaaagagatgaggcttaaattctgtatcttctctttgctatgagaataccatttgaaaattaaagcgccgaagataagagccagagccagcccagcacagatccctgctccgatgtagatgcctattctgatggttgctccagagtcccgtaagtcattggccaatctagagtcccgtaactcattggccaatgtggatatttgtgttagatttatatcagggaggctccccagtgtctgtgtctctgctgggccatgtcccctggtggtaagcatccttggaaaggctgcagtgaagtctctctgcagagtcggtgcaggggtgaccttggctggtttgatgacccaa

SEQ ID NO: 189163 - DNA, 1091 bp, Homo Sapiens
  misc_feature (363)..(375): n is a, c, g, or t
ttggaggatgattctatttctaaattcaaacatattattctttcagataatttttgaagccattcgaggagtatcaataagaagtgatattgccattgatgatgttaaatttcaggcaggaccctgtggagaaatggaagatacaactcaacaatcatcaggatattctgaggacttaaatgaaattgagtattaagaaatgatctgcattggatttactagacgaaaaccatacctctcttcaatcaaaatgaaaacaaagcaaatgaatactggacagtcttaacaattttataagttataaaatgactttagagcaccctccttcattacttttgcaaaaacatactgactcagggctcnnnnnnnnnnnnngcatatgacaactgttactagaaatacaggctactggttttgcatagatcattcatcttaattttggtaccagttaaaaatacaaatgtactatattgtagtcattttaaagtacacaaagggcacaatcaaaatgagatgcactcatttaaatctgcattcagtgaatgtattgggagaaaaataggtcttgcaggtttccttttgaattttaagtatcataaatattttttaagtaaataatacggggtgtcagtaatatctgcagaatgaatgcagtctttcatgctaatgagttagtctggaaaaataaagtcttattttctatgttttattcatagaaatggagtattaatttttaatattttcaccatatgtgataacaaaggatctttcatgaatgtccaagggtaagtcagtattaattaatgctgtattacaaggcaatgctaccttctttattccccctttgaactacctttgaagtcactatgagcacatggatagaaatttaacttttttttgtaaagcaagcttaaaatgtttatgtatacatacccagcaacttttataaatgtgttaaacaattttactgatttttataataaatattttggtaagatttttaataatatgaattcaggcagatatactaaactgcttttatttacttgtttagaaattgtatatatatgtttgtgtatcctaacagctgc

SEQ ID NO: 189164 - DNA, 1033 bp, Homo Sapiens
  misc_feature (256)..(321): n is a, c, g, or t
ttggcttcgcgccccaaaccacatcctggagcgcactctccagcgtggctggcagcggggacggtgcgccggggcgcaggcccaagagtcgcgtgcgcggccccttgcaccatccccccgggcccacccccgggccgcgctgattgggcaggtagggactctgcccagcggaaagttttgggtgccgggaggaagtctaacctttgggagactccaagacagcagctccgaggtcggcgggggtctgggtggccannnnnnnnnnnnnnnnnnnnnnnnnnnnnnnnnnnnnnnnnnnnnnnnnnnnnnnnnnnnnnnnnnttgggcccgagggggcgctgggcaagagccccttccagctgaccgccgaggacgtgtatgacatctcctacctgttgggccgcgagcttatggccctgggcagcgacccccgggtgacgcagctgcagttcaaagtcgtccgcgtcctggagatgctggaggcgctggtgaatgagggcagcctggcgctggaggagctgaagatggagagggaccacctcaggaaggaggtggaggggctgcggagacagagccctccggccagcggggaggtgaacctgggcccaaacaaaatggtggttgacctgacagatcccaaccgaccccgcttcactctgcaggagctaagggatgtgctgcaggaacgcaacaaactcaagtcgcagctcctggtggtgcaggaagagctgcagtgctacaagagtggcctgattccaccaagagaaggcccaggaggaagaagagaaaaagatgctgtggttactagtgccaaaaatgctggcaggaacaaggaggagaagacaatcataaaaaagctgttcttttttcgatcgggggaaacagacctagatcccaggccacaagtaagggctatggctctgattctagaagacaacctttccaagatgcctggcaaatcacctcctctgtgccacacagacacactagggcctgtgtattatttccccttcaaagcacactgaggagggag

SEQ ID NO: 189165 - DNA, 1475 bp, Homo Sapiens
ttggcggcgcctctgcgcgcgggaagatggcggaacaggctaccaagtccgtgctgtttgtgtgtctgggtaacatttgtcgatcacccattgcagaagcagttttcaggaaacttgtaaccgatcaaaacatctcagagaattgggtcattgacagcggtgctgtttctgactggaacgtgggccggtccccagacccaagagctgtgagctgcctaagaaatcatggcattcacacagcccataaagcaagacagattaccaaagaagattttgccacatttgattatatactatgtatggatgaaagcaatctgagagatttgaatagaaaaagtaatcaagttaaaacctgcaaagctaaaattgaactacttgggagctatgatccacaaaaacaacttattattgaagatccctattatgggaatgactctgactttgagacggtgtaccagcagtgtgtcaggtgctgcagagcgttcttggagaaggcccactgaggcaggttcgtgccctgctgcggccagcctgactagaccccaccctgaggtcctgcatttctcagtcggtgtgtaatcacgttccagggcccaaagcccagctctttgttcagttgacttactgtttcttaccttaaaaagtaattgtagatggaaatcagttgtgtttggcaggagaatcaataaaaatctttgattcagacagcttatggggtattttaagcattcttagactagttgaacatctcactttgccccagttacaaaaatagtagaacaagcaacataaaacaatgaaggaaaacctcacttgaaggcccaggtcaacatctaagcctgttgagacttagataatcgagtctacctcttcagtaggtttgtgtggatggcctggagggcaggtgccctctgctccccagtgctacctctctcttccctagggccttttgtggattgacagtagtcccctccgtaggagctcacagtctagattagaagtgttttaatttctacacacccatagtgcacacttgtatattgaaaagatagggaagagagaaacatttatggaatcagtcgttggcaccttcaatacttcatgatttttgtcgagtttacttcatgaggaggtcagcccattggctcccatctgaaccactttgcctctgaaacttaattacatccagaaaggaggacacttgtatgctagtctatggtcagttgaggaatatgactgtttttatatgcacatgtaacccaaatgtccaatataaattggcttattttttaaaataattttaaaagttgggaaaagtgttattatttggcatgcttaaatattgaataagtattcttcatcagcatttaataaatgtataggcagatgtaaggtaatttctgtgtattttgagataatgtcaaaatcatgaatatttcaaaataaactggggagttataaaaatacaactagag

SEQ ID NO: 189166 - DNA, 776 bp, Homo Sapiens
gaagagccgcccagccagggcgctggtcacctgcttgtcctcgtggagggacgtgggccagtgggcccgggcctcctcgaactggcccctggtcagaggcggccgggcgggcacgggcaccaggaagggttgccccaggccgcgggggtccacagccggccgtggcaggagctcagccagcgagcgcgggcccgaggccggcccagccaggcaaagcagcatctccagggcgtgggggctgccggcatcgcggctgggccgcacccgcttgaggtgaggctgggcggggagcgggtgcagggccgacacctccttcaggaggcgtgaggtctggcgcttgtccaggacgggcgcggcgtaggccagcaccagctccacgtcccctgactgcttctcggacaggacagggagggcctgccacggcgccggctcaggctccgggctcccggcctccaagcacttgggctgctccacgaggcccggggcgggctccatcctcagcgaggccgactgtgggagacagagacgggagcagaggatcatccggcggctgcgggcggctgggggagagccggggagtccgtcccgggaggccgtggctccacaaggcagggcgtgctgccaccaaagctgaggctagtccgagggctccggcccaggtcaccgcatcagagctacactccctcatgtcctgctaacccctggtgtgcacagagtttaaacagccattggtttttaaaaacgaagatataattcacctaccagaagacagatca

SEQ ID NO: 189167 - DNA, 897 bp, Homo Sapiens
ttggcgctggtttatcctcacagacaactgcctctactactttgagtacaccacggacaaggagccccgaggaatcatccccctggagaatctgagcatccgagaggtggacgacccccggaaaccgaactgctttgaactttacatccccaacaacaaggggcagctcatcaaagcctgcaaaactgaggcggacggccgagtggtggagggaaaccacatggtgtaccggatctcggcccccacgcaggaggagaaggacgagtggatcaagtccatccaggcggctgtgagtgtggaccccttctatgagatgctggcagcgagaaagaagcggatttcagtcaagaagaagcaggagcagccctgaccccctgcccccaactccattatttattacggagctgccccgcctgggtggccggacccctgggccttggggctgtggatcctggttccctgtttggaaaattcaccacctctagctcctcactgttctttgtaattaacacgctgttggtaatcttattaattatttaaccacttggcctgctgaccccctcatttcttggggttgacagagtcgaggtgctccgtggagccagcctgtttccctggacaggggcctggacccgcctgtctctgggtgctgcctgggctgtcccggtgggtctgttctggtttcaccccgagcccagcaggagtggagtaaagggagaaggttaatatggtgggagtctggagttggatttggccggagacagagttttatatgcagggattcagggtcagggtctagcattcattctagagttacttgacagccatcaccagttacgctacagccatccagctagttccatccgttgctttcatggggcttgaggtctttaaggg

SEQ ID NO: 189168 - DNA, 2357 bp, Homo Sapiens
  misc_feature (1392)..(1651): n is a, c, g, or t
  misc_feature (1653)..(1668): n is a, c, g, or t
  misc_feature (1794)..(1803): n is a, c, g, or t
ttggcgggggatgtggagagctggcagcatgtcggccgagctgggagtcgggtgcgcattgcgggcggtgaacgagcgcgtgcagcaggctgtggcgcggcggccgcgggatctcccagccatccagccccggctagtggcggtcagcaaaaccaaacctgcagacatggtgatcgaggcctatggacatgggcagcgcacttttggcgagaactacgttcaggaactgctagaaaaagcatcaaatcccaaaattctgtctttgtgtcctgagatcaaatggcacttcattggccacctacagaaacaaaatgtcaacaaattgatggctgtccccaatctcttcatgctggaaacagtggattctgtgaagttggcagacaaagtgaacagttcctggcagagaaaaggttctcctgaaaggttaaaggttatggtccagattaacaccagcggagaagagagtaaacatggccttccaccttcagagaccatagccatcgtggagcacataaacgccaagtgtcctaacctggagtttgtggggctgatgaccataggaagctttgggcatgatcttagtcaaggaccaaatccagacttccagctgttattgtccctccgggaggagctgtgtaaaaagctgaacatccctgctgaccaggttgagctgagcatgggcatgtccgcggatttccagcatgcggttgaagtaggatctacaaatgtccgaataggaagcacgatttttggagagcgggattactcaaagaaacccaccccggacaagtgcgcagcagacgtgaaggccccgctggaggtggcacaggagcactgagccagggaatactgagagcactaactatgcactaacctagattttcatttcgatattccctgtgtcccagcgcagtcctgctctcctgtgacctgtggagagcactaatgatcacgtgtgttgatggaaaccatctgtgcttagtctctgacataggaagcttgcttcaggcaatggctttggattgagtttgagaaattcaaacatttctgcagaacagataccaaatcaatagctaggaatcatgttcaatattgaattctgcccaggagcatgaactgatccatgaatgccttttccaggttaaaatttggtcactgatgcctataatcgtggaagtcagagggattcccctttttcatctcattttaataggaaaattccttatggttaacatctccctacaaactcctactacgtcgtctaaattgctgctctggaataaggtgatttctgcccccagattcttccctagccggtagatacgtgaagatattcccaactgtggaatggcagtgtaggtagcttcaggaaatggctcaggttaattctcnnnnnnnnnnnnnnnnnnnnnnnnnnnnnnnnnnnnnnnnnnnnnnnnnnnnnnnnnnnnnnnnnnnnnnnnnnnnnnnnnnnnnnnnnnnnnnnnnnnnnnnnnnnnnnnnnnnnnnnnnnnnnnnnnnnnnnnnnnnnnnnnnnnnnnnnnnnnnnnnnnnnnnnnnnnnnnnnnnnnnnnnnnnnnnnnnnnnnnnnnnnnnnnnnnnnnnnnnnnnnnnnnnnnnnnnnnnnnnnnnnnnnnnnnnnnnnnnnnnntnnnnnnnnnnnnnnnntcccaatagtccatgaaggctttgatctcttgggaagttcttcatagatgctgtcacatttcttaaagcaaccttttaatatgcagataataccccccaacttttttagagacagcctgtctcttnnnnnnnnnnttaatttggtagtgagagcttgtgtcactgccactctgttttatccctgaaattaaaggataacataaggaggacttgggcctttctgacatcatcctgaagagacaggactttgcgtttttcctctgggacctacagtgatgagaatttaatgattatctcctccactataatcctctttagggtgatttttaaatcaaaacccagtgaatctcattactcctaagaaacgaaagattccttcaaagccttttcaggcacatggtttcaacaaagcctggctttgacattccttgtcctgaggagcactttccaggcatagttacagcttccccactgtatttacaagccagaattgtgcaactcttctggatcattaataaagtagcaagatcctcaaaaaacccaaaaacaccattctctaatagtcatgacaaatggcttcagtatggcttgttttttattttccagatggctttttctcttattttttgaagcccgagtctttgattttacaggtaacttgcaaaacatcatgatgctgccaaatgtac

SEQ ID NO: 189169 - DNA, 1116 bp, Homo Sapiens
ttggctctaaatacaatttggaactaacatatgaacactttaagtcagaagaaatcttgagagctgtgcttcctgaaggtcaagatgtaacttcagggtttagcaggattggacatattgcacacctaaaccttcgagatcatcagctgcctttcaaacatttaattggccaggttatgattgacaaaaatccaggaatcacctcagcagtaaataaaataaataatattgacaatatgtaccgaaatttccaaatggaagtgctatctggagagcagaacatgatgacaaaggttcgagaaaacaactacacctatgaatttgatttttcaaaagtctattggaatcctcgtctgtctacagaacacagccgtatcacagaacttctcaaacctggggatgtcctatttgatgtttttgctggggttgggcccttgccattccagtagcaaagaaaaactgcactgtatttgccaatgatctcaatcctgaatctcataaatggctgttgtacaactgtaaattaaataaagtggaccaaaaggtgaaagtcttcaacttggatgggaaagacttcctccaaggaccagtcaaagaagagttaatgcagctgctgggtctgtcaaaagaaagaaaaccctctgtgcacgttgtcatgaacttgccagcaaaagctatagagtttcttagtgctttcaagtggcttttagatgggcagccatgcagcagtgagttccttcccatagtgcattgttatagcttttccaaagatgctaaccctgctgaggatgttcggcaaagggctggagctgtgttaggcatttctctggaggcatgcagttcagttcacctggtaagaaatgtggccccaaacaaggaaatgctgtgcatcacgtttcagattcctgcctctgtcctctacaagaaccagaccagaaatccagagaatcatgaagatccacctcttaaaaggcagaggacggctgagccttttcagacgaaaaaacacaaattgtttcaaacacttaattggaaatgttttctccatctccctaccagacttacatgtagtgaatagaatttgtattatttaataaaattttagggtttggtttt

SEQ ID NO: 189170 - DNA, 1812 bp, Homo Sapiens
  misc_feature (1437)..(1490): n is a, c, g, or t
gctcagtgtctgtttgtccagcttctcagagttgctgtgcagctcggatgtggcataggaaacagcagacacagggagagggcagcataaggcactgtagggagcagtggccacattttctggtgagtcctgtggcaggaatgtttgtgcattcagcactggagcatttactccctgtctgacactggggtagctgccatgagggggattctagtatcagagtccctcccttctggaagtttccagggcaacaaagacataagacaaacatccttgaaatgttatctaaaaacccaagattgaaataatacataccacacaaggaaacaggagagtagtctagctccatgtccggggctctaggggttcatagatggcagctcctgtccggggctgaggttgggaggggagaaacaggggcagagtgagttggtctctggagtgactgtgcttttccaccctcagcagaggaagaaccgatgctggaacgtcgttgcaggggccccctggccatgggcctggcccagccccgactcctttctgggccctcccaggagtcaccccagaccctggggaaggagtcccgcgggctgaggcaacaaggcacgtcagtggcccagtctggtgcccaagccccaggcagggcccatcgctgtgcccactgtcgaaggcacttccctggctgggtggctctgtggcttcacacccgccggtgccaggcccggctgcccttgccctgccctgagtgtggccgtcgctttcgccatgcccccttcttagcactgcaccgccaggtccatgctgctgccaccccagacctgggctttgcctgccacctctgtgggcagagcttccgaggctgggtggccctggttctgcatctgcgggcccattcagctgcaaagcggcccatcgcttgtcccaaatgcgagagacgcttctggcgacgaaagcagcttcgagctcatctgcggcggtgccaccctcccgccccggaggcccggcccttcatatgcggcaactgtggccggagctttgcccagtgggaccagctagttgcccacaagcgggtgcacgtagctgaggccctggaggaggccgcagccaaggctctggggccccggcccaggggccgccccgcggtgaccgccccccggcccggtggagatgccgtcgaccgccccttccagtgtgcctgttgtggcaagcgcttccggcacaagcccaacttgatcgctcaccgccgcgtgcacacgggcgagcggccccaccagtgccccgagtgcgggaagcgctttaccaataagccctatctgacttcgcaccggcgcatccacaccggcgagaagccctacccgtgcaaagagtgcggccgccgcttccggcacaaacccaacctgctgtctcacagcaagattcacaagcgatccgaggggnnnnnnnnnnnnnnnnnnnnnnnnnnnnnnnnnnnnnnnnnnnnnnnnnnnnnngagtccgcggccgagcccaccccggcggtacctctgaaaccggcccaggagccgccgccaggggccccgccagagcacccgcaggacccgatcgaagcccccccctccctctacagctgcgacgactgcggcaggagcttccggctggagcgcttcctgcgggcccaccagcggcagcacaccggggagcggcccttcacctgcgccgagtgcgggaagaacttcggcaagaagacgcacctggtggcgcactcgcgcgtgcactccggcgagcggcccttcgcctgcgagagtgcggccgccgcttctcccaagggcagcc

SEQ ID NO: 189171 - DNA, 1318 bp, Homo Sapiens
  misc_feature (1211)..(1221): n is a, c, g, or t
aaaaagttgggtttttgaaacccttctgggaaggactgtggatgaattgcgtgaggcaggctaacatcaggatgcagtgcaaaatctatgattccctgctggctctttctccggacctacaggcagccagaggactgatgtgtgctgcttccgtgatgtccttcttggctttcatgatggccatccttggcatgaaatgcaccaggtgcacgggggacaatgagaaggtgaaggctcacattctgctgacggctggaatcatcttcatcatcacgggcatggtggtgctcatccctgtgagctgggttgccaatgccatcatcagagatttctataactcaatagtgaatgttgcccaaaaacgtgagcttggagaagctctctacttaggatggaccacggcactggtgctgattgttggaggagctctgttctgctgcgttttttgttgcaacgaaaagagcagtagctacagatactcgataccttcccatcgcacaacccaaaaaagttatcacaccggaaagaagtcaccgagcgtctactccagaagtcagtatgtgtagttgtgtatgtttttttaactttactataaagccatgcaaatgacaaaaatctatattactttctcaaaatggaccccaaagaaactttgatttactgttcttaactgcctaatcttaattacaggaactgtgcatcagctatttatgattctataagctatttcagcagaatgagatattaaacccaatgctttgattgttctagaaagtatagtaatttgttttctaaggtggttcaagcatctactctttttatcatttacttcaaaatgacattgctaaagactgcattattttactactgtaatttctccacgacatagcattatgtacatagatgagtgtacatttatatctcacatagagacatgcttatatggttttatttaaaatgaaatgccagtccattacactgaataaatagaactcaactattgcttttcagggaaatcatggatagggttgaagaaggttactattaattgtttaaaaacagcttagggattaatgtcctccatttataatgaagattaaaatgaaggctttaatcagcattgtaaaggaaattgaatggctttctgatatgctgttttttagcctaggagttagaaatcctaacttctttatcctcttctcccagaggcnnnnnnnnnnncttgtgtattaattaacatttttaaaaagcagatattttgtcaggggctttgcattcaaactgcttttccagggctatactcagaagaaagataaaa

SEQ ID NO: 189172 - DNA, 952 bp, Homo Sapiens
aaattccatgtaaaaagtattgcttttctaatgtgctaatgtgctcctgcctgcctgcttgctacacaatgtacagagggtagagtcatgaggaattcaaggctgaagatgtttggatatttggatgacaccgacgtacccctcaccttgcaccttgaacctgctctgaagcccgtgtagttttcaggcttggctaaggcaaaaactacaaagcatcctaatgagcagaattatacaacaggaatgtatgtgcatatttgacatagtttcttctctagaagggtggctctctggcctgtgacctctgccctcttcaagggcgagggaggagtccagagaagaaggcttttgttccccacggccagttcttctgcagcccctacagccccagggacctgccctgctccgcgtgggctctcagaagcccagcaatttccatatgggtgggtgacttcagagcgatggacaaagctgtgcggccagccttgtcagtcaggctgctgtcgcaggctgggtgtgccaggagcagccgcaccaggtccacgttgccatggtgacaggccagcatgagggccgaggatccatcatggtcctgcagattgacatctgcctggcagctaagcagcgcttgaaccatgtcctccctgtcgtggctgactcccagcatcagcgcagtctggcctccctgagtagcttgaatgttcacatttccttctcttaagagcttccagacaacagccatgtcttcattggtctctgcggaagccaagggagtgatcattacggcagtgtagccagctttgttctgatggtccacattgcagacgcctgtctccagcagcagcttcacgatggagaagttggagtgggacacgctgtagtgaagggccgtgttcccgttgtgatcggccaagttgacaagcagtttcaggaagtgtgccaacttttttgt

SEQ ID NO: 189173 - DNA, 1207 bp, Homo Sapiens
  misc_feature (74)..(83): n is a, c, g, or t
ttggcttttcataaaccggttgaaaatgtgtttgctgccttgctcctagcagacagaaactggattaaaacaannnnnnnnnncctcttcagaacttgtcaggcatggctcagagcttgaagattaggagaaacacattcttattaattcttcacctgttatgtatgaaggaatcattccagtgctagaaaatttagccctttaaaacgtcttagagccttttatctgcagaacatcgatatgtatatcattctacagaataatccagtattgctgattttaaaggcagagaagttctcaaagttaattcacctatgttattttgtgtacaagttgttattgttgaacatacttcaaaaataatgtgccatgtgggtgagttaattttaccaagagtaactttactctgtgtttaaaaagtaagttaataatgtattgtaatctttcatccaaaatattttttgcaagttatattagtgaagatggtttcaattcagattgtcttgcaacttcagttttatttttgccaaggcaaaaaactcttaatctgtgtgtatattgagaatcccttaaaattaccagacaaaaaaatttaaaattacgtttgttattcctagtggatgactgttgatgaagtatacttttcccctgttaaacagtagttgtattcttctgtatttctaggcacaaggttggttgctaagaagcctataagaggaatttcttttccttcattcatagggaaaggttttgtattttttaaaacactaaaagcagcgtcactctacctaatgtctcactgttctgcaaaggtggcaatgcttaaactaaataatgaataaactgaatattttggaaactgctaaattctatgttaaatactgtgcagaataatggaaacattacagttcataataggtagtttggatatttttgtacttgatttgatgtgactttttttggtataatgtttaaatcatgtatgttatgatattgtttaaaattcagtttttgtatcttggggcaagactgcaaacttttttatatcttttggttattctaagccctttgccatcaatgatcatatcaattggcagtgactttgtatagagaatttaagtagaaaagttgcagatgtattgactgtaccacagacacaatatgtatgcttttttacctagctgggtagcataaataaaactgaatc

SEQ ID NO: 189174 - DNA, 1164 bp, Homo Sapiens
acaaaaaagttggggagcttttagcttgtttcatggaactatacaacttgtgggtaactcacatgaccaaacaaaccaaagtgcctgtgacggggcgggtggcgtctacccaccctcccttctagcagattcttattttgtttgaatttataaacaaggctggtggctgtctacccaccctcccttctagcagattttgattttgtttcaatttataacttacactttgaaccatgggtttacttataatggagtctgtagcttcacagcatatttcatgtaatcataaagaccagtatattccctcctgctgaatgacatgcgactgtaaagcctctttataaaccatttccaatgttagtatataggattatttgggaagcgtatcaatacctttatagacaaatacgaacatgtatgcacacaaaacatttaactatggtatttatggaagacaggtaacaacattaaatctagttgctttcccttagtattagatttgttgagggttttttaaaaatcaggtctgttgaaagtcttctgtcataatctataaagcagcagcactcatggaaattgtagcatgccagtaatttttaccaacatcccatacatctgagttctgcagtccagtgtgtaatccgctccatgtgtattttgcttaatggaatgctttatttaagcacttaggcagagtagacacaattaaaggtacaaagcccagaggaagtggtagagcagcaccgtgcctgccctgaggcagtggagtcagtagcgctgtccccagggccttgagtgcctggaggtgcttggcctccagtagctgcctccattctcttttaaaaaaagggggtgattctgaggcactgaagtgcctcccagatgtggaggagtgaagccaccatcgaggccacactcagcactccaggatcccagcgatgtcagacactcttgagttgtcaaaacgttaattttcagttttaaataatcagtttatctaagaaaagggaattttaacttttctaccttgagccaagccaatgaagggaaaattaattaacttagtaaatttgaagtgcagctctgttagctcgtacatgtgggttcttatcctgatcctgtgccttaaagtaggaaagttgtttccaagttcagattaaaata

SEQ ID NO: 189175 - DNA, 796 bp, Homo Sapiens
gacaccagcacggttatgctctgctcggttttcagccttggagtccccaagtctgtgatggtgatggtgatgttgtactcggctctggtctctctgtccagcgccccttctgttaccagcctgtagaaattctcaacagaaggttttagcttaaaaggaacatcatcctgaattgagcaaatcatttttccattttccccagagtctcggtctctaatcctaaacagggccacttctgtctctggagaattctcgggaatagggcaggtaagtgatgaaatatttagttccgggaagttatcgttaacatccagcaccttaacagagacagagcattttccagaaagtcccccgccatcagatgcctctatatctagatcatacgaagacattgtctcaaaatttagttttttaattagtcgaatttttcctgaaaggctgcttagctcaaaaggtttgtctatctcctgagagctgtaataaagggaatatgatatctctccatttgtcccagtgtctaaatccctagcagagaccttgacaaatagggagcctactgggctgttctctgggacctgcacctcgtagagcgcctgcacaaactccggggcattgtcattggcgtccaagtccaagatgaggatctggacggtgccagatcggggtggagagccaccgtccaccgctgtcaaggttaatctgagctcggcctgctcctcgcgatccagttctgtgtccagcaccagctttgggtatttcctgccatcccctcgggtgcgagtggaaacatggccaa

SEQ ID NO: 189176 - DNA, 976 bp, Homo Sapiens
acaaaaaagttggcttctatttaatgggggctctctctgcccaggagtcagaggtgcctccaggagcagcaggagcatggccgaggatctgggactgagctttggggaaacagccagtgtggaaatgctgccagagcacggcagctgcaggcccaaggccaggagcagcagcgcacgctgggctctcacctgctgcctggtgttgctccccttccttgcaggactcaccacatacctgcttgtcagccagctccgggcccagggagaggcctgtgtgcagttccaggctctaaaaggacaggagtttgcaccttcacatcagcaagtttatgcacctcttagagcagacggagataagccaagggcacacctgacagttgtgagacaaactcccacacagcactttaaaaatcagttcccagctctgcactgggaacatgaactaggcctggccttcaccaagaaccgaatgaactataccaacaaattcctgctgatcccagagtcgggagactacttcatttactcccaggtcacattccgtgggatgacctctgagtgcagtgaaatcagacaagcaggccgaccaaacaagccagactccatcactgtggtcatcaccaaggtaacagacagctaccctgagccaacccagctcctcatggggaccaagtctgtgtgcgaagtaggtagcaactggttccagcccatctacctcggagccatgttctccttgcaagaaggggacaagctaatggtgaacgtcagtgacatctctttggtggattacacaaaagaagataaaaccttctttggagccttcttactataggaggagagcaaatatcattatatgaaagtcctctgccaccgagttcctaattttctttgttcaaatgtaattataaccaggggttttcttggggccggagtaggggcattccacagggacacggtttagctatgaaatttgggg

SEQ ID NO: 189177 - DNA, 942 bp, Homo Sapiens
actttgtacaaaaaagttggctgcttatccttgtgctgatgtttgtggtatggatgaaacgccgggataaagaacgccaggccaaacaacttttaattgatccagaagatgatgtaagagataatattttaaaatatgatgaagaaggtggaggagaagaagaccaggactatgacttgagccagctgcagcagcctgacactgtggagcctgatgccatcaagcctgtgggaatccgacgaatggatgaaagacccatccacgctgagccccagtatccggtccgatctgcagccccacaccctggagacattggggacttcattaatgagggccttaaagcggctgacaatgaccccacagctccaccatatgactccctgttagtgtttgactatgaaggcagtggctccactgctgggtccttgagctcccttaattcctcaagtagtggtggtgagcaggactatgattacctgaacgactgggggccacggttcaagaaacttgctgacatgtatggtggaggtgatgactgaacttcagggtgaacttggtttttggacaagtacaaacaatttcaactgatattcccaaaaagcattcagaagctaggctttaactttgtagtctactagcacagtgcttgctggaggctttggcataggctgcaaaccaatttgggctcagagggaatatcagtgatccatactgtttggaaaaacactgagctcagttacacttgaattttacagtacagaagcactgggattttatgtgcctttttgtacctttttcagattggaaattagttttctgtttaaggctttaatggtactgatttctgaaacgataagtaaaagacaaaatattttgtggtgggagcagtaagttaaaccatgatatgcttcacacgcttttggttacattgcatttgctttt

SEQ ID NO: 189178 - DNA, 1063 bp, Homo Sapiens
  misc_feature (164)..(190): n is a, c, g, or t
  misc_feature (330)..(361): n is a, c, g, or t
  misc_feature (370)..(563): n is a, c, g, or t
ttgggatgaacaaaacttttttaaaaaaatgttttcttttgagaccctttgctccagtcctatggcagaaaacgtgaacattcctgcaaagtattattgtaacaaaacactgtaactctggtaaatgttctgttgtgattgttaacattccacagattctaccnnnnnnnnnnnnnnnnnnnnnnnnnnnacaattgttttaaagccatttcatgttccagttgtaagataaggaaatgtgataatagctgtttcatcattgtcttcaggagagctttccagagttgatcatttcctctcatggtactctgctcagcatggccacgtagnnnnnnnnnnnnnnnnnnnnnnnnnnnnnnnngagacggannnnnnnnnnnnnnnnnnnnnnnnnnnnnnnnnnnnnnnnnnnnnnnnnnnnnnnnnnnnnnnnnnnnnnnnnnnnnnnnnnnnnnnnnnnnnnnnnnnnnnnnnnnnnnnnnnnnnnnnnnnnnnnnnnnnnnnnnnnnnnnnnnnnnnnnnnnnnnnnnnnnnnnnnnnnnnnnnnnnnnnnnnnnnnnnnnacgtaggttttaaagcaaggggcgtgaagaaggcacagtgaggtatgtggctgttctcgtggtagttcattcggcctaaatagacctggcattaaatttcaagaaggatttggcattttctcttcttgacccttctctttaaagggtaaaatattaatgtttagaatgacaaagatgaattattacaataaatctgatgtacacagactgaaacacacacacatacaccctaatcaaaacgttggggaaaaatgtatttggttttgttcctttcatcctgtctgtgttatgtgggtggagatggttttcattctttcattactgttttgttttatccttttgtatctgaaataccttttaatttatttaattatctgtttgttcagagctctgcccatttcttgagtaccctgttagttaagtataatttatgtgtatccggagtgtgtttagtctgttttattttgcagtaaaccgattctcccaaaatttcctttttg

SEQ ID NO: 189179 - DNA, 1395 bp, Homo Sapiens
  misc_feature (306)..(329): n is a, c, g, or t
  misc_feature (469)..(500): n is a, c, g, or t
  misc_feature (509)..(687): n is a, c, g, or t
ttggattttacaagtggttttcttacataggactcctttaagattgagctttctgaacaagaaggtgatcagtgtttgcctttgaacacatcttcttgctgaacattatgtagcagacctgcttaactttgacttgaaatgtacctgatgaacaaaacttttttaaaaaaatgttttcttttgagaccctttgctccagtcctatggcagaaaacgtgaacattcctgcaaagtattattgtaacaaaacactgtaactctggtaaatgttctgttgtgattgttaacattccacagattctaccnnnnnnnnnnnnnnnnnnnnnnnnacaattgttttaaagccatttcatgttccagttgtaagataaggaaatgtgataatagctgtttcatcattgtcttcaggagagctttccagagttgatcatttcctctcatggtactctgctcagcatggccacgtagnnnnnnnnnnnnnnnnnnnnnnnnnnnnnnnngagacggannnnnnnnnnnnnnnnnnnnnnnnnnnnnnnnnnnnnnnnnnnnnnnnnnnnnnnnnnnnnnnnnnnnnnnnnnnnnnnnnnnnnnnnnnnnnnnnnnnnnnnnnnnnnnnnnnnnnnnnnnnnnnnnnnnnnnnnnnnnnnnnnnnnnnnnnnnnnnnnnnnnnnnnnnnnnnnnnnncaaagcccagctggccacgtaggttttaaagcaaggggcgtgaagaaggcacagtgaggtatgtggctgttctcgtggtagttcattcggcctaaatagacctggcattaaatttcaagaaggatttggcattttctcttcttgacccttctctttaaagggtaaaatattaatgtttagaatgacaaagatgaattattacaataaatctgatgtacacagactgaaacatacacacatacaccctaatcaaaacgttggggaaaaatgtatttggttttgttcctttcatcctgtctgtgttatgtgggtggagatggttttcattctttcattactgttttgttttatcctttgtatctgaaatacctttaatttatttaatatctgttgttcagagctctgccatttcttgagtacctgttagttagtattatttatgtgtatcgggagtgtgtttagtctgttttatttgcagtaaaccgatctccaaagatttccttttggaaacgctttttcccctccttaatttttatattccttactgttttactaaatattaagtgttctttgacaattttggtgctcatgtgttttggggacaaaaagtgaaatgaatctgtcattataccagaaagttaaaattctcagatcaaatgtgccttaataaaatttgttttcatttaaatatcaaaacaatgataaact

SEQ ID NO: 189180 - DNA, 1144 bp, Homo Sapiens
ttggtgacttcacagcccgaaatgccaacgagctatcggtgctcaaggatgaggtcctagaggtgctggaggacggccggcagtggtggaagctgcgcagccgcagcggccaggcggggtacgtgccctgcaacatcctaggcgaggcgcgaccggaggacgccggcgccccgttcgagcaggccggtcagaagtactggggccccgccagcccgacccacaagctacccccaagcttcccggggaacaaagacgagctcatgcagcacatggacgaggtcaacgacgagctcatccggaaaatcagcaacatcagggcgcagccacagaggcacttccgcgtggagcgcagccagcccgtgagccagccgctcacctacgagtcgggtccggacgaggtccgcgcctggctggaagccaaggccttcagcccgcggatcgtggagaacctgggcatcctgaccgggccgcagctcttctccctcaacaaggaggagctgaagaaagtgtgcggcgaggagggcgtccgcgtgtacagccagctcaccatgcagaaggccttcctggagaagcagcaaagtgggtcggagctggaagaactcatgaacaagtttcattccatgaatcagaggaggggggaggacagctaggcccagctgccttgggctggggcctgcggaggggaagcccacccacaatgcatggagtattatttttatatgtgtatgtattttgtatcaaggacacggagggggtgtggtgctggctagaggtccctgcccctgtctggaggcacaacgcccatccttaggccaaacagtacccaaggcctcagcccacaccaagactaatctcagccaaacctgctgcttggtggtgccagccccttgtccaccttctcttgaggccacagaactccctggggctggggcctctttctctggcctcccctgtgcacctggggggtcctggcccctgtgatgctcccccatcccccacccacttctacatccatccacacccccagggtgagctggagctccaggctggccaggctgaacctcgcgcacacgcagagttctgctccctgacgggggcccgggaggggctccagcaaggaggccgtgggtgcattcgggggaaa

SEQ ID NO: 189181 - DNA, 940 bp, Homo Sapiens
ttggtgaacacttcctctgccctctataggtcctacaagaccgacttggaaacagcgttccggaagggttacggaattttaccaggcttcaagggcgtgactgtgacagggttcaagtctggaagtgtggttgtgacatatgaagtcaagactacaccaccatcacttgagttaatacataaagccaatgaacaagttgtacagtgcctcaatcagacctacaaaatggactacaactcctttcaagcagttactatcaatgaaagcaatttctttgtcacaccagaaatcatctttgaaggggacacagtcagtctggtgtgtgaaaaggaagttttgtcctccaatgtgtcttggcgctatgaagaacagcagttggaaatccagaacagcagcagattctcgatttacaccgcacttttcaacaacatgacttcggtgtccaagctcaccatccacaacatcactccaggtgatgcaggtgaatatgtttgcaaactgatattagacatttttgaatatgagtgcaagaagaaaatagatgttatgcccatccaaattttggcaaatgaagaaatgaaggtgatgtgcgacaacaatcctgtatctttgaactgctgcagtcagggtaatgttaattggagcaaagtagaatggaagcaggaaggaaaaataaatattccaggaacccctgagacagacatagattctagctgcagcagatacaccctcaaggctgatggaacccagtgcccaagcgggtcgtctggaacaacagtcatctacacttgtgagttcatcagtgcctatggagccagaggcagtgcaaacataaaagtgacattcatctctgtgggagataattccagccacaaaagtgaagtgcacgacgtcctaaggcatgtgatggaaatgagtacagtgcagagcaccaccagga

SEQ ID NO: 189182 - DNA, 908 bp, Homo Sapiens
ttggcaaataagagctacacattgcagttggttgatgtccacactgaagccgtgcaagcagctttggccaaatacaaagagaggaagatgcctatgccttcgaagagacgttctgtccttgtgcattcgtctgtggaaacctacacccctccagacacgtcgtctgcctcagaagatgagggctctttacggcgacccgggcgactcacctccactccgctccagagccattccagcgtcgagccctggctcgaccgggtcattcagggctcgtccacctcatcctctgcatcctccacctcatctcacccgggagggagacccaccactgctcccagtgctgcagccacgccgggggccgccgctaccactgcactcgcaggcctcgaggcccacacccacatagatctgcattctgcccctcctgatgtcaccacgggcctcgtggagcattcgtactttgagcgtccacaggtggcttctgtgagaagtgttcctcgggggtgcagcgggagcatgctggaaacagcagatggtgtccctgtgaacagcagagtgtcctccaaaatccagcagcttctgaacaccctgaagaggccaaagcgccctccactgaaggagttctttgtggatgattttgaggaattgttggaagttcagcaaccagatccaaatcagccaaagcctgagggaagcgagacgagtgtgctgagaggggagcctctcactgcaggtgtcccccgaccgccgtcgctgttggccaccttgcagcgctggggcacaacacagcccaaatccccctgtctgactgccttggatacaactgggaaagccgtctacactctcacctatggtaaactttggagtcggagtttaaaactagcttatactctacttaataaactgac

SEQ ID NO: 189183 - DNA, 306 bp, Homo Sapiens
tttgtacaaaaaagttggctcagaaggggcaacaaatgaagaaatacatcggagttaccaggagctagtgaaggtctggcacccagaccacaacctggaccagacagaggaggcacagaggcacttcctggagatccaggctgcgtatgaagtcctgagtcaacccaggaagccctggggatcccggaggtgaaaagaaacttccccctgaggactgactcttcctagcagagctgggcaacttgtcccaaatctagctttgcccacgaatggcatcccaacagagttaaagaaactgcttgcagg

SEQ ID NO: 189184 - DNA, 1340 bp, Homo Sapiens
  misc_feature (1223)..(1239): n is a, c, g, or t
actttgtacaaaaaagttggctcaacagttcttcttcagaggttacgagcaaagggaataaggaatccggatcattctagagctttaattaaagagaagttgactgcggatccagacagtgaaatagctacaaccagcctaagggtttctctactatgtccacttggtaaaatgcggctgacaattccgtgtcgggcccttacatgttctcatctacaatgttttgacgcaactctttacattcagatgaatgagaaaaaaccaacctgggtttgtcctgtctgtgataagaaggctccatatgaacaccttattattgatggcttgtttatggaaatcctaaagtactgtacagactgtgatgaaatacaatttaaggaggatggcacttgggcaccgatgagatcaaaaaaggaagtacaggaagtttctgcctcttacaatggagtcgatggatgcttgagctccacattggagcatcaggtagcgtctcaccaccagtcctcaaataaaaacaagaaagtagaagtgattgacctaaccatagacagttcatctgatgaagaggaagaagagccatctgccaagaggacctgtccttccctatctcccacatcaccactaaataataaaggcattttaagtcttccacatcaagcatctccagtatcccgcaccccaagccttcctgctgtagacacaagctacattaatacctccctcatccaagactataggcatcctttccacatgacacccatgccttacgacttacaaggattagatttctttcctttcttatcaggagacaatcagcattacaacacctccttgcttgccgctgcagcagcagcagtttcagatgatcaagacctcctacactcgtctcggtttttcccgtatacctcctcacagatgtttcttgatcagttaagtgcaggaggcagtacttctctgccaaccaccaatggaagcagtagtggcagtaacagcagcctggtttcttccaacagcctaagggaaagccatagccacaccgtcacaaacaggagcagcacggacacggcatccatctttggcatcataccagacattatttcattggactgattcccaggccctgctgctcccatccccaccccagatcgaatgaacttggcagaaagaagagaactttgtgctctgttttaccttactctgtttagaaaagtatacaagcgtgnnnnnnnnnnnnnnnnnatggaaaaaattaaaagaaatgtacagagaacaaaactatattttcagttttacttttgtatataaatctaagactgcctgtgtgataaaacaccttgttt

SEQ ID NO: 189185 - DNA, 905 bp, Homo Sapiens
ttggctgcttttggaccaaggagcctcacctcacgcagccgcaaagaatggttatacgccactgcacatcgctgccaaaaagaaccagatggacatagcgacaactctgctggaatatggtgctgatgccaacgcagttacccggcaaggaattgcttccgtccatctcgcagctcaggaagggcacgtggacatggtgtcgctgctcctcggtagaaatgcgaatgtgaacctgagcaataagagcggcctgaccccactccatttggctgctcaagaagatcgagtgaatgtggcagaagtcctcgtaaaccaaggggctcatgtggacgcccagacaaagatgggatacacaccactgcatgtgggctgccactatggaaatatcaagattgttaatttcctgctccagcattctgcaaaagttaatgccaaaacaaagaatgggtatacgccattacatcaagcagcacagcaggggcatacgcatataataaatgtcttacttcagaacaacgcctcccccaatgaactcactgtgaatgggaatactgcccttggcattgcccggcgcctcggctacatctcagtagtggacaccctgaagatagtgaccgaagagaccatgaccacaactactgtcacagagaagcacaaaatgaatgttccagaaacgatgaatgaagttcttgatatgtctgatgatgaaggtaatagatgcacatggtacaaaattcccaaggtacaagagtttacggtgaaaagtgaagatgcaatgaccggggacacagacaaatatcttgggccacagaccttaaggaattgggtgatgattccctgcctgcagagggttacatgggctttagtctcggagcgcgttctgccagcctccgctccttcagttc

SEQ ID NO: 189186 - DNA, 1075 bp, Homo Sapiens
taaatatttattttctgcagactgacttcggagtaattctgagccaggaggggagaggttagtgttcaaattgctgagatcttaggtcaaaaagctacagaaaagaaatcactctgaaaaacacaatgactcagaggcagtcaccccttgccagcaattccaagagctgaggaggcttcatgcctcaggacatggtgactagttgagtgaaccagagattgaggcagtggtttttacaggggaagaaacaagcttgggtgtatgggagcaggaaaggagggtgacagactggagaaatgataaaggccatttggaagcccacagggaagtggtcttgggaaacctgaagacactgggatattcagaaggccaaggggatccagcttatcctgttgggcaaggtgctgggagtgaaggcaggtaagccatgtcaagggcctgggaagcaaggggaaaactggaaggggtaccccaggtgaagaagggtatggaatggggtgcagaagtccatggagatgaccggcagatctcagggcggtttctggcacatcagaagttgggcttatgcttcttgagctccaccataaggtggtgaatgttgatgagctcagcccgggcagggagggctcggagctgcggctgggacagcacccggtggaagcgatgatagagctggatcagctgggtcagcgctccctgaatgatactggtgccatttctgaagttggtgaaactccgcattacatcctgactcagagattccactgatgatttccaggaactaccaaagccacggatcagctgagttacccgggcttcttcccctcgaagtcgctcagcctgtccacgctcaatcaaagcctcagcctccttcacaaatgccactaaacccccaaaagggggagacagcaactcttcaatgaattcctgtgtccgagcattgagcagctgctggaagctctcaacctctttgctgtcatctgcagcccgctccatcagcacacccagcatcatgtcatagttgttgatcagaaacacaagctgctccttccttgagccaacttttttgtacaaa

SEQ ID NO: 189187 - DNA, 924 bp, Homo Sapiens
cccttcattttaaattgccaattaaagcatgtatttacatattatatacaaaaaacttcaaaaacaaattattccaaatcttggtccaagagtttccactttataagtggtatggtactatgctatatatatcctcttccaaaagtctcttaggacttggtaagttccaaatattcattcacaaatggttcccctttaagcttaatgaaccatatacttcatttctgagtaaattagaggaaatattacagaacacgctttgtacaatacagcaccactactgagaagggctcgaggttttgtaatccaaggttctgacttaaagcaaaaatacacggcatagattgcaacagcaaagaagtgtccaattaaaactagagggttaggagacaatacagaaagcagcccaacaggacccgcaacacattcgccaccaagtttgaaataaagaaaacaggcttttcttagttgatgcagggaatcatctgtggcagaaaataattcataaagagcctgagcaaggatattcacgacaaaggaatgagatgtttttcttgcccagtaaaatgattttttggcctcgaaaatagctgcatcatcataaaggtcagggataccctttagcagttttctccatagttttatatctttaaaagcaacagtcattcctccaccagtaagtggatgcctcatattatatgcgtctcccaaaagaagaacacctcgtttcttcactgatgaaggaggaaggaagcttgctggcatggacctcagatgagaattgtcagtggcttctaagaatggttctttcaggtgatcaggtatttgtgggtaaattttttcaaccatgtattctcttaaattccttggcatttctcctctaatgtcaacaagtactcgagttccaacttttttgtacaaagt

SEQ ID NO: 189188 - DNA, 1659 bp, Homo Sapiens
aaccttcggctcgcgtgcttctgagctgctgtggatggcctcggctctctggactgtccttccgagtaggatgtcactgagatccctcaaatggagcctcctgctgctgtcactcctgagtttctttgtgatgtggtacctcagccttccccactacaatgtgatagaacgcgtgaactggatgtacttctatgagtatgagccgatttacagacaagactttcacttcacacttcgagagcattcaaactgctctcatcaaaatccatttctggtcattctggtgacctcccacccttcagatgtgaaagccaggcaggccattagagttacttggggtgaaaaaaagtcttggtggggatatgaggttcttacatttttcttattaggccaagaggctgaaaaggaagacaaaatgttggcattgtccttagaggatgaacaccttctttatggtgacataatccgacaagattttttagacacatataataacctgaccttgaaaaccattatggcattcaggtgggtaactgagttttgccccaatgccaagtacgtaatgaagacagacactgatgttttcatcaatactggcaatttagtgaagtatcttttaaacctaaaccactcagagaagtttttcacaggttatcctctaattgataattattcctatagaggattttaccaaaaaacccatatttcttaccaggagtatcctttcaaggtgttccctccatactgcagtgggttgggttatataatgtccagagatttggtgccaaggatctatgaaatgatgggtcacgtaaaacccatcaagtttgaagatgtttatgtcgggatctgtttgaatttattaaaagtgaacattcatattccagaagacacaaatcttttctttctatatagaatccatttggatgtctgtcaactgagacgtgtgattgcagcccatggcttttcttccaaggagatcatcactttttggcaggtcatgctaaggaacaccacatgccattattaacttcacattctacaaaaagcctagaaggacaggatactttgtggaaagtgttaaataaagtaggtactgtggaaaattcatggggaggtcagtgtgctggcttacactgaactgaaactcatgaaaaacccagactggagactggagggttacacttgtgatttattagtcaggcccttcaaagatgatatgtggaggaattaaatataaaggaattggaggtttttgctaaagaaattaataggaccaaacaatttggacatgtcattctgtagactagaatttcttaaaagggtgttactgagttataagctcactaggctgtaaaaacaaaacaatgtagagttttatttattgaacaatgtagtcacttgaaggttttgtgtatatcttatgtggattaccaatttaaaaatatatgtagttctgtgtcaaaaaacttcttcactgaagttatactgaacaaaattttacctgtttttggtcatttataaagtacttcaagatgttgcagtatttcacagttattattatttaaaattacttcaacctttgtgtttttaaatgttttgacgatttccatacaagataaaaaggatagtgaatcaattctttacatgcaaacattt

SEQ ID NO: 189189 - DNA, 900 bp, Homo Sapiens
gccccagtgactggttgtgcggctcagtgtcaggaataatggttgtatggcggaaggggatgcccaatgccattttggaaatgatgatgctggcgatgagcaaggtattcagcatagctcagggtcatcttttcactacgatacctggtcagttttatggttttcctgaattcattagtaatcggagctttgtatcctcctttcctcaataaggagtctatggtctgtatatggtcccatccttgctcctttgcaacctccggtaggtaggtggcggtgcgttttgatcctttttcattgatgaattctattctaatgccatgtacacccacctcccagtccaaataatcacagacatcttcaaagttagtgagcagagacactgagcagaaaagccgtggcagctcatcccttgtcattgggggaaaacggctatctttaagggcactggtaagtgtgtactccctgagtcctgaatgcaaattcatggcagaaaaagtacctatgcatccacgtaatcttttgtctcgaccaatcttccatgttacaaacagtgggtagggctcgttggtgaatcggggggtccggggctgctggtatccatacaggtgacagtagagcacatcgaagcaaaagcagcacatctctgctgacaccaccatcttccgggagcccggcgatgaggacgaggcggcggacgatgaggagggtgaggaagaggtggcggcggccggggtagaaagtagggtccccactccgcagctcggaggtggcgacagggcgatccccccgccgccgccgccgcagccctgggggggagagagggtacagccgctgccgctacctcctccggttagacctcccagcccgttgagccgcgtaccggcgcctcctagccaa

SEQ ID NO: 189190 - DNA, 431 bp, Homo Sapiens
tttgtacaaaaaagttggcatccttctaccccctgacgcttcccagctctggctttttgaaagcaaagatgagcaacactcaagctgagaggtccataataggcatgatcgacatgtttcacaaatacaccagacgtgatgacaagattgacaagccaagcctgctgacgatgatgaaggagaacttccccaacttccttagtgcctgtgacaaaaagggcacaaattacctcgccgatgtctttgagaaaaaggacaagaatgaggataagaagattgatttttctgagtttctgtccttgctgggagacatagccacagactaccacaattttgagccatggagcagcgccctgttccgggggcagccagcgacccagccccaccaatgggcctccagagaccccaggaacaataaaatgtcttctccc

SEQ ID NO: 189191 - DNA, 2140 bp, Homo Sapiens
ttggggcagcaagtcgccaccatggtgaagatcgtgacagttaagacccaggcgtaccaggaccagaagccgggcacgagcgggctgcggaagcgggtgaaggtgttccagagcagcgccaactacgcggagaacttcatccagagtatcatctccaccgtggagccggcgcagcggcaggaggccacgctggtggtgggcggggacggccggttctacatgaaggaggccatccagctcatcgctcgcatcgctgccgccaacgggatcggtcgcttggttgtcggacagaatggaatcctctccacccctgctgtatcctgcatcattagaaaaatcaaagccattggtgggatcattctgacagccagtcacaacccagggggccccaatggagattttggaatcaaattcaatatttctaatggaggtcctgctccagaagcaataactgataaaattttccaaatcagcaagacaattgaagaatatgcagtttgccctgacctgaaagtagaccttggtgttctgggaaagcagcagtttgacttggaaaataagttcaaacccttcacagtggaaattgtggattcggtagaagcttatgctacaatgctgagaagcatctttgatttcagtgcactgaaagaactactttctgggccaaaccgactgaagatctgtattgatgctatgcatggagttgtgggaccgtatgtaaagaagatcctctgtgaagaactcggtgcccctgcgaactcggcagttaactgcgttcctctggaggactttggaggccaccaccctgaccccaacctcacctatgcagctgacctggtggagaccatgaagtcaggagagcatgattttggggctgcctttgatggagatggggatcgaaacatgattctgggcaagcatgggttctttgtgaacccttcagactctgtggctgtcattgctgccaacatcttcagcattccgtatttccagcagactggggtccgcggctttgcacggagcatgcccacgagtggtgctctggaccgggtggctagtgctacaaagattgctttgtatgagaccccaactggctggaagttttttgggaatttgatggacgcgagcaaactgtccctttgtggggaggagagcttcgggaccggttctgaccacatccgtgagaaagatggactgtgggctgtccttgcctggctctccatcctagccacccgcaagcagagtgtggaggacattctcaaagatcattggcaaaagtatggccggaatttcttcaccaggtatgattacgaggaggtggaagctgagggcgcaaacaaaatgatgaaggacttggaggccctgatgtttgatcgctcctttgtggggaagcagttctcagcaaatgacaaagtttacactgtggagaaggccgataactttgaatacagcgacccagtggatggaagcatttcaagaaatcagggcttgcgcctcattttcacagatggttctcgaatcgtcttccgactgagcggcactgggagtgccggggccaccattcggctgtacatcgatagctatgagaaggacgttgccaagattaaccaggacccccaggtcatgttggccccccttatttccattgctctgaaagtgtcccagctgcaggagaggacgggacgcactgcacccactgtcatcacctaagaagacaggcctgatgtggtacgtccctccacccccggacccatccaagtcatctgattgaagagcatgacagaaacaaaatgtattcaccaagcattttaggatttgactttttcactaaccagttgacgagcagtgcatttacaaggcactgccaaacaagatgcccttgggagctgtgagggaaagaggacctgcgggcttagatcaatctcaattccttttcatgccctcctgcattgctgctgcgtgggtatttgtctccttagccatcaggtacagtttacactacaatgtaagctataggtggagcatcagcagtgagtgaggccattcttcatccttaggatgtggcaatgaatgatggtgcaagttcctttctcttttgtgaatctttcccccatttcctgtttacatgtacccaacaaaa

SEQ ID NO: 189192 - DNA, 810 bp, Homo Sapiens
ttggcttgtatagatctggaggaaagaaagctacgaaaaactttttaaaagttctagtggtacggtaggagctttgcaggaagtttgcaaaagtctttaccaataatatttagagctagtctccaagcgacgaaaaaaatgttttaatatttgcaagcaacttttgtacagtatttatcgagataaacatggcaatcaaaatgtccattgtttataagctgagaatttgccaatatttttcaaggagaggcttcttgctgaattttgattctgcagctgaaatttaggacagttgcaaacgtgaaaagaagaaaattattcaaatttggacattttaattgtttaaaaattgtacaaaaggaaaaaattagaataagtactggcgaaccatctctgtggtcttgtttaaaaagggcaaaagttttagactgtactaaattttataacttactgttaaaagcaaaaatggccatgcaggttgacaccgttggtaatttataatagcttttgttcgatcccaactttccattttgttcagataaaaaaaaccatgaaattactgtgtttgaaatattttcttatggtttgtaatatttctgtaaatttattgtgatattttaaggttttcccccctttattttccgtagttgtattttaaaagattcggctctgtattatttgaatcagtctgccgagaatccatgtatatatttgaactaatatcatccttataacaggtacattttcaacttaagtttttactccattatgcacagtttgagataaataaatttttgaaatatgacactg

SEQ ID NO: 189193 - DNA, 666 bp, Homo Sapiens
ttggcgcggccgctccttgacaaggacggaagcctcctggcgctcggccctgcgcccctccccccggcgcgcggccccgcccaggacgaggggcggtgggcaggcagcgctgggtccagtggtcgggggaaggcgaggattaccctcccggaggcgttgtctgcgactcggcggaggctccaacttccagtggcccggtcgggaaagatcagagcctcctaagaaatatccagaagtcaagccatggatccacctgcacgtaaagaaaaaaccaaagttaaagaatctgtcagcagagttgagaaggccaaacagaaatcagcccagcaggagctgaagcagagacaaagagcagagatctatgccctcaacagagtcatgacagaactggagcagcagcagtttgatgagttctgtaaacagatgcagcctcctggagaatgaggccccaggttcaaaccagatgggatcctgagagctttgagagggtgttgccagttttaagctgagatggcccatttggagccttacagaactagaccagaagacatttgtggataaatctgaactcacttcctgtgtgtaacttctaacttcactggttcctcccatctgaattggccacatgcttgctgaagagacttgttttcttcttctaagacagtg

SEQ ID NO: 189194 - DNA, 1699 bp, Homo Sapiens
ttggaccgagaagttcctgttaccaaactcatagacttggagaaatcccttctgcaaatggttcctttggatgaaggtgccagtgagagaccccttcaggttcccaaggagatctggcttctagtagatcacctattcaaatacgcctgtcaccaggaggacctgttccagacccctggaatgcaggaagagctccagcagatcattgattgtctggataccagcattcctgagacaatccctggcagcaaccactctgtggctgaagcactgctcattttcttggaagccctgccagagccagtcatctgttacgagctgtatcagcgatgtcttgactctgcttatgatccccggatctgccgacaggtgatctcccagcttccgagatgccatagaaatgttttccgttacttgatggcattccttcgagaactcttaaaattctctgaatacaatagcgtcaatgccaacatgatcgctactctcttcactagtcttctcctgaggcctccacccaaccttatggcaagacagactccaagtgaccgccagcgtgctattcagttccttctgggctttctgcttgggagcgaagaagactaaggcttttactgttctctgatattctagaagcagacgatctcgggctccaagtatttcagaatgatttaaaaagtcatgccacaggaagggtctattgcagaatttcaagttctgtttatagtaaaaaggaagagcgtttcctaatccctcctttaccatatcctacacagaaaaatacttttagacttatattgccaagccaaagttaccatattttggtgtttttgtgttttctctttataaggcaaaaagatctgtatttacactccttcacctagggatgtgtttgttgccctcctacccaattgtcatgattgtccttagtaccctaggcctagattctgagatcttcccattctaggcctacaagcactacttgctgtagctgagacttgtctagagtcctttgttttgcacttttgacccaccccttcctggatcactcctttgcactccactcccctcgttctgtcactttgaacgaagtctgagtgaggctagtgactccttgggtgtcctcaacagtgaattcactgtctgcgtgcagttattacatgcatttgtgcatttctactacaatggcatctttatgtctctgtaacattggccttttcatggctccacactgggtggaaccatattctcttagatcacatttagtagcataactgtagggactattagagatggcatctcatcgatgagagagaatcacaatcagaatggaagcactttgagtatctgaagagtgagagcattcatgtttgacaggtcctgcttcccactatccttttcctgttattattcaaattttacacaaggactaatcctgggtgtctctgagacccatctcctgcctagacatccacctccagagcaacactggccccacagtaaaagaggaagtcttgtacctcaagcaggcccatctagagctattgctccttcccacagcaaaggtattgtggatgacccttagaatccattctctggtcttctgaaataccaagggcagatgtcacctccttcctcagcaggactgactctgggctctacaaccagctccttcacataaagggtttagagactcccc

SEQ ID NO: 189195 - DNA, 1488 bp, Homo Sapiens
ttggggcactgtcatttgtaaatgccattgtcacagcctcatttgtaagcagcactgcctctctgtttggggagatgtaatgctggaagatcttaaggactacatacattctagagatgacagtgttgttcaaagacagcctagtaagtaattggtagaaatgcccttataaaaaccattctcttgtcatctactgggactagggttttaaatacagcttttaaaaacaaaaacagggaataaaagcttttcaactcaaccacttctttgtaagacaaaactgaagtatctgtgtgcttccagaaagcttacagataaatgggtttcaagcacaagaatatgactagatttcagaaattaattattacagggagctattgatctactagcatcaaacaaaggcaagctctaattccacaggtaatacaatttagtgcaattaaagaaacacggcttgtatttttatgagggaattctgcagctagggattgtgactcctaaatcctcctctaaaagaaggcacttgccattaatcctaattcagtgctatccagttataaatggaatcttgagacaaaaccttaacaaagaaataacagtaatgatttccttagcagaagccgtatttgtacgcacaacattaaatcaagggctacaattcaagcacttttattcgtatcattggcctcttagatgatataagcatgaggtggggcctgtaatattttttttctgagtttcttctgcccaaaaatataatatagaactaattgctaactgacaaataaagttaatagttaaatcatctccaaggaatgttgctaatccaaagtataacactatcaatttgtgaggataataaatggaatgccattagtgtagatgtctgtgccacatctgacactggagtagtgataacaaatagcccatctctagactctcgtgttgttatatagaccattcatttgcctgagcgtggcacagttttaaaaatagttctcttgattgatttcatacagaagatgactgtgatccatgacatctaataatgccctttctttatctgagatgtctatttttctaagccaaacgtttttcagactgcagaatgttcttcccagatcatttgaaatttctggctgccttacttgtttacagatagtttaagactatttaaatttctactcacaatttgatcatcacacacacacaaatccttgaatatcattgccagtgtcttaggtcaaatttacctaaagtgaatacagcccattctcaattatccttcacaattagacgcaggaatgctactaggaattggaatcaaacaatgctacctcaagcgtaattttagctagcagtttcagttatactcaaccatgcccttctgagctgttaacaagtgattcaatggacaagttctctttttgttccatctccattatttcctgctctaatgtatagtggagtggttgtgtaatgaaagga

SEQ ID NO: 189196 - DNA, 1355 bp, Homo Sapiens
cccccagagcatcacctggccaggtctgagggcagagcatggagtggtccagactttgtttctctgctgccagccgtagaaaggtctgggctgtcagatctcccccaagcccgacagcctcgctcagctccttggctggggccctttagggaacaggcctgcaagtgtgatgagcccaggtgtgctcatccaggcagctacaggcgcagcctcttgatatcttcactgcggaagtctatccgcagggccagcacctggcgcacttcagcaggggtgaggcgccacgtcaatgggccggaattgggtccccagtaatcgaggatctcggtcacccgctccagattgaggatggtggccatctgggagagccgggcaaacttgtctcggatggtccaggtggtcaccgtggtaaggtaggcaatgagcgacctcagctccttgtcaaactgcagaccacccagccggttaaaggtggatttcagcaccactttctccaactcgacggcaacaaggctagtcatgaggccggttaggctgtcgtagatgaccggggacaggctggccttgaactctgccatttgctgctccaggttaaggatgaactgttgtacccaagggtcgttggcctcatagtcattgaattcttcctcctcgatgttgtgggagacggagaaaaagctgttgatccaaggctgcacctgtggcttgatggctgtgctgttgagctccgtcagcccttcctgcaagaggtctcggaatttgttggacacggcggccaagtcagaaaggcagctgtcaaacttggcctgggcctgctcccctccaatgccctggctgaagagcttggtgcagtcactctccagtgtcttcttcagagtggagatgttttcactgcagacttccacgttgttcagagtcaccaggaaggacatcttcgcctcgtcagtactctcgatgccttttgtgtcaaatttgccttgctggaggctgctgtgcatgatgttcacggcacttgtcaccccgcgctggatgtcctggaaggtggtggcaggaaagcccatccgcagcttattacacagaacatccctgaagtcagactccagctctgtggtggcgaggttgatcatggcacagagacagtcaatgctggagctggacagagcccgcccaatgcacttcttaacaatgtagaagacatcatccaccatgctggatgtcagctggcccttctcataggtgtccagagccacagccttattgacagtctccctcatgaagtactcctccatggtaacatataagccaattagctcctgcatggtacagctcaaaaggcaggtattgaggagttccaa

SEQ ID NO: 189197 - DNA, 794 bp, Homo Sapiens
  misc_feature (712)..(725): n is a, c, g, or t
ttggcttccagcccccactcccctcaggaacccaaggttccagccctcctcccaaatcccagccacccctcccccaccagtttctcccctctaggggatggaggctgagagaccccaggaagaagaggatggtgagcagggcccccctcaggatgaggaaggctggccccctccaaactccaccactcggccttggcgatctgctcctccatcccctcctcctccagggacccgccacacaggtacccctacccacccagggagagccccgaccctagtgcccacatcctgaccccattaccaaggcccactccattgtgggccctctccccacctcctccagactccccttgggattccccattgcaccccctctcctctgatccaaagtccctaatcacgtcaccctgtccacactcccccacggctcctgtctgccaacctctctgggtctctgagccctccacacccctctccccagccctgggaccccgctcggcctccctgctctccctgcagactgaactccttctggacctggtggctgaagcccagtcccgccgcctggaggagcagagggccaccttctacaccccccaaaacccctcaagcctagcccctgccccactccgtcctctcgaggacagagaacagctttacagcactatcctcagtcaccagtgccagcggatggaagctcagcggtcagagnnnnnnnnnnnnnncaggggggcaagagctcctggagttgctgctgagagttcagggtgggggtcgaatggaggagcaaaggt

SEQ ID NO: 189198 - DNA, 931 bp, Homo Sapiens
actttgtacaaaaaagttggtacactggaggagagaagaatgagcctacgctgaagatggcatcctgtgaagtccttcacctcactgaaaacatctggaaggggatcccaccccattttctgtgggcaggcctcgaaaaccatcacatgaccacatagcatgaggccactgctgcttctccatggccaccttttcagcgatgtatgcagctatctggtcaacctcctggacattttttcagtcatataaaagctatggtgagatgcagctggaaaagggtcttgggaaatatgaatgcccccagctggcccgtgacagactcctgaggacagctgtcctcttctgcatcttggggacatctctttgaattttctgtgttttgctgtaccagcccagatgttttacgtctgggagaaattgacagatcaagctgtgagacagtgggaaatatttagcaaataatttcctggtgtgaaggtcctgctattactaaggagtaatctgtgtacaaagaaataacaagtcgatgaactattccccagcagggtcttttcatctgggaaagacatccataaagaagcaataaagaagagtgccacatttatttttatatctatatgtacttgtcaaagaaggtttgtgtttttctgcttttgaaatctgtatctgtagtgagatagcattgtgaactgacaggcagcctggacatagagagggagaagaagtcagagagggtgacaagatagagagctatttaatggccggctggaaatgctgggctgacggtgcagtctgggtgctcgcccacttgtcccactatctgggtgcatgatcttgagcaagttccttctggtgtctgctttctccattgtaaaccacaagctgttgcatgggctaatgaagatcatatacgtgaaaattatttgaaaac

SEQ ID NO: 189199 - DNA, 1558 bp, Homo Sapiens
ggctcctgcattctggcaccacttgaacacgagacctggaaagtcatcaccatggccatgatcagaactgttgttgtaagaattacatctccacttccctggagccctgtctgtggttaaggtgaaatttcaaatgctgcccaagtatgggctctagataatggaccacaaagaatatgcctgttttcttatcctaaaaataaaaagccagtgtctgccagcactagaaaattgcaaataagaagtttaatttcagaaactgagttcaccatttataaatacactaaaacatagtcaatgcaaatttagattaagcgtacgtacagtatttcaacaaaacaacttttctaaaaggtcgtaggcaaatgagtgattagtctcactcagaatatttaattggcttaaaatgagaaaatgaatctttttttctctgaagacataacttttaaaatcatctgacaactgacacttcactctgatgtccttgggatttgaaaatatcccagtgatggccgcatcttccctatcataaaaaaatctaaacactaaggctattcttacaactggaatataacaagcttcttccctgttaataagccatctcttctaaaaaaattttacacaaatttgatcaaacaagggggtcagtgcacacattttgaaagacagcttcagagcgtggagatgctgaagcggaggcgtgggggtttcagcagggaccacctgccatcagcgtgtcattgaacgcactggcgaagtgatgagcacagttacaaagggatcacatttcagaggagctgatgataaacagctggggtatctctgagttaactgaccatgtaaagcctgaatgcagaaacctgaaatgggaaagttctcaaaataagctccatgaaacatctaagtttcgtttccaaatgccacgtctctgtcgtagtaaacagttaccttccagaatattatctgtactccgcgggacactttagaacctgcggttaaaaactgctcagtcaggatggcttgccctccacctcctatttacagatttcatttgatagccacaaaagctattctgttgcaattaaagcaatgcttcactaaaatacagtacctgatttgtggtttgtacataattgagtaaaaagcctacagaataaaatggtttacatcttctttgtcattctagtaaaacaaattactaacccaaaactttaaaaaactttacggttatgaattaaaatctagccaccatatttcatagttgacaggacaagctatttctagtggacgtcttaataaaacaccccgcgaaacttggcctgaaggagaaggggtaaggcacgtggagacactgtggtgagctggagagcggccctgagagtgcctggtctgatgtcgtacacagccgtgggcagagcgggtcatagacctggtacaggctgctaacgctggggcagccacgcctctggcctagtggtgccgtcgtgagtttcaatactgaaagtatattaagggaagattcactttcaaaaagataagtttttcaaaatgttcccaa

SEQ ID NO: 189200 - DNA, 1582 bp, Homo Sapiens
cgcccagacccgagggcctcgtggggaaggtccattcgaaggactgtgataagctccagttggactctgccccaaagggacgatccagggccaactggctcccctggccttggggcagggcagccagcgagccccccagcttctcctggtcctgactgggtgactggagcacaccttcagagaatcggcgctgaaccaggctggtggggcggaggtgtgcgtcacccttggcctcctcctccccgccagatggaaacgtccgagtgagatccagcaactcacccacctcgatcaggggccggggtgaggtggcagggggctgatccaggctatggggctccaagacctcagggggtgggctgctgggtctgggggcctctggagccccctcggcagggagccccgggctgggggtgtggcgggagccctcgtcaggcagggctgcacttggagctgatggagtcacagcggggcagggagaagcctgggaagcttcaggactctgggcttccagaagctgtgagtggcagggagaactcttatcaggcgggtgaagatggggagagccagggcctgagcctgaggcttctgcggggaggcctgggctggcagggcctccattctctgaggagggggctggacttgagggaatccagggcttggaaatatcagcaggtagctccgagctggctgccttagccaggtccccgttgaaggccaggtcggaaggaaggctcctctcctcaggggtcttgctgtgctcttcccggcactctgctggagactttactggcccctcctgggaccatcccctgaagagggtgctgccatcctcatccctgggagcagtggtcgtgccataggtcctggggccatatcgcgagctgccatcgtggttaaaggtgaggcgggaaccccacaggcggtcggggctggcaaggacctccttccgaggctgctccatcttggccaggatctcttccaccgtggtggccgcgaagcgctctgaggctgggcggaaaggggcaggggccttccgtacaccccctggggctgcacatcgagctgggggtgtcaaagggggtggctcctctttcccagcctcctctttcccagtctcttgggtggcttctcctccagtggaggcctcaaccgcaggccttggtgcaaagggaagggggcgcttgctgccaccatagggctggggtcctgccagcatgttcatcttcctggcagaaggcaactcagccaggggaccccggggaggccgaggcccaacaggcaccagcaggctgggtttggcaggcagggctggcttggcaggcagggcccggggtttgggcttgacagggggtttggcccgagtgtcacctggctcagagccagtaggcaccagctcctcctccatctcccggggcagtggggaagccatggctgagctttccctgagagtagacactttcatcacatgcggcagaccctccttgagagcggggaggcagagaggtatgagctggggtggctgcagacgcgctcgcccggggtccggctccgctcggctcggggccccgatgccagccaa

SEQ ID NO: 189201 - DNA, 776 bp, Homo Sapiens
  misc_feature (686)..(716): n is a, c, g, or t
ttatgaaaaaagttatgggattaaagaaagtcaggataaaaattttaaaaagcaggccactgtcagcaaagcctggagaagtggggccggaggctccgcccccatcatgtgcctgccaccccttcccagtcatccctttactcttacagtagcaaataagacccctgtctaatggggggagacaaatgtgtagacccttagccaccttggccagggctgactccttaaatttctggatgatgatgattgttatttaatagccagaggctcatataattggcctctttggaagaggcctcatggcctccttactctcaccaaagcaatttttccctcaggggggctcccatcttcttacacagagaggcagctgaggcaggacagtggggctaactgtagaccaggcgagggcacgggctgctggggtggccctgcttccccagtgtacatattgtatctgtgtaacattttgtatattccaggggtagggccgccccctgtatcatacctagcagaggttggagctggcacatggggaggaggttctaataattatttggggctgggaaacttatttattgatagcataggacagaggaaggaggcggggatggggtcgtggcgccctggtgatgcgactcctgtttattttgctttttatttcggaataaatggatttagccatnnnnnnnnnnnnnnnnnnnnnnnnnnnnnnnccccactttcttgtacaaagtgggcttaaaaaagcattgcttatcatttgttgcacgaac

SEQ ID NO: 189202 - DNA, 1083 bp, Homo Sapiens
ttgggtttcaaaattccactcccaaagtcattgagtgcttcaacgtggaatctcgcatcctgtgcatgctgtacgttcccgtcgaggagaagcgcagagagcctggggcacccccggaccccgagaccccggccgtgagagcttctgatgtccccacgatctgtgtagggacggaggagggaagcatttccatttataaaagcagtcaaggctccaagaaagtgagacttcagcactttttcactcctgagaagtccacagtcatgagcctggcttgcacgtctcagagcctgtacgctggcctggtcaacggggcagtcgccagctacgccagagccccagatggatcctgggattcagaacctcaaaaagtgatcaagttaggcgtcctaccagttagaagtctactcatgatggaagacacgttgtgggcggcttccggaggtcaagtcttcatcatcagtgtggagactcatgctgtagagggtcagctggaggcccaccaggaggaaggcatggtgatctcccacatggccgtgtccggcgtcgggatctggattgccttcacctcagggtccacgctccgcctttttcacacggaaactctcaagcacctgcaggacatcaacatcgccacccctgttcacaacatgctgccagggcaccagcggctgtcggtgacgagcctgctcgtctgccacggattgctgatggtcggcaccagcctgggagtcctcgtggccctgccggtcccacgtctgcaagggattcccaaagtgaccggaagaggcatggtctcctaccatgcacacaacagtcctgtcaaattcatcgtcctggccacggctctgcacgagaaagacaaggacaaatccagggacagcctggctcctggccccgagcctcaggacgaagaccagaaggacgcacttccgagtggaggagctggttcatctctgagccagggtgaccctgacgcagccatctggttgggagattcgctgggatcgatgactcaaaaaagcgacctgtcctcctcatctgggtccctgagcttgtctcacggctccagctctctagagc

SEQ ID NO: 189203 - DNA, 1067 bp, Homo Sapiens
gaaatttcaaaaattattttcacacatgattatcatacagtattacaatggattatgtgcaaaattccatttaaaaaatcatttacaaaagtacaacacagtatgtgctgagggttctagttcaacaaaagccaaggctaaaaaaggtacaagggacaaagccaaccaaatgaaatgactatgcatctttacacagtacaataacatgtttttgtaactacctgtgttacgtggatacaaaaccctcatagtttgggcacctgcaaactggttttatttaacataagtttaatttcactgcaggttctgataatgtagattgatttttttgtgcattttcaaattcttctccattatatagcatcttatttaactcaacaaaagccacattatacattacttggtttctggtcccaataatttgatgctgttaagttttaatttgtatggaaaagggagaaaagtgttcttcttgatttttattttcctcaaggggctttcaaaattgtttctacaagcaaatcacacatggaatagattttgccaaacctcactgcatatttacagtattttaagcataggtggttccttctatctctttttctacatcttttgaagagcctgaaccagcagactgcactcctcagtcctttgttagagttcatatttctctctctacctctctctacattcatttctctccttattctcagcatcatttgtttaaaaaacaaaacagcaaaacaccactaaacgtgaacaagagaacagtacatccgatttccaaaggcattctgtggccagtgtcaggaatacgttgctttaagaaatccagcagtctctccccacaaagttgccaaaacatccagttacagaagagagactttaaaaatgcaatactctcaaatccagcaagagatttatttttgaatattaaatgttaaaatcacatgcataattatagaatattttaaagttacaaaaatattttaaaaccaatcctgacagtttacctgcaactgctataaaaatttctatgaaatatataaaaacatgaaggctttttg

SEQ ID NO: 189204 - DNA, 1581 bp, Homo Sapiens
ttggattcatcctcgtgcaccataggcggcacaggcaccaagatgtccaaccgagtggtctgccgagaagccagtcacgccgggagctggtacacagcctcaggaccgcagctgaatgcacagctagaaggttggctttcacaagtacagtctacaaaaagacctgctagagccattattgccccccatgcaggatatacgtactgtgggtcttgtgctgcccatgcttataaacaagtggatccgtctattacccggagaattttcatccttgggccttctcatcatgtgcccctctctcgatgtgcactttccagtgtggatatatataggacacctctgtatgaccttcgtattgaccaaaagatttacggagaactgtggaagacaggaatgtttgaacgcatgtctctgcagacagatgaagatgaacacagtattgaaatgcatttgccttatacagctaaagccatggaaagccataaggatgagtttaccattattcctgtactggttggagctctgagtgagtcaaaagaacaggaattcggaaaactcttcagtaaatatctagcggatcctagtaatctctttgtggtttcttctgatttctgccattggggtcaaaggttccgttacagttactatgatgaatcccagggggagatttatagatccattgaacatctagataaaatgggtatgagtattatagaacaattagaccctgtatcttttagcaattacttgaagaaataccataatactatatgtggaagacatcccattggggtgttattaaatgctatcacagagctccagaagaatggaatgaatatgagtttttcgtttttgaattatgcccagtcgagccagtgtagaaactggcaagacagttcagtgagttatgcagctggagcactcacggtccactgaagctctgaatcctcagggatgccacctgcacattctcatactctgtccggggtcccagcctagcctttaccacgatactggtcctggtttggggggattctgaaacctcaaactaatagaactttcttctctttttttctagtaggtgtagtccttccttaatttcaactcattaaaaaatgctttatagtttagggcagtggaaggaaggctggcatcaaaatattttgatcaaaaaagatgacaatgtaaaggctcagttgtggcagacagttttttgaaagtaacttgtaaagcatttaccatatcctaaatttgcactctttgcagacttgtgcacatatattccgctttcagaatagttttgcaaattgtacacaaacaaacaaaaaggtggaagctttttaataaagaaattgcatttataaatgatctgtattagaatataataaatctccagttatagtcaattactacccatgttgtacaacagataccttctattttagttgctaataaagggctacacaactcaaaatagtctgatttaaacttattgctctgtggtatatatgaaaattgttttttattaatttccatctcagaatttttgttaaaatggtaaacctcagctcttatgtaaaa

SEQ ID NO: 189205 - DNA, 1841 bp, Homo Sapiens
  misc_feature (246)..(255): n is a, c, g, or t
  misc_feature (1272)..(1351): n is a, c, g, or t
  misc_feature (1429)..(1441): n is a, c, g, or t
  misc_feature (1464)..(1509): n is a, c, g, or t
  misc_feature (1574)..(1604): n is a, c, g, or t
ttggccagcacctaaaacagggtcacacaacattcactaaatgtttgttgaataaaagagttaacaaacataattgaaagctttttttcttcctatatttagcatgaagactgtcattgtttctctaggaaatgtatgaatctgaacttttttgacttgaagaaaaacattctttttttacagagatttggactttgatgataggttttaaaaatatatgataaatattttttgtacttgtttgannnnnnnnnnaaagactttacttcagaaagggaaagactgtttagaaagaatgcatattttttccctatttatttctgtggttactgcttttgcagtttaacagtgtttgtatttgatatttgtatatgtttgattgctatctttaaagtgccttatcagatttatggctctgtgctattactttttgaactttgcaagttgtgtacataataattctaaagaagttactttgtttgcaatgcatcaaatttaaatgatgtgattttttttgtattatttgatcttagtgacagtgttctattttgcatcctgtatcttatgttgcttttggtgttttgtgttgtgtgtcaacgattaaaccaactaattctctaccatatataacttctggacatttttgatacaacatcttaattctttgtagatatggagataggtacagaactatattctaatgccccacaatggggctatgagaggggacagatggatgggcaaagaatagttttgtttaacatattaggtcatagttcttgattagtttttttagttaaagataaacacatagggtgtgatttctataccaaagatatgcttatttcagtattagaaaaatattcttcttacatctcctgaaaattgcaatttttaaaatgtgtaaaaataaattattattaaaagcacattttatttccatttgtttggattcattaccttaaaactttattgacatatttcaaagatataggaaaggtaaatgatttcaagaaaatccgtgtatttctaccatgcagatgtaataaatgttagcatttggctatattttcttcagacacacatatgcatgtaattgcaaatgttagatacatttgaagtttgctttgttacctgtttgatcctgtcccgttcctccctccccagagtccccagaggtaaccactagagggggcataatatagcatgtgtttttatatttttaatacaaatatattttttaaaagcgctacaaaatattgttttatatannnnnnnnnnnnnnnnnnnnnnnnnnnnnnnnnnnnnnnnnnnnnnnnnnnnnnnnnnnnnnnnnnnnnnnnnnnnnnnnttacagtgctgacttttgtaactaccaggatattgagcaaatgcagtgtgtgatttctgaggccatatcttttactcnnnnnnnnnnnnnaagagacaagatctcactctatnnnnnnnnnnnnnnnnnnnnnnnnnnnnnnnnnnnnnnnnnnnnnntagacttggactcaaacaatcctcccatctcgcctcctcctataaagcactgggagtacaggcannnnnnnnnnnnnnnnnnnnnnnnnnnnnnnacttgtcagtttttagatattacatattttgaatactaatgatctgttatgtatgttccaattatcttttttagtctgggtttgtcttcatattttggttatgaaatcttgaaatttttaaaaacgtattttaccaatctttcataatgatttgctttttctggtttttgtataggaaatgtcataaaaataagccctatttcagccttccaaaagttacaaaatttttggttttta

SEQ ID NO: 189206 - DNA, 899 bp, Homo Sapiens
gttttcactttcatgctcctggcagatgagctcgatgtcacgaagttgctgaagtagaagtcacgttccttctccagcccatccactgtcagcttcaagtccaccagctgttggttgagttcaagaatttgggcatcagtctcatggccgccatttcgggctgatggaggattcttccggagaatgcaggggggggccacattgctcagccggccagaggtctgcatgttttttgggcctgtgggggacgtcctctgtggaactgctgtgccaatgagtttcttggatttgttgaagatctgatcacctgggttaggaggtggcgctacgtcctggccctgccgcgccagcagagggttgtaatcctttccatcatagtttgcgtcaaagaatttcttaaaccactgaataaactcaaaattatcttggaattttcctttcactaatttctctacaggaatgattttgtcaacacccatcttcttgaaagctgcttgcagcaccttgaagttgtggatgtattcatgctctagtttggcctggaacttcactttcctcaagtgcacacagccggggaagagcatgtccatgaactggcagtaggctgcccctgaacaaagctgttctatcttggtatagttgaggtgcagggagtcgttgacccatgcaagcatatcatggcgactcagattttcactggtcacagatgtggagtacacattgacggccataccccagagtgcacgaggcggctccggcggaggcggagggggaggggacaggtggcgggggcgctgcggcagaggctgcggctccggccggcggctccggggcggagggtcctcgctgaggccgccgcggtctccggcttcaacgcacagagactgcgggggacccaa

SEQ ID NO: 189207 - DNA, 1104 bp, Homo Sapiens
  misc_feature (466)..(597): n is a, c, g, or t
ttggctggacttgctggccatctactgccgcaacgaggccgggcaggaggaagtggggatgccgcctctgcccccgccacagcagccccctcctccttctccacctcaaccttctcgcctggccccctacccacatcctgccaccacccgaggggaccgcaagcaaaagaagagagaccagaacaagtcggcggctctgaggtaccgccagcggaagcgggcagagggtgaggccctggagggcgagtgccaggggctggaggcacggaatcgcgagctgaaggaacgggcagagtccgtggagcgcgagatccagtacgtcaaggacctgctcatcgaggtttacaaggcccggagccagaggacccgtagctgctagaagggcaggggtgtggcttctgggggctggtcttcagctctggcgccttcatccccctgcctctaccttcattccaaacccctctcnnnnnnnnnnnnnnnnnnnnnnnnnnnnnnnnnnnnnnnnnnnnnnnnnnnnnnnnnnnnnnnnnnnnnnnnnnnnnnnnnnnnnnnnnnnnnnnnnnnnnnnnnnnnnnnnnnnnnnnnnnnnnnnnnnnntcaacccttcttccccaccaaaccacccaactcctctctactcttatccttttatcctctgtctctgcttatcacctctcttgcgtatttctggatctccttccctcctttctcgtccaaatcatgaaatgtttggccttagtcaatgtctatgcccgtcacataacagccgaggcaccgaggcccacagggaagcagctgggagcttggaaacctggtctcttgaatttcaaacctggtttcttacaggtggttgtctggggtgggtggagtggcgacaggatagagctgaaggactatgcaaatgaggaagtaagtcagggcgggctttgagaaggggacccatatcctacaggcaaaaagcaggctaggtgaccttgggacactacgctaagggagggaggctaaaggcggccaggtttgcagtgcgggaagatgagcaggccagtgggaggaggggcagggcagggctgtagttggtgactgggtgttcattttagctctaag

SEQ ID NO: 189208 - DNA, 1342 bp, Homo Sapiens
ttgggttacttcagtcagatccgcaaggatgctctccgggcgctcaactttgcgtacacggtgagcacacagcgatctaccatctttcccctggatggtgtggtgcgcatgctgctgttcagagactgtgaagaggccaccgacttcctcacctgccacggcctcaccgtttccgacggctgtgtggagctgaaccggtctgcattcctggaaccagagggattatccaagaccaggaagtcggtgtttattactaggaagctgacggtgtcagtcggggaaattgtgaacggagggccattgccccccgtccctcgtcatacccctgtgtgcagcttcaactcccagaacaagtacatcggggagagcctggccgcggagctgcccgtcagcacccagagacccggctccgacacagtgggcggagggagaggagaggagtgtggtgtagagccggatgcacccctgtccagtctcccacagtctctaccagcccctgcgccctcaccagtgcctctgcctcctgtcctggcactgaccccgtctgtggcgcccagcctcttccagctgtctgtgcagcctgaaccaccgcctccagagcccgtgcccatgtactctgacgaggacctggcgcaggtggtggacgagctcatccaggaggccctgcagagggactgtgaggaagttggctctgcgggtgctgcctacgcagctgccgccctgggtgtttctaatgctgctatggaggatttgttaacagctgcaaccacgggcattttgaggcacattgcagctgaagaagtgtctaaggaaagagagcgaagggagcaggagaggcagcgggctgaagaggaaaggttgaaacaagagagagagctggtgttaagtgagctgagccagggcctggccgtggagctgatggaacgcgtgatgatggagtttgtgagggaaacctgctcccaggagttgaagaatgcagtagagacagaccagagggtccgtgtggcccgttgctgtgaggatgtctgtgcccacttagtggacttgtttctcgtggaggaaatcttccagactgcaaaggagaccctccaggagcttcagtgcttctgcaagtatctacagcggtggagggaagctgtcacagcccgcaagaaactgaggcgccaaatgcgggctttccctgctgcgccctgctgcgtggacgtgagcgaccggctgagggcgctggcgcccagcgcagagtgccccattgctgaagagaacctggccaggggcctcctggacctgggccatgcagggagattgggcatctcttgcaccaggttaaaggcggctcagaaac

SEQ ID NO: 189209 - DNA, 888 bp, Homo Sapiens
ttggcccatttccacttcatcactgttggagatcatggagctaagaagcagagccaagtccacccatgtccttggcagagatgacaggcacacagcttgtgcagtgccagaatatcattagcgtttcccttctttagtggtttgcttaaatttaaatccctggtaatctgtagaaccttctcctaggaaatggtgaagtctattaggagccacttgtgactccatgacctgttaaaaccagcaatgtgagtattatttggagtaaatttgttccacgtcaagttctggccttctgatgcaaatgcaaaggaacttagtctgttatgaacccaggttgatgacagaccagtccttgtggaataagattccctttaaaaactctttagccagtcgtgacatcaaccctagacctgtctgccttggcatttgctgtcaacatctgctgggctatgtaggcaggttaatcctccacttctcatgtggttgaaccagtgtgttttttggtaaaatggtgattgtagataagattagttccctgatcccctgccccctgtcccctgcctcttttcccaattcccttccttatgctggacttttaaagcttaaaaaaaatccgattgaatataaatgcctaatttcattctttgtgaaatggttgcttcctcctgattccctaattgtgctgtgttcgtgtcttgcactggaattcaacattcccttctccttttgtactgtgttgtgcttgctgtctctcccggacaccctttaaagactgtctttttagcaaaaaatttcagtaaagtgttttctgtaatctttttttaaaggtgagaactaattattgtccatacttgtagcattcttcattaaagtcttgcttctctcaac

SEQ ID NO: 189210 - DNA, 1862 bp, Homo Sapiens
  misc_feature (1267)..(1275): n is a, c, g, or t
ttggctaaagttcaagaaactagtctgtcatcgggaaaaagtttcactgctacataggattttgtcaaattgaaggtgtgacaagatggtgttctgctaatgttaaatgtcagcccacagagctaataatacctcagtataatgtcatgagcagttgaaattcatcacatgaaaagtaatctgctgaaagacttggttgcccactgcctaactgtgtacagtgttaccagtgtcccattatggataattctcaatatgttaacacctaggtgttcccaatacctttttcccctcatgtcactactgaattttgacaggaggaaggaatagaatgatagcttgttttatttgtaaagctttcagtgaaacactacatacacgaagaaaaggaacaaggtttaactatttaagaaccatttgctgccgcatagtgccattggatagggaagaacttcagaaatctgtggtactcttggccttgtctttgtcttccctgaacgtgtctccactctgtgaagccagcatctaggggctaaagatgcaaaggaaagcagcatgcattgtctgtacaaatgtgcagcgaaatacccgaaagcttttcctactgtacagatctctcgagtctgctttaagtgatttcttttcttcttgattattttcttatatttctatatgtatagtgtaatagccttttgttaactaattttcttttttccttttagtaattaagcacgatcatgtccctttttaagccttacctgagaggaacaatgccttaaaataaaaaagcattaatgagatgaaagtatgcacagaataactttcctctacttattctgtactttgccctcatgagttccaatgttgtgtgaagacaggcagatgctgcacagtgaattgcagatgatattacagaagtgatgtctgtaggtcacattaaatactgacttgagcagtgggtgacacaacacagtgtttgtcttccacagggaagcttaaaacaaaagatatttttaacccactgacagaacaacaaggttaagcttcatctgcttggtgtcccacagaacttgcacaagcagttgttattgggaaagtacagtctcaaaaccagcaacagcagcagtacctacagccctttttttggagagaagtttaaatgctttactgttggggcagtccatttctaatcctgacttggtgacagtatcatgtgtatttataaaacaaggctagccatatttaggacaactgaagaaaagctggnnnnnnnnncaagcaaacttgaacactgaagcaacctcaagcatctctttattttgatgatatatttttgtaaggaaaatattcagatgatcaggaatgtatataactgaaatcaagaaaaagaacagtatgcatttaaaaagacagaattatgaaattatatgagtgcttagaatggggctaagggaagtgctgaaatagagcaaaggatggaagataatatagactaccacccactgtaaatgtttgcaagtggctgtgttttaaatgggattattacagttgatctctatgaatgtcagagccctaactttcaggctttgcattttgtatatgggaagaaatatgacaatcctaggtaattaaaccatagacccaaagcccttacgtttgatgcaatttatttttaaaataggccttgtttttcagcttcatctgcagttctatgtgaagattgataaatcagtttttacttgttttattaataaaacgtaatttggatatcttgagttgatggttttgtgatttagctgggtaaactatctttgtaacagataagttatttataaaaattaaaaaacttatattctaatgtg

SEQ ID NO: 189211 - DNA, 654 bp, Homo Sapiens
  misc_feature (58)..(66): n is a, c, g, or t
ttgggtgtatttataaaacaaggctagccatatttaggacaactgaagaaaagctggnnnnnnnnncaagcaaacttgaacactgaagcaacctcaagcatctctttattttgatgatatatttttgtaaggaaaatattcagatgatcaggaatgtatataactgaaatcaagaaaaagaacagtatgcatttaaaaagacagaattatgaaattatatgagtgcttagaatggggctaagggaagtgctgaaatagagcaaaggatggaagataatatagactaccacccactgtaaatgtttgcaagtggctgtgttttaaatgggattattacagttgatctctatgaatgtcagagccctaactttcaggctttgcattttgtatatgggaagaaatatgacaatcctaggtaattaaaccatagacccaaagcccttacgtttgatgcaatttatttttaaaataggccttgtttttcagcttcatctgcagttctatgtgaagattgataaatcagtttttacttgttttattaataaaacgtaatttggatatcttgagttgatggttttgtgatttagctgggtaaactatctttgtaacagataagttatttataaaaattaaaaaaacttatattctaatgtg

SEQ ID NO: 189212 - DNA, 1037 bp, Homo Sapiens
aaaagataactaaaatattcataggatctacagttgtgacacatataagaatgaaatactcactgataaaaacaatcatagctataacatttataaggtttgtcccagtataacaggcatccagagttgggccagaaggctgtttccaggtgaccataacagggcttctctccaatatatgttctaaagtgagaaaggaggcatgaggggcaacaaacacttccctgagtcatttcattcatggagtttctggccattgtggattcgcttgtgcattataaggttagtgcttgtgctaaaggctttttcacactgaatacatttataaggcttctctccagtgtgagttctcacgtgtaccctcaggcaagaggaattcctaaaggccttcccacattctttacactcataggttttctcaccagtgtgagttctcttgtgcacaataaggtaagagcctgtgctgaaggactttccacactggttacactcataaggcttctctccagtgtgagagcgtgtgtgtttcttaagggatgactgatcgatgaaggcttttccacagtcactgcattcatagggtttctctccagtgtgggttctcacatgtttctgaagggatgaaggaacagtgaaagccttcccacattccttacagtcatagggtttctctccagtgtgagttcttttgtgcacattcagatgagagctctggctaaaggattttccacagtgatcacactcataaggcttctctccagtatgagatctcatgtgtttcttaagggaagactgaaaaatgaaggctttcccacagtcactgcattcatagggcatctctccagagtgagttctgacacagttctgaagggacaaagggtcagtgaaagttttctcatgttcattacattccaaaccctcctccacactaccagtttttgtgtggacactaaggggagatattttgccatagtcactgcattcatcacctttctctccagtaggtatttgctcacgtactgagcaggaagagccaa

SEQ ID NO: 189213 - DNA, 921 bp, Homo Sapiens
ttggcttaacagcgcgttcccgttggcgtctgaggaacagcatctctgccttcctgttcacggtgaccttcgcttggtgtcctcctggcctcagcaacctgacaattctgtcgtgtcccgatcatctttctcaagatgttttctgtcttcatgagtcaaaatttgaagaggaaaggatggtggctgggtggttgacaaattactctcaggactcagtgacctttgaggatgtggctgtggacttcacccaggaggagtggactttgctggatcaaactcagagaaacttatacagagatgtgatgctggagaactataagaatctagttgcagtagattgggagagtcatattaataccaaatggtcagcacctcagcagaattttttgcaggggaaaacatccagtgtggtggaaatgaattcagagtaaaagggagaatctcaatgaaataaatttggaaaacttctatgaaccatcattaattttcaccaacaggagagaaaccattttggagaggaactgtttgactttaaccaatgtgaaaaagccttgagtgaacactcatgccttaagactcacaggagaacttactttagaaagaaaacctgtgagtgtaatcaatgtgaaaaagccttcagaaaaccctctatctttactttacacaagaaaactgatatcggagaggaacttcctaactgtaatcaatgtgaaacagccttcagccaacatctacatcttgtttgcaagaaaactagccaaaatctacatcttgtttgcaagaaaactcacactcaagagaaaccatataaatgcagtgactgtgaaaaaggcttaccttcctcctcacacctcagagaatgtgtaagaatttatggtggagagagaccatatactcataaggagtatgtcgaaacctttt

SEQ ID NO: 189214 - DNA, 1262 bp, Homo Sapiens
taaaatgatttattttatatatgcaaaatccaaaatctcttggtacactttaattttgcaaattcatacaaacataacaatactgctccatataaacttttgtataaacattaaaggaaatatacacatattttgttcttcttgtgcttccaaagcacagaatgtataagtccatctgaagactttctatcatcacatgcaagaacaaatgtcagaggttgggggcagcctcaagtgcactttgtaatgtctctagacaaaagagaagagagttggaggtagattgtttggtgactctccctgccccttcccacagagaaataagttacccaaatagcagcttcttacttctttgattcaaactatcctgaatattgcatggtttaaaaggcacaactaggaattgttgaaaactttgttcagcacacataagattgccatttcctttctgtacacctattctttctgaaggacacagtaagagcaccaagttgtgctccacttgcaggtggcccctcgccactctgagaatgcctggaatggcaaagttcaagtgagtgacctctcattacccgtggtaggggcagtggtgtttaccgaatttagcctgtgaattaataacatcagcttcctcaattgaggaaaacaaaacaaaacaattcatactttaaaaaattattaaggcaaaagcccagctttcactgccagataatcataaaattcaaaagccccactgctgcttcttagcatctggaaagcaattcccttgactcaaacattccaggaggcttcaacaatatcctgttccatcctacagcacagaaaacttgtcatttttttctcactggtctttgcactaacatgatgatctgctgttgatgtgactaatgttgttgtgaaggtggtgggaatttattttttctagtaccttctcaaggtactgaattaggactcgtcttttaaaccttgcggcttccttgatggtaaattcaacaaactgtttcttcatctccagaggtccttgcacttcttcaagcaaaatgaaaattctttcatattttcgaccaaactttcgaacttccttcattaattgatgttttatatcagcattgattccttgtgccatagcaggagtgatttgtaatgtatttggcatagctcccaaagtagatgctactgggtctttttggtcatctacggagagactgcagtttttggctcctcctacaaatgcgttactaccaggtttttgaatcagccaa

SEQ ID NO: 189215 - DNA, 1609 bp, Homo Sapiens
  misc_feature (1478)..(1491): n is a, c, g, or t
ccctataaaagccaactttgtacaaaaaagttggggcagcgccggcctccggaggcggcctgggcgatggcggcggagttttgtccataacgtgggcaaccgcgcagctggaggatggcctcactcgggcctgccgcagctggggagcaggcgtcgggggctgaggcggagccgggccccgcggggccgccgccgccgccctcaccgtcctctctggggcccctgctccccctgcagcgggaacctctctacaactggcaggcgaccaaggcgtcgctgaaggagcgcttcgccttcctcttcaactcggagctgctgagcgatgtgcgcttcgtactgggcaagggtcgcggcgccgccgccgctgggggcccgcagcgcatccccgcccaccgcttcgtgctggcggccggcagcgccgtctttgacgccatgttcaacggcggcatggccaccacgtcggccgagatcgagctgccggacgtggagcccgcagccttcctggcgctgctgagatttctatattcagatgaagttcaaattggtccagaaacagttatgaccactctttatactgccaagaaatacgcagtcccagccttggaagcacactgtgtagaatttctcaccaaacatcttagggcagataatgcctttatgttacttactcaggctcgattatttgatgaacctcagcttgctagtctttgtctagatacaatagacaaaagcacaatggatgcaataagtgcagaagggtttactgatattgatatagatacactctgtgcagttttagagagagacacactcagtattcgagaaagtcgactttttggagctgttgtacgctgggcagaagcagaatgtcagagacaacaattacctgtgacttttgggaataaacaaaaagttctaggaaaagcactttccttaatccggttcccactgatgacaattgaggaatttgcagcaggtcctgctcaatctggaattttgtcagatcgtgaagtggtaaacctctttcttcattttactgtcaaccctaaaccccgagttgaatacattgaccgaccaagatgctgtctcaggggaaaggaatgctgcatcaatagattccagcaagtagaaagccgctggggttacagtgggacgagtgatcgaatcagattcacagttaatagaaggatctctatagttggatttggcttgtatggatctattcatggccctacagattatcaagtgaatatacagatcattgaatatgagaaaaagcaaaccctgggacagaatgataccggctttagttgtgatgggacagctaacacattcagggtcatgttcaaggaacccatagagatcctgcccaatgtgtgctacacagcatgtgcaacactcaaaggtccagattcccactatggcacaaaaggattgaagaaagtagtgcatgagacacctgctgcaagcaagactgnnnnnnnnnnnnnnagttcccctggcaataataatggcacttcaatagaagatggacaaattccagaaatcatattttatacataatttagcattataatacatcttggctaaataataccataacaatcta

SEQ ID NO: 189216 - DNA, 1294 bp, Homo Sapiens
ttggctcagggtggtgatggagtagtacctgatacagagctggaaggcaggatgcagcaggctgagcaggcccttcaggacattctgagagatgcccagatttcagaaggtgctagcagatcccttggtctccagttggccaaggtgaggagccaagagaacagctaccagagccgcctggatgacctcaagatgactgtggaaagagttcgggctctgggaagtcagtaccagaaccgagttcgggatactcacaggctcatcactcagatgcagctgagcctggcagaaagtgaagcttccttgggaaacactaacattcctgcctcagaccactacgtggggccaaatggctttaaaagtctggctcaggaggccacaagattagcagaaagccacgttgagtcagccagtaacatggagcaactgacaagggaaactgaggactattccaaacaagccctctcactggtgcgcaaggccctgcatgaaggagtcggaagcggaagcggtagcccggacggtgctgtggtgcaagggcttgtggaaaaattggagaaaaccaagtccctggcccagcagttgacaagggaggccactcaagcggaaattgaagcagataggtcttatcagcacagtctccgcctcctggattcagtgtctcggcttcagggagtcagtgatcagtcctttcaggtggaagaagcaaagaggatcaaacaaaaagcggattcactctcaagcctggtaaccaggcatatggatgagttcaagcgtacacagaagaatctgggaaactggaaagaagaagcacagcagctcttacagaatggaaaaagtgggagagagaaatcagatcagctgctttcccgtgccaatcttgctaaaagcagagcacaagaagcactgagtatgggcaatgccactttttatgaagttgagagcatccttaaaaacctcagagagtttgacctgcaggtggacaacagaaaagcagaagctgaagaagccatgaagagactctcctacatcagccagaaggtttcagatgccagtgacaagacctagcaagcagaaagagccctggggagcgctgctgctgatgcacagagggcaaagaatggggccggggagccctggaaatctccagtgagattgaacagagattgggagtctgaacttggaagccaatgtgacagcagatggagctcttggctcatggaaaaggactggcctctctgagagtgagatgagggaagtggaaggagagctggaaaggaaggagctggagttt

SEQ ID NO: 189217 - DNA, 972 bp, Homo Sapiens
ttggctgagccagtcccctgtgttccaggagccgaatcagaaatgtcatcctcaggcacgccagacttacctgtcctactcaccgatttgaagattcaatatactaagatcttcataaacaatgaatggcatgattcagtgagtggcaagaaatttcctgtctttaatcctgcaactgaggaggagctctgccaggtagaagaaggagataaggaggatgttgacaaggcagtgaaggccgcaagacaggcttttcagattggatccccgtggcgtactatggatgcttccgagagggggcgactattatacaagttggctgatttaatcgaaagagatcgtctgctgctggcgacaatggagtcaatgaatggtggaaaactctattccaatgcatatctgaatgatttagcaggctgcatcaaaacattgcgctactgtgcaggttgggctgacaagatccagggccgtacaataccaattgatggaaatttttttacatatacaagacatgaacctattggtgtatgtggccaaatcattccttggaatttcccgttggttatgctcatttggaagatagggcctgcactgagctgtggaaacacagtggttgtcaaaccagcagagcaaactcctctcactgctctccacgtggcatctttaataaaagaggcagggtttcctcctggagtagtgaatattgttcctggttatgggcctacagcaggggcagccatttcttctcacatggatatagacaaagtagccttcacaggatcaacagaggttggcaagttgatcaaagaagctgccgggaaaagcaatctgaagagggtgaccctggagcttggaggaaagagcccttgcattgtgttagctgatgccgacttggacaatgctgttgaatttgcacaccatggggtattctaccaccacggccagtgttgtatagctgcatccaggattttg

SEQ ID NO: 189218 - DNA, 1309 bp, Homo Sapiens
ttggctttttgagaatctctgctctgttcctaggttcagtgctgggtcctgggaatacagcaggacagacctcagcttatctcttcatagaaattatacaaagagaattggggagacagctaagaagaaaacaaagaaataaagcagttacaaattgtgataagtgctttgaaggaaagaaggggtctgagacaacaacagggaaggggcctctcttgaaacagtagttgggaaggaggcagacatgcaccagtgatgtggtgacaggtgctctgaaggaggtcaccaggacctgacctctttgaaggatcagaaaatacttccctgaaggactgacatttgagcctagacctgaagggtgagccatcaagctaagacaattggggaagagcattccagggagagggaggagttgtgcaaaggccctggggctccttctagctggaggaatgcaaggctagcttgtctggagcactgagaggatggcctgaactgagtggagagagacagaccaggaccaaaccatgcagaggtcaagggccacattcaccttttcagagtgactcaatcaaatttgtagtttgtaaaagtattttaacagctctgcggcaaagtgcaaatgaaaagtcttgatggcatggactggagcggggacagtggggatggagaaaggggaatggattgtggatgtgtttagaaggtagattcgatgtgaaggatgaatctggcttgaccttctgggtggctgatgggccatttactgagatggggcagcctggaagaggaacagaagcagggtcggggtggagggagaatactaaacttagcttgagacattttgcaataaggaagctatatctagagtgcttatgtgactcacctaaggccactcaacaagtttgtggcagaactggattagaactgcacagaaaacagccaagctgggatttgaacccatgtagtccaactccaaggcctctgcccctaaccactgtgccataccacctcccaataatcaacagcaaaattataggtctaacaatgttttatagacacccctccatttatgtgatgggtttgcatcctgataaacccatcataagttaaaaatatgatcataagttgaaaatatgatcataagtcaaaaatgtatttaatatacctaacctaccaaacatcatagcttagcctagcctgccttaaacatgctcagaacacttacattagcctacagtgggcaaaactatccaacacaaaatctatattgtaataaagttgtaaagaattttgaataaaaattcaatatttg

SEQ ID NO: 189219 - DNA, 1794 bp, Homo Sapiens
  misc_feature (1536)..(1561): n is a, c, g, or t
ttggatattattcacagtttaatgaagtctgatctagtggaatatttcactttggaaatgcttcacttgggaaacaatcgtattgaagttcttgaagaaggatcgtttatgaacctaacgagattacaaaaactctatctaaatggtaaccacctgaccaaattaagtaaaggcatgttccttggtctccataatcttgaatacttatatcttgaatacaatgccattaaggaaatactgccaggaacctttaatccaatgcctaaacttaaagtcctgtatttaaataacaacctcctccaagttttaccaccacatattttttcaggggttcctctaactaaggtaaatcttaaaacaaaccagtttacccatctacctgtaagtaatattttggatgatcttgatttactaacccagattgaccttgaggataacccctgggactgctcctgtgacctggttggactgcagcaatggatacaaaagttaagcaagaacacagtgacagatgacatcctctgcacttcccccgggcatctcgacaaaaaggaattgaaagccctaaatagtgaaattctctgtccaggtttagtaaataacccatccatgccaacacagactagttaccttatggtcaccactcctgcaacaacaacaaatacggctgatactattttacgatctcttacggacgctgtgccactgtctgttctaatattgggacttctgattatgttcatcactattgttttctgtgctgcagggatagtggttcttgttcttcaccgcaggagaagatacaaaaagaaacaagtagatgagcaaatgagagacaacagtcctgtgcatcttcagtacagcatgtatggccataaaaccactcatcacactactgaaagaccctctgcctcactctatgaacagcacatggtgagccccatggttcatgtctatagaagtccatcctttggtccaaagcatctggaagaggaagaagagaggaatgagaaagaaggaagtgatgcaaaacatctccaaagaagtcttttggaacaggaaaatcattcaccactcacagggtcaaatatgaaatacaaaaccacgaaccaatcaacagaatttttatccttccaagatgccagctcattgtacagaaacattttagaaaaagaaagggaacttcagcaactgggaatcacagaatacctaaggaaaaacattgctcagctccagcctgatatggaggcacattatcctggagcccacgaagagctgaagttaatggaaacattaatgtactcacgtccaaggaaggtattagtggaacagacaaaaaatgagtattttgaacttaaagctaatttacatgctgaacctgactatttagaagtcctggagcagcaaacatagatggagagtttgagggctttcgcagaaatgctgtgattctgttttaagtccataccttgtaaataagtgccttacgtgagtgtgtcatcaatcagaacctaagcacagcagtaaactatgggnnnnnnnnnnnnnnnnnnnnnnnnnnctcagggatcactgggagaagccatggcattatcttcaggcaatttagtctgtcccaaataaaataaatccttgcatgtaaatcattcaaggattatagtaatatttcatatactgaaaagtgtctcataggagtcctcttgcacatctaaaaggctgaacatttaagtatcccgaattttcttgaattgctttccctatagattaattacaattggatttcatcatttaaaa

SEQ ID NO: 189220 - DNA, 1568 bp, Homo Sapiens
  misc_feature (633)..(658): n is a, c, g, or t
  misc_feature (794)..(820): n is a, c, g, or t
  misc_feature (867)..(952): n is a, c, g, or t
  misc_feature (978)..(993): n is a, c, g, or t
  misc_feature (1193)..(1211): n is a, c, g, or t
gaatgagattaaaacaaaggtcatttaagagaatattttctcaggcccaggaaagacctgttatagcctaaattagtagtgatattaacagtaggggactagtcagcatggaaacacacacaaaaaacagagtcacgttgccaggggagatgatcaatctggggactagataattccagtcactttaaaataattttgttacaaagcaggggtggtttatcaacttcaccacggcctaaaagaaatatgctcatgcataaacctctgaacaggtgacttggtgtgcagagtgctttggctttgctgtttagagagaagaacactggaaaacaggtgggtgtaggtgttgtcaatgaaaagaaagattatcctttgtaaattaatgagatggtatcctgatttatgcatatgtcccttctgttctgagtctgtttattaggagtaagtttccctttctctgatcaactcaagattgactttataggtatgaaaaatccaaagcaaaaccctcagcaatcatgacctaccaataaatgaaatgacagtttaggaatccttctgatcccccaaaaccacaacagggcaaagttcattggtaaacagcaaaaaaaattacatgaacactataaacannnnnnnnnnnnnnnnnnnnnnnnnnaaaggaataatagtaacaaaaaaacaagagagctcataaaaagtattctgagtataaggaacataatcttaatattccatactactcatttttcaaagaatatatccaagactttgaaagtggaatcagaaatggnnnnnnnnnnnnnnnnnnnnnnnnnnnatagtgaagagaatccagaaataatttggtggcaggtttttattttnnnnnnnnnnnnnnnnnnnnnnnnnnnnnnnnnnnnnnnnnnnnnnnnnnnnnnnnnnnnnnnnnnnnnnnnnnnnnnnnnnnnnngggagacagaatgagactccacctcnnnnnnnnnnnnnnnngcagtggcagggggaacaatagacattggcacctaattgagagtacaggttgggagaagggtgagaattgaaagctacctatcaggtattttgctaattacctgggtgacaaaattatctgtgcacaaaacccccacaacataccatttacccatgtaacaaacctgcacatgtacttcttgaacctaaaagtcggaagnnnnnnnnnnnnnnnnnnntaataacagtatctccttcagtaataaaagcagtttcaactgaagtccaataataaatgagcaatcacttttcaaataagtgtgtactttttagctgttttgggaaactccccagtccaaaatgccagtggttaccactaattagtaattccatatcttttgcagaaggcattgttcagaagagacatttttcctcatgactccccttttaggatcagagaagcatcacacagaagctctccagcagtttttctttcttgtctcatgggctggaattgtgtcacatgcctatgtaaatcactggaaagtgaagagcgttattataaatggtttcaactaatgcctgattcacaccaa

SEQ ID NO: 189221 - DNA, 1197 bp, Homo Sapiens
  misc_feature (235)..(520): n is a, c, g, or t
  misc_feature (522)..(544): n is a, c, g, or t
ttggcctgattggggcctaagaagggcattcagacttgaattttaataggcagacagaaagtttgcctaatagttaatacgaaagagtgaaagaaacacaatattcagacaacccacattcttatcctggctctagcagtaaccacgtagccttggataagccattttccttcattaggtcctggtttaatttcctcatctttaaaatgagaaggttaaatttatcttagtactnnnnnnnnnnnnnnnnnnnnnnnnnnnnnnnnnnnnnnnnnnnnnnnnnnnnnnnnnnnnnnnnnnnnnnnnnnnnnnnnnnnnnnnnnnnnnnnnnnnnnnnnnnnnnnnnnnnnnnnnnnnnnnnnnnnnnnnnnnnnnnnnnnnnnnnnnnnnnnnnnnnnnnnnnnnnnnnnnnnnnnnnnnnnnnnnnnnnnnnnnnnnnnnnnnnnnnnnnnnnnnnnnnnnnnnnnnnnnnnnnnnnnnnnnnnnnnnnnnnnnnnnnnnnnnnnnnnnnnnnnnnnnnannnnnnnnnnnnnnnnnnnnnnntcttagttctaagatttcctttaattctatgattctctggatttaaatgcattattcatatttcttgaagcttagatacagtctaattcatagcaaccatatctgctttatcctaggtgagggtagcagtccacaatggaatagaagaaaatcccattataacaaatgacaaattatatatcatgaatccttctgtctgactaactcaataactttctataaaagccaatggaattcaaataggagctaggagacaacaagttatatatgacagtggaggttgtattccttttatattgctgagaaaactagttaaatgatcagattcttgctgttaagaaacaatttcgtttaatgggatctgtacaactgattttaaaaaaatgctacaaaaagccccaaagcatataatctctactccttacagtctctagaattaaatgtactcatttagacaacatattaaatgcatattttagccactttagagaaacctcataggcacagagtttccaagattaattttaagaatatcttcacgaacttgaccctcctactccacattgcaacatttccatcagacagcatttcaattccagtattatgtatattgcaaattaaacattttaaaatatttttttccaatttatttc

SEQ ID NO: 189222 - DNA, 1755 bp, Homo Sapiens
ttggggtgtttagagactgtaaatgcatattcacaaagttatctgatagggccttggaggagaaggtccagttttaaaaaatgacagtttgtgtttaataaatgaaggcatgagaggaagtaagtagcaagttgaaggacaggtagttgagatgaaacacttcaaaaccctggttatagatgtactgtttggatgtagcatagtcttgagtctagcgtccacaaagaattattcaaatgatatttagaagaattataactattacattgaatggagtcccttggatattttgatagtaaaattaatagccataaagtcctagacttcttatttgaagttaaaatttcttatttgaaaagttgaaatttatgagctttgaagattgctaaattaaataatttatagctccaaaaacaaaaatatacttgtatatgtcacagagaaaaaaaatgcaaaatttataatagagttacattaaccttgttgtttacctttcactgatttcttatatggtataaattaaagttcaggcatttatggggagaaaaggccctccccaccgacccgccacctgccacctctgacggagtgggagaagttagtctgtgctaagatagtactgagtccccagatgttgtatactgtaaattacagtataatgccaaatgcagcaaaatcttccagctgtacgttacaagtttggtcattttgaagcttgacattttagtttgccattatgttaaaaacatctaaataggtgttagtttctcaggagtagattgttagtgttgacttttcctgtaaagcagacatcgttcttggcctgccctgcattgtatactagatttcattgttgtctctcatgcttcttgagttgcttcatggtttatgctcgccatggaaagctatcagtaacagtttcatgcttataccaaagaattaaatctgatctttaatatctgatattttcctggtactcgtactgataagggattattggaagtcagtcacagaatttggaaataaattctagtctctccttagctatttgatgcttttcatataggccaagaactcattgcaaaacatttttgcaaggatgaatgcctgtatttggtctaggaacagtacattttagtctgatttagaattactggtagcttattttaaagcaaggaaaagcagctgagctcaagtttgctgtctttagaatggtttgtgaaaatatggtataaaggtgttttcattttcctgttcttacctattattgtatagagctattcatgccattttttgggaaaactttaaaaattgccccaaatactgacattgagtgcattaaataacaaattatctttgatacattaaacttttattcttcatgcatctgtaatttaattttaagtataatgttttgcctttggtacaactaaattaaaactcttggtggtcacatattgtatataaacaaaacaatatgctttgttgaaggaaaattttctttattggaatgtggttgtaatccttgttcagttcttaagtttcggttttttttaaaaacaggatgcaacttaaacttttctttgcatcaaggtatatgcaaaacattggtgccgtgcatcaccaaatgaaagtttgtatttaacgaggaggtgctttacactgtactttttggtgttttttggaaaagttacatttagatctattctgaagctgttcatttttaacaaataaaatgttacagggtttcacatg

SEQ ID NO: 189223 - DNA, 1330 bp, Homo Sapiens
  misc_feature (105)..(175): n is a, c, g, or t
  misc_feature (182)..(191): n is a, c, g, or t
aactagggattttgggtgataatgatgtgtcagtgcagcttcatggatcttaaatgaaccattcaggttggagatgttgatagtcagggaggctgtgcatgtgcnnnnnnnnnnnnnnnnnnnnnnnnnnnnnnnnnnnnnnnnnnnnnnnnnnnnnnnnnnnnnnnnnnnnnnngcctttnnnnnnnnnntacagtaaactcaaagaatttatacagttggtaagtccatgggttggtatctgagaggattatctctgaattctctgaaattgtgagaaacatggtgtgtatatggtatttttctgagcatggctgtagctttcatcagaatctcaaaggaagcccctgtcccaggctgtgggacctggggtgcaagtgcaagagcaacagccactcaccccaaaccccaaggttcctgcagacagcagagatggtgaagccctccaccccatcccccagccacgagtccagcagctcatcgggctccgatgaaggcaccgagtactacccccacctagtcttcttgcagaacaaagctcgccgagaggacttctgtcctcggaagctgcggcagatgcacctgatgattgaccagctcatggcccactcccacctgcgttacaagggaactctgtccatgttacaatgcaatgtcttcccggggcttccacctgacttcctggactctgaggtcaacttattcctggtacccttcatggacagtgaagcagagagtgaaaacccaccaagagcaggacctggttccagcccactcttctccctgctgcctgggtatcgtggccaccccagtttccagtccttggtgagcaagctccggagccaagtgatgtccatggcccggccacagctgtcacacacgatcctcaccgagaagaactggttccactacgctgcccggatctgggatggggtgagaaagtcctctgctctggcagagtacagccgcctgctggcctgaggccaaggagaggaatgtcatgcaggggacctcctgggtccgcagtgtactgcgagggagcacagatgtccatcccccgctggggtggagagcggcagcaggcctgatggatgagggatcgtggcttcccggcccagagacatgaggtgtccagggccaggccccccaccctcagttggggctgttccgggggtgactgtgagcgatcccactcccaacctgagatggggcagcccgtcctgtgtcctccacagggacaagcagtgggaggagtctgatggtcaccaaggaagcccgggctccatcttgacctcctttttcagggacaggagcaacagcccctcttccc

SEQ ID NO: 189224 - DNA, 582 bp, Homo Sapiens
cctataaaagccaactttgtacaaaaaagttggattcacactccttaagatttggtcagaatttttatttctgttcatgtcttctacttttctactcctgtatgaataaaatattgatttgattacagtggctttgactataatgtgggagccaatttttgcctcagtcttcatttttatatttaccttgttattctcaggcatttttttcttctatgtgagagttaaaatcattctgtaatttccccccaaaatcatattggtattctagttggcaatgtcttacatttatgttaagtttgagggaattggtagttcaagtataagttaattaaggccattttatttctaagtgaacagacttgaaactccagagctactgaagtaaaagttagaatcatttgcattttcattcagataggagataattttgtaaattttgatgctattattttaactctattagcttaagtaatgtcataatagaaaacacaagcatttgaccaaatgagatccattcagcgactaactggcaaggcactcaaaacatgtcattcattaaatgttgtttttatttacctc

SEQ ID NO: 189225 - DNA, 1362 bp, Homo Sapiens
tcacagcttgcaaacaccgtgggccagatttcttaaaacagttacatgacaaaaacaatgctattgacatccaataatgctaaagcctgggtaccacccaggctccactgactgtggtttccaaacatctctccactgactgtgggttttcaaccacaaggaaaggaaaatggaatattctttggctcttccagcctagacacaactcctgacctaagacattgagtggagagtcctaaccctttggaagttgaactttctgctttcttcctgtgactttggaactgagtttgcaacagaggacctgccatcatgctgcccatggattttgtgttaacgctgggagaattctgtcctcctcttgctgacaagctcttctggccacctgaatatcttgagatactgcacgtggtgacagccccgccccccaaaaatattagaaaccagatctgagaaaaagcatataaaagtcacatcagtgttgtgtgacacaaacatcggaagagtacattgcctagttttcttgcacacacaatttctggacataacagcatatttgctagaaagcacaaccctggccgttgcacaacttcactaaatgctgttctcactccacatcccctacgagtgacaatggtagccacggtgaaggagatggccccatccctcccacccgaggtacagacactgctgcctgaatcctaacggtgggcatcctggttttttgtagaatccagatgaaaggcgggcaggacaccagctgggggccatctggaacataagaatggccagtgtgttaaggcctaaatcctggagttgaggcaaagatgcacttgccctggtccaagacccactctggggcagaatgggaagggcctgctgaatcactgcaggccctcccgccttgatggttctctgctgctgggattctagaggtacacaggaagacagctctccaatggcttcagggttttgggtataaaatgaggattcaatgaggactccccagtcgcccccataccacgactgcttagctctgcaatgttccttcttttatctgttggataaagaggtttctctcatcttctggagtcctcccattctgagcccggacaatacacgtgggccgatgaaggttgagcatgtatatcaaatgctgcttctcgttcttgagctcctcaatctgagccttcagttcagcattcacactttccagcttctccgactctttctgcaggcactccgtcttctccttcttcttgtttcggcactttgcagctgcaatcttatttctttctcgtcgcctctttttcctttcatcttcttcaggggctacctgtaaaatccaaaagaaacacccaa

SEQ ID NO: 189226 - DNA, 1058 bp, Homo Sapiens
ttggaacaagacaggcaaaccactgccctttgggactctgggagtacacaagaaagcagccttccaggatgctaatgtctgcctgtttgtttttgattgtatctactttaatgatgtcagcttgatggtcggacctctgtgtgagcggcggaagtttcttcatgacaacatggttgaaattccaaaccggatcatgttctcagaaatgaagcgagtcacaaaagctttggacttggctgacatgataacccgggtgatccaggagggattggaggggctggtgctgaaggatgtgaagggtacatatgagcctgggaagcggcactggctgaaagtgaagaaagactatttgaacgagggggccatggccgacacagctgacctggtggtccttggagccttctatgggcaagggagcaaaggcggcatgatgtcaatcttcctcatgggctgctacgaccctggcagccagaagtggtgcacagtcaccaagtgtgcaggaggccatgatgatgccacgcttgcccgcctgcagaatgaactagacatggtgaagatcagcaaggaccccagcaaaatacccagctggttgaaggtcaacaagatctactatcctgacttcatcgtcccagacccaaagaaagctgccgtgtgggagatcacaggggctgaattctccaaatcggaggctcatacagctgacgggatctccatccgattccctcgctgcacccgaatccgagatgataaggactggaaatctgccactaaccttccccaactcaaggaactgtaccagttgtccaaggagaagcagacttcactgtagtggctggagatgaggggagctccactacagggggtagcagtgaagagaataagggtctctcagggtctgctgtgtctcgcaaggctctcagcaagctctcagctagtactcaagaaagcagaagggaagctgagtaactccaacagcaaagatggcaacatgcagactgcaaagcctttccgctatgaaggtgggggagaagctggccacaaagtcttctccagtgaaa

SEQ ID NO: 189227 - DNA, 925 bp, Homo Sapiens
  misc_feature (276)..(284): n is a, c, g, or t
  misc_feature (386)..(395): n is a, c, g, or t
  misc_feature (406)..(424): n is a, c, g, or t
  misc_feature (619)..(636): n is a, c, g, or t
ttgtacaaaaaagttggctagcattttctctcaaacagagagaggaacttattccgcacgggcctactgtaggaccattgtctcgtgtaattaggaattttccatttgaaggatcgctaaattgtcacagtagtaggaagtatagggaaacctctcagctgtggcactgttgtagctttggagtgcagagtgtaactctgggacaatcagatttcacatattctgtcatcttggcataagccattaaaagcttggagattactgtatttggcattnnnnnnnnntgtcacttaggtcagcactcccagatgtagcacagaaaaaccctttgacacaaaccatgtgttctgatttttggttcagaaaatattgaaactgtgagttgnnnnnnnnnnaacaactgggnnnnnnnnnnnnnnnnnnnctatagttagaaaaatggaagttccataggttctatttcttactctatgtatggctttgttttcagtctatttctaggagctttctctgaatcgctaattgtcctttcagttgaaatctaatttatacaatcattctatacttaaaggttaaatacatcttaattaattttttcttaaagtcaatgtaagtcacnnnnnnnnnnnnnnnnnnaatctacgccatatgcctcatgaaaccagctgttctagaatcagtcctgagaatatggcttaattccatggaaacataactcctatcttgggacctgacataatatctatctatcctggggaactggtaatatgagacttataagttacagcagaaatgctacatgttgacaaaagccttaatcgttccactgggagaactaattgataattgtgttaagattgaagattaaccctgtgttaatctcacttgagtctatcctgacagtagttcagattctggaaaatga

SEQ ID NO: 189228 - DNA, 1638 bp, Homo Sapiens
ttggctttccttcctttcccttttccttccttccctattcatcaaatagttattgagcatgtgctatgtaccacacacagtgctcataccatgctgaccaagacagacggggtttctgctgccagagagcttgcagtccagtggggaacagtgtaatgagaactgtgacaaggaagtacaagaacatatgccaatcaagtcaacaagtctgcctgagaaagacagggtcaatctgagacctgagggatgagtcagagtaagctaaataaagagaggcaaagagtcataaaggtgaataaagcatcgtggtgcaaggcttggatgtaagataaagtgtatcaaggaatttcaagtaatttcagtatggcaggggcaatgagagaaaaagagcagatgaggctggcatgttagcaggggccaaatcacagaaggccttgtaggccatacaacaaagatagccactgaaggcttctaaggaagaaagtgatatggttagatttgctttttaaagaccattccagctgcggtataaggggtttggaggtagtaagactagaggcaagaagaacagttaggaggctgttgcaatacttttattccatgtttccctatcccaacagatacttggactaactcgtgcattccagaaattatcaccaccaaagatcccatattcaacactcaaactgcaacacaaacaacagaatttattgtcagtgacagtacctactcggtggcatccccttactctacaatacctgcccctactactactcctcctgctccagcttccacttctattccacggagaaaaaaattgatttgtgtcacagaagtttttatggaaactagcaccatgtctacagaaactgaaccatttgttgaaaataaagcagcattcaagaatgaagctgctgggtttggaggtgtccccacggctctgctagtgcttgctctcctcttctttggtgctgcagctggtcttggattttgctatgtcaaaaggtatgtgaaggccttcccttttacaaacaagaatcagcagaaggaaatgatcgaaaccaaagtagtaaaggaggagaaggccaatgatagcaaccctaatgaggaatcaaagaaaactgataaaaacccagaagagtccaagagtccaagcaaaactaccgtgcgatgcctggaagctgaagtttagatgagacagaaatgaggagacacacctgaggctggtttctttcatgctccttaccctgccccagctggggaaatcaaaagggccaaagaaccaaagaagaaagtccacccttggttcctaactggaatcagctcaggactgccattggactatggagtgcaccaaagagaatgcccttctccttattgtaaccctgtctggatcctatcctcctacctccaaagcttcccacggcctttctagcctggctatgtcctaataatatcccactgggagaaaggagttttgcaaagtgcaaggacctaaaacatctcatcagtatccagtggtaaaaaggcctcctggctgtctgacgctaggtgggttgaaagccacgagtcactgagaccaagctttctctactgattccgcagctcagactctttcttcagctctgaaagagaaac

SEQ ID NO: 189229 - DNA, 2070 bp, Homo Sapiens
  misc_feature (646)..(669): n is a, c, g, or t
ttggctgaattgcaagatgtgcagaggatcatggtggccaatattgaagaagtgttacaacgaggagaagcactctcagcattggattcaaaggctaacaatttgtccagtctgtccaagaaataccgccaggatgcgaagtacttgaacatgcgttccacttatgccaaacttgcagcagtagctgtatttttcatcatgttaatagtgtatgtccgattctggtggctgtgaaataatgaatacagtcactggtaagggagaacctagaacccagtaggtgtatattttcaggaaactgagctcacagagatgtgtattagaatccaagtggaacttctgcctctaaagaccttgcaagaaaagagatgccctgaaaatgaaaggttgcacctcatttaatgaagcttaaccctatgtagaaagtctctttcgggggcagaggctttctctgggtgccaagccatatatattagggaatagtagattgttaatttcgttttttccctcccagtgcattttaaaaacagcactggctggggcattctcattctctgatggagccatcaatgagatttaacttagtcaacctgtgctagcaacattctgaaattccttcaaagaaggcagtcctttgggaaggtgnnnnnnnnnnnnnnnnnnnnnnnngactctaatcaacattccttttgttggtgacatttgtgattttcagtaatctgagtttttgatggcccttttaaacaagactccagtatgtgaaggttaattgctgtgctccacagatcttgtctattggcccctgtagaaagttaacctttgttgttttccttttataatttgcttattgcacaattgctttagggtaagtgaattatattaagatgccttgaaattatagcactccttgattaagaagctaaaatgtttctctcatttactccttaaacaaaagacttaaattagtttgggtcattattacttttattttgcagcatttggtttgttattagcgtaagagcaagtataggatatggagaggcccctggcttcatgagaacaaaggcaggcccaggttataattacagctttctcctgccccttctttactttctctaccacagttttctccactgtttgttttcctcttgccacaatttgctaacatttaaaaaattttcctgcacccagtagtttcatatcctgtagacatcctcttaggacattctcaaatttcaaaataaaaaatattcatctatgtagttaattaaagttaaagtttttgcagatcaactactcaaactactaaatacatttacctgagaaaaagtctctgagagcacttcattcctgttttagttcgtgtaaattctctgagaatgttctggagatagataactcatttacagtggtttctattaactaattaaagtacccatgattttttccttttctgctcagggatgatggagatttccttttaccttctgaggtagaattttttaatggggaaaataggccttttaaatattattgccagggtctgcaatataacttaaaattcctgtacatactgcaaatatttctttaaattgcacaggaaaatgagcgaactttttatttcttaatatctttggcaaaaaactttaaccagtaagcaattttataaccctgagggatcatcaaagatactatcctgattcctggtaaggaaaaatatattatttccttataacaaggcaaggagaaatgctattttattcctgataatttatataactagaataatttttttcctttcttttatggacctaaatctgccaattgggaattttgtgcatgaaatatgaagttactttttatagataatcagtgcttttaagtccctaaaaggctcctgctgaagtaatgatgatgttaataataaaagcctttgaaaggctgaaaacctacatagtggtaccatagtatttggagcttctataggagtggagaggggcagctcattgttgagagttgcatgctgcaacctaatggtcagcaatgaaataaatacttgtagaatgttca

SEQ ID NO: 189230 - DNA, 1633 bp, Homo Sapiens
  misc_feature (709)..(745): n is a, c, g, or t
ttggctaggctctgagacacactctctggtgtctgagacagaaccaaagcaataacgttgtgatgcccacaggcctggagccagctagcgaccttgtgccgcccagctgtccatggcccgtgcagagcagaggacagtgagtgtctgcactgagaaccttaaaccacagttgaacatacccacacctgtttgtcttaagctatagtgtaaaaacaaagtttgggctctgaaaatttaactgaaaaagatttccttgtttttgtaataggtgagataaagtacttagatttataaggcagcttcccctgtagtgataaattacaagcagacaatcttattttgtaatgtgatgaagtgatgatgtcttaactctacttagagagtgtatgtctgtctaacagaacaaaaagatgctctgtgtaaattccttcctgtagggcacactgcaggatttccatgtagatagaagaactatagggcctagtacagaaggtgcacacaaatgttggcaaagtcaaaaccccatgaattaaaacctactggaatttggtttttaggagtttggtaattagattatctcttttgttattttcattcagttatatcctttggctcagctagctttgaaattggctgatgaaaaaatatacataaaagggtaaaattcacacatacagcaaacaaaaatgcacaaagcctgcttcgtaannnnnnnnnnnnnnnnnnnnnnnnnnnnnnnnnnnnnctgccaaaacaataatcaaagaactcttgctttaacctattcctgtacaaagactgtttttgaccagataatcatctgttgtggcattctatcttgtaggacactgtatattgcaaattgctgattatggaaggggccagttgctgttttttcatgcagtgccctgggagtcttaaaagcagtgcttagcaacattggtgatagcatgtggctgggacccagggcccttccccactcttcagccccgagtcatgtgtctgaggtgacggactgagacgcatctggtcctgtaattcagagagtgggcacatcaccaaagaactgcattgctgtggtcactgtttcttcaagtacacactgactctgctactttaggataaatatattttactcagaactctgaatttcacagtatacttactaaactaagtaaaaatgatacttaaaatacttattttactttctagacctaggctagatgttttaagctacagctctagttcattgtgatatttataatttgaaagctatgagaatagatgtgtgggtgaagccatagaacatatttgcttgaaattcttgagcagggatcttataaagggccagaaataagatgtgtggttcacatagatagtgagcgtaacatctgtattaaacataggagagaagtttataaagggcattggcaataaactctttgttgcagctgttttccaagcagtgtaaatactttttcctgtgattatgtatagccttggaatgcaccttttaactaacccatatgtgtttggtttcaatggttttttatattcagatgtatatatggtgctcactttaggatcagcagtgttgaccatttatgctgcatagctgtatatagccttatta

SEQ ID NO: 189231 - DNA, 1597 bp, Homo Sapiens
ttggggggaccagaggtaacacggcagcacagctgtccaagactttccatttcaacacggttgaagaggttcattcaagattccagagtctgaatgctgatatcaacaaacgtggagcgtcttatattctgaaacttgctaatagattatatggagagaaaacttacaatttccttcctgagttcttggtttcgactcagaaaacatatggtgctgacctggccagtgtggattttcagcatgcctctgaagatgcaaggaagaccataaaccagtgggtcaaaggacagacagaaggaaaaattccggaactgttggcttcgggcatggttgataacatgaccaaacttgtgctagtaaatgccatctatttcaagggaaactggaaggataaattcatgaaagaagccacgacgaatgcaccattcagattgaataagaaagacagaaaaactgtgaaaatgatgtatcagaagaaaaaatttgcatatggctacatcgaggaccttaagtgccgtgtgctggaactgccttaccaaggcgaggagctcagcatggtcatcctgctgccggatgacattgaggacgagtccacgggcctgaagaagattgaggaacagttgactttggaaaagttgcatgagtggactaaacctgagaatctcgatttcattgaagttaatgtcagcttgcccaggttcaaactggaagagagttacactctcaactccgacctcgcccgcctaggtgtgcaggatctctttaacagtagcaaggctgatctgtctggcatgtcaagagccagagatatttttatatcaaaaattgtccacaagtcatttgtggaagtgaatgaagagggaacagaggcggcagctgccacagcaggcatcgcaactttctgcatgttgatgcccgaagaaaatttcactgccgaccatccattccttttctttattcggcataattcctcaggtagcatcctattcttggggagattttcttccccttagaagaaagagactgtagcaatacaaaaatcaagcttagtgctttattacctgagtttttaatagagccaatatgtcttatatctttaccaataaaaccactgtccagaaacaagtctttcattttctttgtaagtttggctctgttggctgtttacacccatgaattttggcatgggtatctatttttcttttttacattgaaaaaaatccagtggttgcttttgaatgcatcaagtaaagaagaagaaaagaatacatccgatgcgtagattcttgaccatgtagtaatctataaaattgctatatcctcctgatagccatgggaaaacatgataagatggtcatttattttgcagttagaattttggaagccacaaaatagacagacaccctgactgttgaagggaggtttaaaaacagatattcaattgaaatgtaagagagcaccccaattgagagcccaggttacgaagacaagcttgcctcgcctgacttttctgtcccttgttctgcaggattagtattctgttacagacctctagtttttagactcttcaattaaagggccaatggttataacctgc

SEQ ID NO: 189232 - DNA, 1271 bp, Homo Sapiens
ttgggcaaataatacggcactccgaacagacactaaaaacagctctcatctcaaagaacccagtgcttgtatcacagtatgagaaattaaatgctggggaacaacgtttaatgaatgaagccttccagccagccagtgatctctttggacccattaccttgcattctccatcagattggatcacctcccaccctgaggctccccaagactttgaacagttcttcagtgatccttacagaaagacaccctctccaaacaaacgcagcatttatatacagtccattggctctctaggaaacaccagaattatcagtgaagaatatattaaatggctcacgggctactgtaaagcatatttctatggcttgagagtaaaactcctagaaccagttcctgtttctgtaacaagatgttcctttagagtcaatgagaacacacacaacctacaaattcatgcaggggacatcctgaagttcttgaaaaagaagaaacctgaagatgccttctgtgttgtgggaataacaatgattgatctttacccaagagactcgtggaattttgtctttggacaggcctctttgacagatggtgtggggatattcagctttgccaggtatggcagtgatttttatagcatgcactataaaggcaaagtgaagaagctcaagaaaacatcttcaagtgactattcaattttcgacaactattatattccagaaataactagtgttttactacttcgatcctgtaagactttaacccatgagatcggacacatatttggactgcgacactgccagtggcttgcatgcctcatgcaaggctccaaccacttggaagaagctgaccggcgccctctaaacctttgccctatctgtttgcacaagttgcagtgtgctgttggcttcagcattgtagaaagatacaaagcactggtgaggtggattgatgatgaatcttctgacacacctggagcaactccagaacacagtcacgaggataatgggaatttaccgaaacccgtggaagcctttaaggaatggaaagagtggataataaaatgcctggctgttctccaaaaatgaggaccttcaaataggagtgattgaaataaataactacttgcatgttatgctttcatttgggtggaatacttcattggaataaactactgatcttgtgctgtgtcaaagtaacagactagaaccttctttcaagtacctgaattgaaatgaaactcattttgaataataaaaactctagaaactctt

SEQ ID NO: 189233 - DNA, 1149 bp, Homo Sapiens
ttgggtcttttgtccttcattctgtatggcagtctccctttgttataaaagctttctaaagcatactaaagaagccttcccagagccccgtcttgcttctcttccaggtgctctatcccctcgagaccctctggtgccaggcttgcttcacggccatcttgtgttgtcactgcagagtttggaggccagttttccacagcctaaacagggaggagctgcagaatggggctctggtctctgggcattcatttccctcatagaggctgagaataaaacaaggacttattcacacatgttctagaaccccagaatggcccaagttacctgagaccagggtttctcaaccttgacaccattgacattttggactgggtaattctttgttctgcagagctgtcctttgcactgtaggagatttactaatatccctggcctctacccagtagtaccactagcacctattccccacccagcgtgtctccagatattgtcaaatatcccatcgggtgcaaaatgatccctggtcaagatctgttgcccaagatgttacaggtcacaatgaccacatttgaaattgttttccctttcattttaccctgtgaaagcatctctcctagagccttgcaagaggcaggtgacattgtgtccatatttcttcctgtttcagaacttctgtttcacaacaatttctctctcgctacaagtattctttcactcagcactggggaagttgggaacagctggtcaccatcatccctttaatcaactcacacctgtttaaagagtgtttctgatttgaccttcatcccttagtttactggcgttaaaaaaagtctcagcaattttcattatttctcgtgggtctcattatcaaacctttacttatttcggcatatttcctctgggcttcttctagtttctgccttacaagcaatgctgttctgtaaatttattgaaacctctggaacatttcacctttagagatggaggatggaaggattggtaccagaagagggctaagatacgttttctgtcttgagctgaaagcacagtctactctccttcgttttgtcgatgagaaagttgaggccagaggggaggtgacatgtttagagtcaccagctggttagtgacagaaaaagcgtgaga

SEQ ID NO: 189234 - DNA, 819 bp, Homo Sapiens
  misc_feature (630)..(671): n is a, c, g, or t
ttgggtagatttgactcaagcacttctagaatcatgcactgaattcaaaagaaaaatcttgctgctttttgtccagggcttgttctattcaacttctaatttgaaagctgtacaaagtaatagaagttccatttaaatatgagttcaaaactgtatttactttttatgtggccctctctttaggggattctaattttacttagggtctctaagtgcagcataatgttcctgatgttaacagaagactgtatttttaaagttacaaatttgtatatggaattaagtaatggcgctatatacgctgttgtggggaggggggaagaaaaggaggaaccaattaaataggaccttttaaaaattgttaattttgtaaactttgcttctcttataagttattgtgattcattttagttactgtgttttattttgaaaatatttaaatattgcacttctataaatagtatgataaatgcacagacaattgcagtaaattcttttttaagctaggatatttgaaatgacaacctttggttaagtgtgtcaaggttgcaacagaattttcacaatttttttgttgtttgcaaattgttactaatattgaagaggtaagggaggcaatgcaaatgattnnnnnnnnnnnnnnnnnnnnnnnnnnnnnnnnnnnnnnnnnngtgactttatgcaaccatatttttactttgtcttgacaactgaaagatgtataaggttttttgccagaaatgtactgtatacatagttttaagtataacagattttactgatatgtaaaaattttgccattaaaataaatgatttctc

SEQ ID NO: 189235 - DNA, 919 bp, Homo Sapiens
ttggctcactggttgtctaacttggaatctactcattggctagaacatattaagcttattcttgcaggggctcttaggattgctgacaaggtagagtcagggaagacgtctgtggtagtgcattgcagtgatggttgggatcgcacagctcagctcacttcccttgccatgctcatgttggatggatactatcgaaccatccgaggatttgaagtccttgtggagaaagaatggctaagttttggacatcgatttcaactaagagttggccatggagataagaaccatgcagatgcagacagatcgcctgtttttcttcaatttattgactgtgtctggcagatgacaagacagtttcctaccgcatttgaattcaatgagtattttctcattaccattttggaccacctatacagctgcttattcggaacattcctctgtaatagtgaacaacagagaggaaaagagaatcttcctaaaaggactgtgtcactgtggtcttacataaacagccagctggaagacttcactaatcctctctatgggagctattccaatcatgtcctttatccagtagccagcatgcgccacctagagctctgggtgggatattacataaggtggaatccacggatgaaaccacaggaacctattcacaacagatacaaagaacttcttgctaaacgagcagagcttcagaaaaaaagtagaggaactacagagagagatttctaaccgatcaacctcatcctcagagagagccagctctcctgcacagtgtgtcactcctgtccaaactgttgtataaaggactgtaagatcaggggcatcattgctatacactcttgattacactggcagctctatgagtagaaagtcttcgggaatttagaacccatctatgagagaaagttcagtc

SEQ ID NO: 189236 - DNA, 1239 bp, Homo Sapiens
actttgtacaaaaaagttggcttaggattgctgacaaggtagagtcagggaagacgtctgtggtagtgcattgcagtgatggttgggatcgcacagctcagctcacttcccttgccatgctcatgttggatggatactatcgaaccatccgaggatttgaagtccttgtggagaaagaatggctaagttttggacatcgatttcaactaagagttggccatggagataagaaccatgcagatgcagacagatcgcctgtttttcttcaatttattgactgtgtctggcagatgacaagacagtttcctaccgcatttgaattcaatgagtattttctcattaccattttggaccacctatacagctgcttattcggaacattcctctgtaatagtgaacaacagagaggaaaagagaatcttcctaaaaggactgtgtcactgtggtcttacataaacagccagctggaagacttcactaatcctctctatgggagctattccaatcatgtcctttatccagtagccagcatgcgccacctagagctctgggtgggatattacataaggtggaatccacggatgaaaccacaggaacctattcacaacagatacaaagaacttcttgctaaacgagcagagcttcagaaaaaagtagaggaactacagagagagatttctaaccgatcaacctcatcctcagagagagccagctctcctgcacagtgtgtcactcctgtccaaactgttgtataaaggactgtaagatcaggggcatcattgctatacactcttgattacactggcagctctatgagtagaaagtcttcggaatttagaacccatctatgagagaaagttcagtcactttatttattttaaatctctctaggatgagtttagaactgtagcagtgcaggtggcttaagtgaagtaactccatatgtaattacatgattatgatactaatcttttaagtatccaaagaatattaaaatacttcaatcctggattcacagtgggaacaagtttctattaaaaggcaaatgctgttacaaatttttggcatctggtaatattaaaaccattttagaaatacactctgtgctcactgtgcagaggaacatcagttttcaaaccaacactgaaattctgtggcatcacatatattgggccttgatgtcatgacagatcaaaatcatttgatatccctttctccattctaggttttctttttttc

SEQ ID NO: 189237 - DNA, 1383 bp, Homo Sapiens
  misc_feature (940)..(954): n is a, c, g, or t
ggagcagcagcagcagagaacagcctgagtgtgttgcccttgagctcagcacagcactgttcttgatactcatactaaccctgactcattaagaaatggttaagtgtgtgtttaacatatttgctaagaaggggaaattgtgctgtctttatattttatttcaaaatgaaataagcagtgtttatccagaaatttcccttctatggaatatctcattgccaggttaggtgttactacatattgacttaggtctgtaatctgctgtaccctcaaaatgctctgtgtggcactaatggagacatgaatgtcctcctccaaaccccaggggttccctgagtaacccattctctcttcctttcagctctggtcccattttggcagaagaagctgtcctgaagcagaagtgtttactgaccactgagctctgagggcctgtagctggaatacgcatctctccagcattccgtcctgggatccgtttcagctagaatatgttggattcaggagcttgtccattatttgtaggtaaaaaaagctgcacgtagatttgacttcaactccgtaaaaaagacagctgtattttccgtccaactggaattgttgaatcacactgcatagctgcccaaaagagagtgtttggtcttgaactttctatacttttataaatgttacaaattcccgaaagaagggaatttctttttctggggtttccttcaaactcttggctccacctagcggttctatttgttcataacaacttcataacaagcctgcctctggtagtcaacagccttttgaaagctatttccatctagtatcagggtgagagcatccttgatctggctgcctgttagagaaattgcacttttcctgacttacctagaaatcaagaatttaggaaattaatgtggacactataaaggcagacttagggccaacnnnnnnnnnnnnnnnacaattattacaacactaaagagaagtttagaatatagagagtttttaaatgtctcccattcttttgatttcttactgtactggctatcttaatatttcaagtttacatcaagataaaccctgagaagaactacggagaaatcaaataaaatcctgtcatatttttttcaccctgcctttccacaggaagcactcacaggcaccacacacgtatcatgtaacttatcagtggggtgggttactgttgaagagaccctggggcatttacctcaggcatctgcactcctccgagcccggtggagaatgcaggctgctgtagtctcaggtaatgaaggcacagcacagcagtactccacattgtttcctatttggacatagacttcatttcctttcagtataagctgaataaatttagagctttcaaactgg

SEQ ID NO: 189238 - DNA, 801 bp, Homo Sapiens
  misc_feature (128)..(161): n is a, c, g, or t
ttggcttgattttctactggggcccttcaaacttggttggaagaaattcaaccagaatatctacattagagtataatcatgtgtggtaggaagatggactagttaatcaagatttgttgtcacttaannnnnnnnnnnnnnnnnnnnnnnnnnnnnnnnnnaaattctaaatgtgttttgaggtatgggtacattaattgtaatgtaaactattatacaactgtttttgcgactttataggcaggtaaattttgctattactattgaatacaaatgacaattcatttatgaccactcaaacagcgttagtaaccatttagtgacaaaggattaaaacatccatctggatgttaattttgaagatgtaaattatatgttgtttaaatttttccaggcatctgaaaaccttatctgctagacaatgtaagattcacacagagttatctgggattctgattttttaaatagtacatatcattaaaccattttctctaaatgtaagaagagcagaaaaaatctcttaagattatcagatttttctaatgacacagaaatgtaagaaaaaaatccctttatattgaaaaaagatgcagtcaaagtcttttcagacatgcccaaactttgagaatttcttcaaccatctaatgctataaagatttttgttcttcctgttcacaaccagttgtataacagaaatactagctactgttttccttcctgtgtgtgaagtaatgaatcattgattatgtgacttgttatgtattcaattaaacactaaagaataaaaacattcactccttt

SEQ ID NO: 189239 - DNA, 773 bp, Homo Sapiens
  misc_feature (235)..(293): n is a, c, g, or t
cccccctccccacccatccccagagcttgggttgacgtcagagagccaacagtcagctgggggtgtccatccccttcccaccccctgtccccaaagtcaccagctctccggcctcgccggggcacagaaacaagaggcaggacaaaacacaaggaatcctcctgtccgatggcagtggcgcagtggccgcagagggtcagacggaggagccagggaggccacacacccactttgnnnnnnnnnnnnnnnnnnnnnnnnnnnnnnnnnnnnnnnnnnnnnnnnnnnnnnnnnnnccatgtgtttgtttgttttgtgtgtctaaagagttcacagagcgaggagggagggcgagttcaggggatcggaaggctggtcactgccgctggtgcgttgggcgccggcgaacgcggagacctccgggcaggtgaggacaaacgaagaagtgtacgaagggttaacaacggggaaggggtcgccgaggacttgaacttcactgtgtgtaaagagagaagccgtcaggttggggggtgcgtcttggctggtctggaagggcaggggcggtggtggcgggggcggcagcagccagctgaagccatcttccttagccggtgctgagcccggcaaatctctcacctccgccagcgggcccggcccgggcccctcttcgtaggggatcttgcagcccggtttgtgggccaccagcacaaactccagacgttccttctccttttggagctcggcgatctccgactccagctctgctttttctccaa

SEQ ID NO: 189240 - DNA, 1581 bp, Homo Sapiens
actttgtacaaattacacccccagtgtggcatatccttggtccccagaggcacaccccttgatctgtggacctccaggcctggacaagaggctgctaccagaaaccccaggcccctgttactcaaattcacagccagtgtggttgtgcctgactcctcgccagcccctggtggcacatccacctggggaggggccttctgaatggagttctgacaccgcagagggcaggccatgcccttatccgcactgccaggtgctgtcggcccagcctggctcagaggaggaactcgaggagctgtgtgaacaggctgtgtgagatgttcaggcctagctccaaccaagagtgtgctccagatgtgtttgggccctacctggcacagagtcctgctcctgggaaaggaaaggaccacagcaaacaccattctttttgccgtacttcctagaagcactggaagaggactggtgatggtggagggtgagagggtgccgtttcctgctccagctccagaccttgtctgcagaaaacatctgcagtgcagcaaatccatgtccagccaggcaaccagctgctgcctgtggcgtgtgtgggctggatcccttgaaggctgagtttttgagggcagaaagctagctatgggtagccaggtgttacaaaggtgctgctccttctccaacccctacttggtttccctcaccccaagcctcatgttcataccagccagtgggttcagcagaacgcatgacaccttatcacctccctccttgggtgagctctgaacaccagctttggcccctccacagtaaggctgctacatcagggcaaccctggctctatcattttccttttttgccaaaaggaccagtagcataggtgagccctgagcactaaaaggaggggtccctgaagctttcccactatagtgtggagttctgtccctgaggtgggtacagcagccttggttcctctgggggttgagaataagaatagtggggagggaaaaactcctccttgaagatttcctgtctcagagtcccagagaggtagaaaggaggaatttctgctggacttcatctgggcagaggaaggatggaatgaaggtagaaaaggcagaattacagctgagcggggacaacaaagagttcttctctgggaaaagttttgtcttagagcaaggatggaaaatggggacaacaaaggaaaagcaaagtgtgacccttgggtttggacagcccagaggcccagctccccagtataagccatacaggccagggacccacaggagagtggattagagcacaagtctggcctcactgagtggacaagagctgatgggcctcatcagggtgacattcaccccagggcagcctgaccactcttggcccctcaggcattatcccatttggaatgtgaatgtggtggcaaagtgggcagaggaccccacctgggaacctttttccctcagttagtggggagactagcacctaggtacccacatgggtatttatatctgaaccagacagacgcttgaatcaggcactatgttaagaaatatatttatttgctaatatatttatccacaa

SEQ ID NO: 189241 - DNA, 457 bp, Homo Sapiens
ttgtacaaaaaagttggcacatcaccttcactttgggatgtggaatttgctaagcagttagccacagtaaatgaacaaccccttcagaatggatttgaagagctgatccagtggacaaaagaggggaaactatgggagttcccaattaacaatgaagcaggttttgatgatgatggttcagaatttcatgaacatatatttctggagaaacacctggagagctttccaaaacaaggaccaattcgccacttcatggagctggtgacttgtggcctttccaaaaacccatatcttagtgttaaacagaaggttgaacacatagagtgttttataaattattttaatgaaaaaaaggatattctaaaagaacgcaacccacagttcaattaagaccatggaaatttttatttcaaacaattagagatggatattacagctaaataaaaaaattttacta

SEQ ID NO: 189242 - DNA, 2302 bp, Homo Sapiens
ttggcgcgcgtttgcgagcctcgggtggtcctcagggagggtctctcggccagaacacgtggatgcccacccaccactgagcctcatgggattcctggggtgctggtgtgtgtcctttcaggaggtggtaacatttggcgatgtggctgtgcacttctctcgggaggagtggcagtgtctggaccctggccagagggccctctacagggaagtgatgctggagaaccacagcagtgtggctggactagcaggattcctggttttcaagcctgagctgatctctcggctggagcagggagaagagccatgggtcctcgacctgcagggagcagaggggacagaggcaccaaggacctccaagacagattctacgattaggactgaaaatgagcaggcctgtgaggacatggacatcctaaaatcagaatcctatgggacagtggtcagaatctccccacaggactttcctcagaatcctggctttggagacgtttctgattctgaggtctggttagacagtcatctgggcagtcccgggctgaaagtgacaggctttaccttccaaaataactgtttgaatgaggagactgtggttcccaagaccttcaccaaggacgcaccccagggatgtaaggagctgggaagcagcggcctggattgtcagcctcttgaaagtcagagagagagtgcggaagggatgtcccagagatgcgaggagtgtggcaaaggcatcagagccacttcagatattgctctgcattgggaaattaatacacagaaaattagcagatgtcaagaatgccaaaaaaagttatctgactgcttgcaggggaaacatacaaataactgccatggagagaagccgtacgaatgtgcagagtgtgggaaagtcttcaggctctgctcgcagcttaatcagcatcagagaatccacacgggagaagaaaccctttaaatgcactgagtgtggaaaagccttccgcctgagctcaaaacttattcagcatcaaagaatccacactggggagaagccctacagatgtgaggaatgtggaaaagcttttggtcagagctcaagcctcatccaccatcagagaatccacacaggagagaggccctatggttgtcgtgagtgtgggaaagccttcagccagcagtcgcagctggttagacaccagagaactcacactggggagaggccctacccttgcaaggagtgtgggaaggccttcagccagagctccaccctagcccagcatcaaaggatgcatactggggagaaagctcaaattctaaaagcctcagacagtccaagccttgttgcacatcagagaattcacgctgtagagaaaccatttaagtgtgatgagtgtgggaaagcttttaggtggatctctcgcctgagtcagcatcagctgattcacactggagagaagccttataaatgcaacaagtgtacaaaagcctttggttgtagttcacggcttattcgccatcagagaactcacactggagaaaaaccatttaaatgtgatgagtgtggcaaaggctttgttcagggctcacaccttattcagcatcagcgaatccacactggagagaaaccctatgtgtgtaatgactgtggaaaagccttcagtcagagttccagccttatttaccatcagagaatccataaaggagagaagccctacgaatgcctccaatgcggaaaagccttcagtatgagcacacagcttacaatacatcaaagggttcacactggagagaggccctataaatgtaatgaatgtgggaaagccttcagtcaaaactcaacccttttccaacaccagataattcatgcaggggtgaagccctatgagtgcagtgagtgtggaaaagccttcagccggagctcatatcttattgaacaccagagaatacacactagggcccagtggttttacgaatatgggaatgccctggaagggtccacctttgtgagccgtaaaaaggttaatactataaagaaactgcatcagtgtgaagactgtgagaagatatttaggtggcgttcacacctaattatacaccagagaattcacaccggggagaagccttataaatgcaatgactgtggcaaagcttttaatcgtagctcaaggcttacccagcatcaaaaaattcacatgggatagaccacttacatataaatgtgtatatatgtgaataaacctacagccttaacttacttattttatatggaatcgtttatactgacaaacatgtagaatgttggtaaaggttcagaattgctctc

SEQ ID NO: 189243 - DNA, 738 bp, Homo Sapiens
ttggcacaacataatgctgtctgcccccacccacgcttgctgtgtcctgcaggagccaggcctgggggtggacttcattcgtcacaatgcacgagctgccaagagagccccccggaggcattcctgctcactgcaggtcctggcacaagtgctagagcagcagcggcaggcccaggagcactacaatgccacgcagaagggccatgtgccacattacttgttggagcgcagggacctgtggcggcgggaggccgaggcccgcaagcagagccagccggaccctgccatgcccccaggccacacgcgcatgcctgagaaccagcggctggaaacactgaccaagctgctccaggccccctgtaggccagagccagctgctgcgtgagctggtactgctgcctgctggggcagactcactgagagcccagagccaccgtgctgagctggaccggaagctggtgcaggtagaggaggccatcaagatcttttctcggcccaaagtcttcgtgaagatggacgactgagcccctttgggggacagtggcaaggagctccatgctgaggatcgccacatggctgcaaaggacagggttggacccaatcccagagcagaggtctgaagacaggagcaggggggtggccagtgtccctagagcactcttcccagtcaccagtggctgcagaagggccaccctagccttttaactgctttgtcaaaattaaacattttgtaccccg

SEQ ID NO: 189244 - DNA, 1975 bp, Homo Sapiens
tacaaaaaagttgggaagaaaaaggggttgctcgggagcagcccccggctacctcccctggaggcacagagggcgggggccttggcgaatggctttcttgctggccacttgcggaggtttggattcaggatttgttcctagtgtccaagattttgataagaaacttacagaagctgatgcttacctacaaatcttgattgaacaattaaagctttttgatgacaagcttcaaaactgcaaagaagatgaacagagaaagaaaattgaaactctcaaagagacaacaaatagcatggtagaatcaattaaacactgcattgtgttgctgcagattgccaaagaccagagtaatgcggagaagcacgcagatggaatgataagtactattaatcccgtagatgcaatatatcaacctagtcctttggaacctgtgatcagcacaatgccttcccagactgtgttacctccagaacctgttcagttgtgtaagtcagagcagcgtccatcttccctaccagttggacctgtgttggctaccttgggacatcatcagactcctacaccaaatagtacaggcagtggccattcaccaccgagtagcagtctcacttctccaagccacgtgaacttgtctccaaatacagtcccagagttctcttactccagcagtgaagatgaattttatgatgctgatgaattccatcaaagtggctcatccccaaagcgcttaatagattcttctggatctgcctcagtcctgacacacagcagctcgggaaatagtctaaaacgcccagataccacagaatcacttaattcttccttgtccaatggaacaagtgatgctgacctgtttgattcacatgatgacagagatgatgatgcggaggcagggtctgtggaggagcacaagagcgttatcatgcatctcttgtcgcaggttagacttggaatggatcttactaaggtagttcttccaacgtttattcttgaaagaagatctcttttagaaatgtatgcagacttttttgcacatccggacctgtttgtgagcattagtgaccagaaggatcccaaggatcgaatggttcaggttgtgaaatggtacctctcagcctttcatgcgggaaggaaaggatcagttgccaaaaagccatacaatcccattttgggcgagatttttcagtgtcattggacattaccaaatgatactgaagagaacacagaactagtttcagaaggaccagttccctgggtttccaaaaacagtgtaacatttgtggctgagcaggtttcccatcatccacccatttcagccttttatgctgagtgttttaacaagaagatacaattcaatgctcatatctggaccaaatcaaaattccttgggatgtcaattggggtgcacaacatagggcagggctgtgtctcatgtctagactatgatgaacattacattctcacattccccaatggctatggaaggtctatcctcacagtgccctgggtggaattaggaggagaatgcaatattaattgttccaaaacaggctatagtgcaaatatcatcttccacactaaacccttctatgggggcaagaagcacagaattactgccgagattttttctccaaatgacaagaagtctttttgctcaattgaaggggaatggaatggtgtgatgtatgcaaaatatgcaacaggggaaaatacagtctttgtagataccaagaagttgcctataatcaagaagaaagtgaggaagttggaagatcagaacgagtatgaatcccgcagcctttggaaggatgtcactttcaacttaaaaatcagagacattgatgcagcaactgaagcaaagcacaggcttgaagaaagacaaagagcagatgcccgagaaaggaatgagacgaaattcagtgggagacaagttatttcatgaagatggagatgctgggtttatgatgaaccatta

SEQ ID NO: 189245 - DNA, 1398 bp, Homo Sapiens
  misc_feature (979)..(1013): n is a, c, g, or t
  misc_feature (1061)..(1069): n is a, c, g, or t
ttggcactgcctggcctgcgacatgctaattcctgcacagccgcagctcctccagcggcacctgcactccgtggaccacaatcacaaccgcaggttggctgctgaacagttcaagaaaaccagtctccatgtggctaagagtgttttgaacaacagacatatagtgaagatgctggaaaaatacctcaagggtgaggaccctttcaccagtgaaactgttgatccagaaatggaaggagatgacaatttaggaggtgaggataagaaagagacacctgaggaggtggccgcggacgtcttagcagaggtgattacagcagcagtgagggccgtagatggggaaggagcgcccgctccagagagcagcggggagccggctgaggacgaaggccccacggacacagcggaggccggtagtgatcctcaagccgaacagctgctggaagagcaggtgccctgtggaacggcacatgagaagggcgtccccaaggccagaagtgaggctgcagaggctggaaatggcgccgagacaatggcagcagaggcagaaagtgcccaaaccagagttgctcctgccccagctgccgcggatgctgaagtggaacaaactgatgcagagtctaaagacgctgttcccacagaatgatgctcatttccctgttccagggaaggcgttgggatgatggatgcgttggtctttctcccttggtttgtaagcagtacaagggcgtgtgctcccagaatatgctgtaatctaattttggtgaagagacccagcgtttcctcctgagcagtgcctctcacggcttgtctcatgcagtcgtgtggcttcttgcccaggtttcaaagctgaagtacattgtccttagcggctgtaacatgtctcttgacagtagtgcacttggaataataaaggttgggtgattatatcttgatgatacattacttgttcaatacagccactgatggaatgcttccnnnnnnnnnnnnnnnnnnnnnnnnnnnnnnnnnnnggttgggaacagctgaatactaggaatatatcttgctctatagaggannnnnnnnngtatgtttcaagcttcagcctttaacctatacctttgtagtgcaccatatggtgtgtgactttcacaggacttcgcagcacctggttcacatgtggcactgaccgcgtcacatccacgcactcccaaaggccagaagtatctgaccgacctacgccactggaaacacacccaccgcaacctcaagaaccagactgtgcagagggcattgcgtcccaatctttagtccttgctgaatcagttctctaatattttacctcatttgtgttccacctctagattacttcaggtttttttcctttaaaattagttactaccactcaaatgtatt

SEQ ID NO: 189246 - DNA, 1009 bp, Homo Sapiens
catgcttctttaagtctggggcacggataaatgattttccacacactcacagctatagggcttatatcctgtgtggatttttaggtgttcttcaggtgggcctgtgtggtgaaaccttttgtgcacatttcacaaacaaatggcctgtccgccgtgtggagtttctcatgcttcctcaatctgccttcatcagaaaacgtcttcccacacgcctggcaggcaatctgctcccgatggtgaccataaagcaaatactcaaacttcatgtcactggcggctgttgtccagcctggtgtctgttcatctttcacttcactcatcccatcattaaatgttaaggcttgaggggtctgggaccccaagtcttttgattctggggtctccatggattctacttcctggccgtagcaattgaccttccgaacttcctcactccccagctctttcaggatcgcttcctgaaccctgagcgttgtggtgggcgacttgccgtcctcctgactcgggggtgtgccttctactgtgtcatcagaaggactgtcatcctgatccccgatttcctctacatcatcatcctgggtgtcagcagcatctccaatggggcgatttattttaaggcaatacttacttttggactgaccattgttttcatcgggactggacacatcacgcttctgagaacacagtttatccaaaaatcggataccaagaatctgacccgatgacatcattaagttaacatcttcttttttcacggaaatctttgctgtgtacatgtagttcaggacctcttcaaatatatcagaacgaagaaaatctatttctatgaccgaagaactatcaacctcaagcttcttgaaaagctttttaaagtaggtgctgcaggcagcaagaacacatctgtgtgctctgaatttcacatcctcaaccacaatagcaatatcacaaaattctccttccaggcgttgttcatttagtgttttcagaaacagagttttatgatcaccaa

SEQ ID NO: 189247 - DNA, 1180 bp, Homo Sapiens
ttggcttctgtgtacgacagtgagctgcccgtacggtgccggaacatcagcggcactctgtacaagaacaggctcggctcaggcggccggggacggtgcatcaagcagggggagaactggtacagtcccaccgagtttgaggccatggcaggaagagccagcagtaaggactggaaaagaagcattcgctacgcgggccgacccttgcagtgcctcatccaggatgggatcttaaaccctcacgctgcctcttgcacctgtgctgcctgctgcgacgacatgaccttaagtggcccagtcaggctttttgtgccttacaaaaggcgcaagaaggagaatgaactgcccacaactcccgtgaagaaggactcccccaagaacatcacattgcttccagccaccgcggctaccaccttcaccgtgaccccctcgggacagatcacgacctcgggggcactgacctttgaccgagcgtccacggtagaggccactgctgtcatatcagagagtccggcccagggcgacgtcttcgcaggggccacagtccaagaggccagcgtgcagcccccatgcagggccagccaccctgagcctcactaccccggctatcaggacagctgccagatcgcaccgtttccagaagctgcgttgccaacgtcacatcccaaaatagtgttgacatccctgcctgcgctggcggtcccacccccgactcccaccaaagcggcacctcccgcgttggtcaatgggctggagctgtcagagccgcggagctggctgtacctagaagagatggtcaactccttgctcaacacagcgcagcagctgaagacgctgtttgagcaagccaagcatgccagcacctaccgagaagctgccacaaaccaggccaagatccacgctgacgcagagcggaaggagcagtcctgcgttaactgcggccgggaggctatgagcgagtgcaccggctgccacaaggtcaactactgctccaccttctgccaacgcaaggactggaaggatcaccagcacatatgcggccagtcagcagctgtcaccgtccaggcagacgaaatccacgtggctgaaagcgtgatggagaaaggaccgtgtgaggctccatcggccgccctgggaactggggcccctcgcactcctgtgaggcttttgcagtcaaagg

SEQ ID NO: 189248 - DNA, 2174 bp, Homo Sapiens
  misc_feature (181)..(227): n is a, c, g, or t
ttggcgtttctcctgaggtgagtgacacagcgtgggcatcagcaatagcagaaccatcttctttaacatcaaggcctgtggaaaccactttggaaaataatgaaggtggacaagagcaaggaccaagtgtggaaggtcttaatgtaccaacaaaggctactttagaggtatcctctatcannnnnnnnnnnnnnnnnnnnnnnnnnnnnnnnnnnnnnnnnnnnnnnggaagtttgggagctcagaaactggcaaacacatgctttaatgaaattgaaaaacaagctcaagctgcggataaaatgaaggagcaggaagacctggccaaggtggtatctaaagaagaatcaattgtttcatcattacgattagcctataaggatcttgaaattcaaatgaagaaagacgaaaagatgaacattagtggcaaaaaaaatgttgactcagacagactcggcatgggatttggaaattgcagaagtgttatttcacattcagtgacttcagatatgcagaccatagagcaggaatcacccattatggcaaaaccaagaaaaaagtataatgatgacagtgacgattcatattttacttccagctcaaggtactttgacgagccagtggagttaaggagcagttctttctctagctgggatgacagttcagattcctattggaaaaaagagaccagcaaagatactgaaacagttctgaaaaccacaggctattcagacagacctactgctcgccgcaagccagattatgagccagttgaaaatacagatgaggcccagaagaagtttggcaatgtcaaggccatttcatcagatatgtattttggaagacaatcccaggctgattatgagaccagggcccgcctagagaggctgtcggcaagttcctccataagctcggctgatctgttcgaggagccgaggaagcagccagcagggaactacagcctgtccagtgtgctgcccaacgcccccgacatggcgcagttcaagcagggagtgagatcggttgctggaaaactctccgtctttgctaatggagtcgtgacttcaattcaggatcgctacggttcttaatactgaagtcatgatgtgtatttcctggagaaattcctctttaaatgaacaagtaaccacatctcaggcggcagtgaagtccagatagttttgcagattgttttgctactttttcatatggtatatgtttctgatttttaatatttcttttgagaaattctgagttctgatgtaggagctttcctgtgatttctgtttcacgttccttcctgtcacaccctcctttggcgtctctgtgtatatccttgctttattttcttggaacctttgatttcaacactgagggcctggagacctcggctcctcctgctcctgaaccaggaggcttcatgtgggggaggaggagaggtctccatgtgacacatgggctcagggctgccagaatcagcggatgctggatgggcctgcagaaacaacactcaccacacacacttccttcaaaagaccaaaagtgactggtgtctcgtgtgacagattgcttcatttatgtttctacatagtaaggtgactgccaaataatatttgaagtcatctgtctctttgtaaattattttatatgacctataaatttaaaaatgtttttcagtgagtgcttttaacaaacttaagcttctgccctgccaagggaattaatgttatcttgtgaaaggtgttgctgtttgaattgatgagaaatggaagatgagaactccctaagagttctcataataaatcatctcatcacaaatcaatacggtatacagagttaaagtggaatgaggtaagaagatacagctacagaaaatagttgcgtgtatgggagaacagtcattgtaattgggtagttttgttaataaatatttttaaatcttgcttttcagaaattaccgaatgtgtataaacaaataaagaaaaataatttagctgtgttttagacagcattagaatatattgttcagcacagtaaaatatatttgaaatttgataagccaaaaatgtggttttgaatgaatattttgtgaatctttcttaaaagctcaaatttgtagacttctaaatagaataaacacttgcagcagatggcattgcctacatttttccctg

SEQ ID NO: 189249 - DNA, 1817 bp, Homo Sapiens
ttggctagacagataaaaaattccctgggtggactctaagaacctacatttgcaaaacaacatttattcttttaaaaaatctatatacattgccatacaaagataccacattgaagcagttctcaggaaccttccagtgagccttctcttataattgcccgagcaagatttcgtgccagagaaagtctcagcatttccaccttggtggtctctatgtcatcatcctgcaaagcagagagcgccagcatgagctaagagcaggaaggagccctttcacactcccgaagggtctagctaatccaaaggtagagggcacttaacattcatagtagcttccagcaaattatcgatgtaaaagaaagcaataccaaagggccatactggaaatgatgaacagcaaagaacaaaatgtagagatgagaacactagaatccctgattttctcctaaaagaaggtggtgtgtgaattacacaggttaaggggaacagaggcacatgtgtccataggagccagtgtttctggagggaaggggaagcctgagatagagggagccttttcccacctccatgtggaaccatcaacccaaaagtgaaaatgacctggagctgctcggtatcagattctccatgcacaggtcttcttgacgtcaagtcctccagacaccgcatcaactcataagtctgttctgctgagaaaatcacctagggaagagagcctgccttgcttggctgcccccagccctggcctgcattggttggggcaggggcccatgttcggacgttcttcctttcatacccttcgcaatagtgtgctttgtatacgaatacctcatttcaaatcaagcagtgtttgtttcctgtgtgagtctggaatcccagagagggcgctaaggggaatacacgcgcacaggcagaacgacaaaggaggaaacacgcacatcggcaacagctatacaactaagctctagcagggactgacaagcaaagaaaaccactgctgctgcaaccttcacctgtttctgttccaaaaggggcaaggcatctgtcagcagagtcatccagaaagaccgaggggcaatccgagacgtcatcaaggacagaaggagagaagctgcgtcggcaaaacgcttctccccgtacatacggtggaactcgcgatactttcccaggaatgtcagtcggtcactgagcatcatggctggccccaggttgtcaatgagatccaaatcagaaaagcagcctcgctcacagtaatccctgaggaacctgtctgacacgagcgtggcaaaggcggcatccttagcacggatgctccaagagagggcagaacccaggcgattgttgcggacggctttcatggctaagatcttacaaatgctgcgaacttgttcagtcatctgccgctgctcacagatccgcagcaccttcagggctttctgctcggtgttcagaggtatccgctcaatgtgcagctccagggagactcggcccagctcggggcagtaatcaaagtaatcgacccccagctgccacaggctgggatgagcaaacagtcccgaggcgtactccagcaggaggaactctctcatgttggaaccgaaatagaggttgtgtgactggaggagcttgcagtggtccagcaggtctgtcaggtgggccacaaaccaccagttgctcagggcgatgctgcagattcagacaccaaggcaagaaggaaaatcagggcacaggccgcgtcccacaagagtgggggtgagcaagaaaccccacatgtcctgtccctcaaagagatggggccgggcgtgatgatagctcat

SEQ ID NO: 189250 - DNA, 1299 bp, Homo Sapiens
  misc_feature (346)..(454): n is a, c, g, or t
gtgtgagccaccacacccagcctctgtagttctttttacaacatttttcattataactttaaattttttaagcaactggaaaagtgttccttgctctcttggggggatttggctggtgccgaagtgtttctgaagtctcaagaactgccataaaatctcacgctgccatttccctgaacagatacatacatagagagagacagttttccaaactgtgtcacgcaggctgagtgcactggcaggatcacagctcacggcagcctcaacctccctggctcaagcgatccctcccctcagcctcctgagtagctgagactacaggtgagtgccaccacactcagctaannnnnnnnnnnnnnnnnnnnnnnnnnnnnnnnnnnnnnnnnnnnnnnnnnnnnnnnnnnnnnnnnnnnnnnnnnnnnnnnnnnnnnnnnnnnnnnnnnnnnnnnnnnnngtgtgagccactgtgcccagcagtttcccagaatatatttaaatgcaaagttacatgaggggaaaacatgtatgtttgctcctgttgttactgggtaggttctgaacagcagaaacccatgtgcagggtgggctggtgaaggcccctctccgcaaggtggtagcaggaaaaggtccttgacttgatgaatttggtctgcctctgagccactggaggaagctgttttgagccagggttttttggcctaaagccagcatttcctcagtctccctttgtggttcgaaggatatggactattgcaatacatttcttccttcaaatcctgccactgttttgttggcccacaactaataggacctcaaaataagccatgctgctttgcacacacactagccttcttttgtacttttcattctggatgggcttggccaaaacaggctcaggccaaagacctcccaagctgtatgtacttccagtatcctgaaacagtgtttggtgacataatgccaagggtaaacaagcctgatttaggcactgctttatccaggggcttcacccatgaaattaataaaacttatctgagtcacttgaaacttggttcccagaaaacacatttctggtttataatctccttttatgctcacctgacattaattatctatccttgatgatgtgtttaaactgagtagcagaaaacagaggccacactttctgggaaattttaaaggaagaaaccatttttaatgagatgaaaatatttaacgaatttaaaaagctaatgacaattttgagaaaaggtttgggatgtatattgctatgtaatttaataaactgattttatggat

SEQ ID NO: 189251 - DNA, 1146 bp, Homo Sapiens
  misc_feature (142)..(170): n is a, c, g, or t
ttggattgttgtaggtttcagggatgacagatttggatgcactcatttaaaacgttttggtcacatatcagctcttgatgcctttcttttaaattaattatagacagagagaggcatttagctgatctcttacccctggtannnnnnnnnnnnnnnnnnnnnnnnnnnnnaaatcacaagtagattgccagcgtaatggagaggaaaccagattggatatggactcttttttatgcctattctggtgttgcgtttgtatatccaaatggacgttatcctctcagattcttatctggcactaatttataactattatattatcagagactatgtagcaatatatcagtgcacaggcgcatcccaggcctgtacagatgtatgtctacacgtaagtataaatgaatttgcataccaggttttacacttgcatctctaatagagattaaaaacaacaaattggcctcttcctaagtatattaatatcatttatccttacattttatgcctccccctaaattaatgactgagttggtggaaagcggctaggttttattcatactgttttttgttctcaacttcaaaagtaatctacctctgaaaaatttgtagtttaatatttgtttggtgaatttgtgccactttaatccttccactatcattcccattttgttacatttctgttatggggactttatgttgaaatattgtataaagcatttgtagcaatttaaaaataaaatatttaaaattatttaaattgttttggacgcttcaattgtattatatgtgatttacatttcactttttttgttggcgttgttaacccggagagtgctcctgtattgaactttgctgttagttattttattgcttctttttggagagtgctataaaagactattctaatgaaaacattaaaatttacaatttgacatacaaaaaggggttgtccattgattttaaccaatgtagcactgagagagagagaggttaattatagatagacaagagtggtgtttgttgtttttcccctcccagcattgaaatcattggggcttgtcagatgtattaaaaaaagatttgttgtgctattgctgcaaacacttaataactataggagatttaaacaatgcattttatattact

SEQ ID NO: 189252 - DNA, 764 bp, Homo Sapiens
ttggctcttacaggtagcaatgaagtgatgaggatactgatctctagaagcctgcttcaggagtagaacccacacttgttctggcctggtgttcagtgcgactgcagtcagtgttgagtggtgccatgtgggccgctctattccaaaggaatcatggattagacccaagggctgagctcctctagggcaggacctgcaccctgtgtgttggcaccagcatcgggtcttggactggggcagaatccccagtggaaccggaagagctggactgatgagaaacatcagaagaacacatactaccttgttttcctaatgccagaagggtgaccagtgaagattcaccgtcaaaccatgaaagtcctttcttggatccactttatcttgattagtctgcattttactagttcactggatccctcctctaggggcctggggactttcactgatgctcttcctgattctagagcaaaggtgtgggaaggggaaatggaggaatgccctcctgtctgtgtcgttctctgtgccacagctacagatgcagaaggtttctctggatagcacacctctgaatgtaaatcatgataaaatggatatttggaaacttactcctaagctgtgatttagggtgtatttctacttctggactgcctcaatatcaagggctgagacttttgaattttgaatattcgttgggtttcatgttaagaagcctgtggtctaggagtgctattcagtgtttcttttcctgataaacactttgaata

SEQ ID NO: 189253 - DNA, 939 bp, Homo Sapiens
ttggagatttctgaagagtgcagctgcctgaaccgagccctgccgaacagctgagaattgcactgcaaccatgagtgagaacaataagaattccttggagagcagcctacggcaactaaaatgccatttcacctggaacttgatggagggagaaaactccttggatgattttgaagacaaagtattttaccggactgagtttcagaatcgtgaattcaaagccacaatgtgcaacctactggcctatctaaagcacctcaaagggcaaaacgaggcagccctggaatgcttacgtaaagctgaagagttaatccagcaagagcatgctgaccaggcagaaatcagaagtctggtcacctggggaaactatgcctgggtctactatcacatgggccgactctcagacgttcagatttatgtagacaaggtgaaacatgtctgtgagaagttttccagtccctatagaattgagagtccagagcttgactgtgaggaagggtggacacggttaaagtgtggaggaaaccaaaatgaaagagcgaaggtgtgctttgagaaggctctggaaaagaagccaaagaacccagaattcacctctggactggcaatagcaagctaccgtctggacaactggccaccatctcagaacgccattgaccctctgaggcaagccattcggctgaatcctgacaaccagtaccttaaagtcctcctggctctgaagcttcataagatgcgtgaagaagtgaagaggaaggtgaaggagagaagttagttgaagaagccttggagaaagccccaggtgtaacagatgttcttcgcagtgcagccaagttttatcgaagaaaagatgagccagacaaagcgattgaactgcttaaaaagctttagaatacataccaaacaatgcctacctgcattgccaaattgggtgctgct

SEQ ID NO: 189254 - DNA, 1571 bp, Homo Sapiens
ttggagctgcatcagtgtgatgtgtgcctgaggagcttcagctgcaaggtgagcctggtgacccatcagcgttgccacctgcaggaggggcccagtgccggccagcatgtccaagagaggttctcacccaacagcctggttgccctgcctggccacatcccttggaggaaaagccggagttccctcatctgtggttactgtggcaagagcttcagtcacccatctgacttggtgcggcaccagcgcatccacacgggtgagcggccctacagctgcactgagtgtgagaagagctttgtccagaagcagcacctcctgcagcaccagaagatccaccagcgggagcggggtgggctggccctggagcccggaaggcccaatggcctgctttaagggtgcagcccctcgcccgtctgggggatggaggggggtggcattggttcccccgaagagacactgcagtcagggactgagttcttcctgagggcagttgtttgtgattgccttcccttgtcccagtaccaagccaagcccaaaggctgtcctgaaaaccctgtggaagaagagtccaggccaggtcttcatcctgctgccaagtttgctgtttcttggcaccttcaggtctctggttttctcattcatgccaatgcttgtgggctggggttggcgttctgaccccacagggactggtggctggttccagggctcgtcccggcatttcatgtcttcccacggggttgagtcgggccataggggtgagcagctgcctggaagagttctgggaagtataaccctccattttttcttgttttataatctctttgtttaataataagtagaagaaataatttaaatgaactgcttagccctgctctgaagaaccttttttggaattagattttagttgattttttaaagaatacagcccaacacttgttttttacattttaagagttgtagaagttgttcctaacttggggactggacctaccctctaggagggagttgttaatggggctcttttagcccactgatgcttacttaggccggagagcaggggacacggtgctaggttccctcgtgcagtgcctggtgctctcaaattgtctcaaaaggaccaagaggaaaagagtcggaggggtagaccctgcagccctgttgagaagaaagattccagtgaagttgctgatggtatggctgtggtctgggacttgcggtgtctcggcatacccctctcctcttcccacctcctcctggctatgttctgcagcctcccagagtagaaaactactttgttacttaaggttgttcaccttgtaccagtggttatttgagtttgttcctattacaccaatccttacttgaggtggttcggattacagtttccaaatgcattctgggattgcctattccagagagggtacagaaaaagcacacagatggcttgtctcacgagtgttgaatgtgtgccccgctgctgtctggggggatgggagtgggctctggggtcatatgtgaacatccccttggatgatttgcggttgcttagaataaaacttgctactagcaaa

SEQ ID NO: 189255 - DNA, 1797 bp, Homo Sapiens
  misc_feature (754)..(789): n is a, c, g, or t
ttggctcaagatgaatttgaggaacttacaatgtctcagaaaaatggtgggaatgttcttcagatgatgtatgagaaacctgaacgatggtcttttaccttccaaacatatgcctgtctcagtcgaataagagctcagcttgcctctctgaatggcaagctcaaagatgcagagaaacctgtattattttttgaacgatctgtgtatagtgacaggtatatttttgcatctaatttgtatgaatctgaatgcatgaatgagacagagtggacaatttatcaagactggcatgactggatgaataaccaatttggccaaagccttgaattggatggaatcatttatcttcaagccactccagagacatgcttacatagaatatatttacggggaagaaatgaagagcaaggcattcctcttgaatatttagagaagcttcattataaacatgaaagctggctcctgcataggacactgaaaaccaacttcgattatcttcaagaggtgcctatcttaacactggatgttaatgaagactttaaagacaaatatgaaagtctggttgaaaaggtcaaagagtttttgagtactttgtgatcttgctgaagactacaggcagccaaatggttccagatacttcagctttgtgtatcttcgtaacttcatattaatataagtttctttagaaaacccaagtttttaatcgtttttgttttaaagaaaaaagatttttaaaatgaatcttatgcaaaannnnnnnnnnnnnnnnnnnnnnnnnnnnnnnnnnnnaaaaagacatttaaagacaaagacattatttctcatagcaggaaatgtagaggtagatggttccagtatcagcatagtgactaaactacattataaaagatccagcttccttctgtcattcccctcttttgtcttcctcagcaggttggcttttttccctggtgcctctcacttcgttggtgaccagtttcttaaactgaaagctttaatgttacatagtaaatggtagtgtgtcctgtgtaaattagtgtacctattaaaagttgcaaagtggaattaaaggaatccctagaataaggattctgaagttttattttaaattattatcttcttaacagtttagtcccacctcttacttcctgcctcagtctgctttctctactgtctggattaattaggcagcctgctataaagttaaagtcacacatttctattttgcaaacactgtgattactctttgctttgtagtttgctttgctttgtagggttctgcttttaagtttttctctttttcagacaaattactgataaaaatgatattgctctatatgtaatatatcctgaaagcattattttttgttgaataggaaataaaattaatgaagacagaggctagaaagcatccattaattaatgagacacacttaactacttatctctaaaccatctatgtgaatatttgtaaaaataatgaatggactcatcttagttctgtatataaatatattttctttctagtttgtttagttaaggtgtgcagtgtttttcctgtgtattaaacctttccattttacgttttagaaaattttatgtattttaaaataaggggaagagtcattttcacttttaaactactatttttctttccaagtcatttttgtttttggtttcttattcaaagatgataatttagtggattaaccagtccagacgcactgatctttgcaaaggagacttaatttcaaatctgtaattaccatacataaactgtctcattatacgtatgca

SEQ ID NO: 189256 - DNA, 960 bp, Homo Sapiens
  misc_feature (323)..(382): n is a, c, g, or t
  misc_feature (837)..(872): n is a, c, g, or t
actcttccccttattttaaaatacataaaattttctaaaacgtaaaatggaaaggtttaatacacaggaaaaacactgcacaccttaactaaacaaactagaaagaaaatatatttatatacagaactaagatgagtccattcattatttttacaaatattcacatagatggtttagagataagtagttaagtgtgtctcattaattaatggatgctttctagcctctgtcttcattaattttatttcctattcaacaaaaaataatgctttcaggatatattacatatagagcaatatcatttttatcagtaatttgtctgnnnnnnnnnnnnnnnnnnnnnnnnnnnnnnnnnnnnnnnnnnnnnnnnnnnnnnnnnnnntaatcacagtgtttgcaaaatagaaatgtgtgactttaactttatagcaggctgcctaattaatccagacagtagagaaagcagactgaggcaggaagtaagaggtgggactaaactgttaagaagataataatttaaaataaaacttcagaatccttattctagggattcctttaattccactttgcaacttttaataggtacactaatttacacaggacacactaccatttactatgtaacattaaagctttcagtttaagaaactggtcaccaacgaagtgagaggcaccagggaaaaaagccaacctgctgaggaagacaaaagaggggaatgacagaaggaagctggatcttttataatgtagtttagtcactatgctgatactggaaccatctacctctacatttcctgctatgagaaataatgtctttgtctttaaatgtctttttcnnnnnnnnnnnnnnnnnnnnnnnnnnnnnnnnnnnnttttgcataagattcattttaaaaatcttttttccccaacttttttgtacaaagttgttcttttaaaagttaagcattgctcatcaat

SEQ ID NO: 189257 - DNA, 584 bp, Homo Sapiens
  misc_feature (384)..(405): n is a, c, g, or t
tttgtacaaaaaagttggcttaactacttctctcaaaaccatctatgtgaatatttgtaaaaataatgaatggactcatcttagttctgtatataaatatattttctttctagtttgtttagttaaggtgtgcagtgtttttcctgtgtattaaacctttccattttacgttttagaaaattttatgtattttaaaataaggggaagagtcattttcacttttaaactactatttttctttccaagtcatttttgtttttggtttcttattcaaagatgataatttagtggattaaccagtccagacgcactgatctttgcataggatacttaatttcaaatctgtaattaccatacataaactgtctcattatacgtatgcannnnnnnnnnnnnnnnnnnnnnggtataaattaatttgttaattaaatatttcttaagtataaaccttatgaactacagtggagctacactcattgaaatgtaatttcagttctaaaaaagatgtaataatcattttagaattaaatttattctacttttaaataaattatgaatattaaaggtgaaaattgaataaatta

SEQ ID NO: 189258 - DNA, 1381 bp, Homo Sapiens
acaaaaaagttggctccggcgccaccgagccggggcagccgcggcaacggcgaggcgcgaggcaggggcgcccggcagaccccgcgaccccgagccagcgggcgccccgagcgggcagcctcgccgggggaggcggaggcggccacggcggccgcgctcgggcgcccctcgcgcagcgctccttgcccgtgtggtgctgccgctgctccctggccggtcatttcagaaactatagtgacactgaaactgaaggagagatttttaattccttagtgcaatactttggtgacaacttggggcgaaaagttaaagcgatgccattagttgaagaaacttctttactggaagattcctcagtgacttttcctgtggtaataataggaaatggaccctcaggaatatgcctttcttatatgttatcaggctacagaccgtatttatcatcagaagcaatacacccaaatacaatcttaaatagtaaattagaagaagcaagacatctttccattgttgatcaggacttagaatacttgtctgagggccttgagggccgatcatccaatccagttgcagtacttttcgatacacttcttcatccagatgctgactttgggtatgattatccatccgttttgcattggaaattagagcaacatcattatatccctcacgtagttcttggtaaaggtccacctggtggggcttggcataatatggaaggctccatgttgacaatcagctttggaagttggatggaactacctggacttaaatttaaggactgggtatcaagtaaacgaaggagcctaaaaggggatcgagttatgccagaggaaatagctcgctactataaacattatgtaaaagtcatgggtcttcagaagaatttcagagagaatacttacataacttccgtatcaagactctacagagatcaagatgatgatgatattcaagacagagatatttcaacaaagcatttacagatagagaagtcaaactttatcaagagaaactgggaaattaggggttatcagcgaatagctgatggttctcatgttcccttctgcctctttgctgagaatgtagcgctggcaactggaacgctggattctcctgcccatctggaaattgaaggggaagattttccttttgtgtttcattcaatgcctgaatttggagctgctataaacaaaggaaagttgcgtggcaaagtggatccagtgttaattgtaggttctgggcttactgccgctgacgcagtactgtgtgcttacaacagtaatatccctgtgattcatgtgtttcgcagacgagtaactgatccaagcttaattttcaaacagcttcccaaaagctgtatcctgaatatcataaagtc

SEQ ID NO: 189259 - DNA, 939 bp, Homo Sapiens
ttggctacatcaaggccccaggacatgcagaaccttcctctagaacccgacccaccaccatgaggtcctgcctgtggagatgcaggcacctgagccaaggcgtccagtggtccttgcttctggctgtcctggtcttctttctcttcgccttgccctcttttattaaggagcctcaaacaaagccttccaggcatcaacgcacagagaacattaaagaaaggtctctacagtccctggcaaagcctaagtcccaggcacccacaagggcaaggaggacaaccatctatgcagagccagtgccagagaacaatgccctcaacacacaaacccagcccaaggcccacaccaccggagacagaggaaaggaggccaaccaggcaccgccggaggagcaggacaaggtgccccacacagcacagagggcagcatggaagagcccagaaaaagagaaaaccatggtgaacacactgtcacccagagggcaagatgcagggatggcctctggcaggacagaggcacaatcatggaagagccaggacacaaagacgacccaaggaaatgggggccagaccaggaagctgacggcctccaggacggtgtcagagaagcaccagggcaaagcggcaaccacagccaagacgctcattcccaaaagtcagcacagaatgctggctcccacaggagcagtgtcaacaaggacgagacagaaaggagtgaccacagcagtcatcccacctaaggagaagaaacctcaggccaccccaccccctgcccctttccagagccccacgacgcagagaaaccaaagactgaaggccgccaacttcaaatctgagcctcggtgggattttgaggaaaaatacagcttcgaaataggaggccttcagacgacttgccctgactctgtgaagatcaaagcctccaagtcgctgtggctcc

SEQ ID NO: 189260 - DNA, 1557 bp, Homo Sapiens
  misc_feature (1395)..(1424): n is a, c, g, or t
cagagagaaattcagtttaagatgtattttgtaatgctaaaacgagttagtgctatttgttaatcttttatgtgcataatgtcacttgtttttaaatgtttgttcataaatatttaatgttcgtgagaagtaataaaagtcccatcatccagcaaattttttcagctaagcgtgtcttataataagaaaagcagaacctttttaaaaaatttttaatctattatttctcacagggctatggcatttcctctgtgccatctgcttccaattctaaatccataaaagagaatagtaatgctgccatcatcaagagatttaaccatcacagtgccatggtcctggcagctggactcagaaaacagttaagtataaatgcagaggtgcagtaactgggcttttcaggatatccagatggagttgtggtgttgttttgcttgtggtttttaacgttaacttttttttcccctttattttaagagaagcacaaaatgaacaaactagtgagcccagcaacatggatggaaattccggagatgcagactgctttcagccagcagtcaaaagggcgaaattacaagagtccattgaatatgaagacttggggaaaaataattctgtaaaaacgattgcactaaacctcaagaagtcagataggtattatcatggtccaactccaatccagtcactacagtatgcaacaagtcaggacattattaattcttttcaaagtattagacaagaaatggaagcttatacacccaagttaactcaggttctctcaagtagtgctgccagtagtaccatcacagcactgtcacctggaggggcacttatgcagggaggaacacagcaagccataaaccagatggtgccaaatgatattcaatctgaattgaaacacttatatgtagctgttggagaacttctacgacatttctggtcctgctttcctgttaatacgccattcctagaagaaaaggtagtgaaaatgaaaagtaatttggaacgattccaagttacgaagctctgtccattccaagaaaagattcggagacagtatttaagcacaaatttggtaagtcacatagaagagatgctccagacagcctacaacaagctccacacatggcagtcacggcgtctgatgaagaaaacgtgaggtggccatgatgcttacaggttttgtgagattgagagaactatgacctgcagcaactctggaaacctggcctgacagacaagcagatgacctcacaggagtgataagaaacatctgctccacgccaactcccagagctgatgctattgtacttgcacattggagactgaaaggaaagaagggactaaatgctggggaggtaaattaagacagaaccaaatgagctaagttgcaannnnnnnnnnnnnnnnnnnnnnnnnnnnnngtacatgtgtatgtacatatatattttaaaagactgtttactgcagttgctcacgaactgcttttgattcacattaaagctgctttcagaaattaaaaaaacactttttaaagggtgcattgataaaatctga

SEQ ID NO: 189261 - DNA, 930 bp, Homo Sapiens
ttggtgcttctggacccgggtgggtgccggctcggctctccttgtcttccagagcggtggcccggaagcacagtcctcccagacgccagcgccagaagctcggatcgcggctgcaccgggagagcgccgatctgggtgcgaggcaggtgcggggccatgaatgggaccgcaaacccgctgctggaccgcgaggaacattgcctgaggctcggggagagcttcgagaagcggccgcgggcctccttccacactattcgttatgattttaaaccagcatctatagacacttcctgtgaaggagagcttcaagttggcaaaggagatgaagtcacaattacactgccacatatccctggatccacaccacccatgactgtgttcaaggggaacaaacggccttaccagaaagactgtgtgcttattattaatcatgacactggtgaatatgtgctggaaaaactcagtagcagcattcaggtgaagaaaacaagagctgagggcagcagtaaaatccaggcccgaatggaacagcagcccactcgtcctccacagacgtcacagccaccaccacctccaccacctatgccattcagagctccaacgaagcctccagttggacccaaaacttctcccttgaaagataacccctcacctgaacctcagttggatgacatcaaaagagagctgagggctgaagttgacattattgaacaaatgagcagcagcagtgggagcagctcttcagactctgagagctcttcgggaagtgatgacgatagctccagcagtggaggcgaggacaatggcccagcctctcctccgcagccttcacaccagcagccctacaacagtaggcctgccgttgccaatggaaccagcccggccacaagaaagcaaccagctcatgaacaccctcagaaatgacttgca

SEQ ID NO: 189262 - DNA, 1495 bp, Homo Sapiens
  misc_feature (324)..(337): n is a, c, g, or t
aaagcaattaataaattaaaatgagccttcagcagcaaagctgtcaatcacacaggagaagctgagcagaaagcaaagcaaagaggaatttatagcttctctggctgaggcctaggcccctccctctaggagcagctgtcagcacggactacatagaggcctccaaagtactgagaggagccatctagactattccccctcatatgtgtctatcatgcattaaattttagagggaccccaatccaaatgcaataaccctagaagggacaacacctttagaaggcactagagcattttggcagttgaaaacatgagagcccccannnnnnnnnnnnnncgttcaaaaggaatgctggtgtatgtatccaattctgtcccatcagcctggcccacccccagctagagttgggaaaggcgctgctggtcagatgcagggaggaggagcttgactagccaccgaaatgcagacatggctggccgggccccttagtgcacactgcggggatgggtaggaccagatcccttgggctttgtgaagggggaacagacgccccttcaggcttagatgtggtgtggttcctggaggcagggaggtgggtggcagcggcccctcctctgcttagtggccactccagagggcctctccagggctacaggtgtatggctgtgacatctgtaggagtgctggtctggctgggcccttggctgctggagccccggggggctttgggcgctgggctggagctggtctgagaggcttccctgaggctctccctgagtgcagcttcgatctgctcctgacaggcccgcaggcagtccacttcagtgccagtgatccctgccagcagctctgtgagctcatccccggacatggagcaggcacccaggccttgcactgcagccccaatgctgcccgtggcgatcatggatggcgggtacatggcaaaggtataatctgtagcacagagggccaaaaaggtctgggcatgctttttgaccaaggcctgtcggtcacggggcagagagagccggtgcagaatgaaggccaggaaatcatgtgcaatcacagcagccaggtcccacttgagcttccctaggaccagcacctcccagtcccgcaactggcggggagagacagcgtggtcggtgtagatgcacagtttttcgatggtcaggggcgtggtctcgcgcagcttggaggccagcagcatgcagaccgcacccaggagctgcaactgcgcctttcgggtggggacgcaagacaggtagcgatccaggtagttcatggccagggggaagacttcctcctcacagcgctgctcctcacatacctcctcgtcaggtgacctccccggagcaccgactggggtcgcaggcgctctgtcccgccgcctccggagcctgcctttggggagtgggggtggtcgcaaccaccagccgcgaggagaggattgcacctctcccccccggccggcatccgaacagagccagccaa

SEQ ID NO: 189263 - DNA, 1570 bp, Homo Sapiens
ttggcccagcctccccgtctcgccgccaactccacatcctggctcctatctctgccttccaggcatctcccagctgcacgctcgggcccggctcagagccctaagccctgcctcccggtcctggccgggtttcccagaactgcacggcgcctctccgcccaggcccaagcgcgagcccctcctccacacccgagtccgagccccgcgtcccggattcggacccgcctgcctggggcggtgctgcaccaggtgcgggtgtggcaggcgtctcggagcgccaggtgcagcttcctggtcaagatggtcgccgcctgccgctcggtagccgggctcctgccacgccgccgccgctgctttcccgcccgggccccgctgctgcgcgtcgccctctgcctcctgtgctggaccccggcggctgtgcgcgcggtccctgagctcgggctctggttagagacagtcaacgacaaatcaggacctttgatatttaggaaaactatgtttaactctacagatatcaagttatctgttaagtcattccattgttctgggcctgtgaagtttaccatagtgtggcatttgaagtatcatacctgtcacaatgagcattctaatctggaagagctgttccaaaaacataaacttagtgttgatgaagacttttgtcattatttgaagaatgacaactgttggacaacaaaaaatgaaaacttagattgcaacagtgattcacaggtgtttccctctttgaataataaagaactaataaatatcagaaatgtttcaaaccaggaaagatcaatggatgttgtagccagaacacaaaaagatgggtttcatatctttattgtttctattaaaacggagaatacagatgcaagctggaatttgaatgtttctctttctatgattgggcctcatggatatatctctgcatcagattggcccctaatgattttttacatggtgatgtgtattgtttatatattatatggcatactctggctgacgtggtctgcctgttattggaaagatatattaagaatccagttctggattgcagctgttatttttttgggaatgcttgaaaaagcagttttttatagtgaataccaaaacatcagcaacactggactgtcaacccaaggcttattgatatttgcggagttgatttctgcgattaagaggacgttggctcgccttctcgtgatcattgtgagcctgggctatggcattgtgaagcctcgtttaggaacagtcatgcaccgggtgatcggactggggcttctatacttaatctttgcagctgttgaaggcgtgatgagagtcattgggggttctaaccatttagctgttgttcttgatgacattattttagcagttattgactccatttttgtgtggttcatttttattagtttggcacaaactatgaagaccctaacgctaagaaagaacactgtgaaattttcattatatagacattttaaaaatactctgatctttgctgtgctggcttctatagtgtttatggggtggacactaagacatttagaattgcaaaatgccaatc

SEQ ID NO: 189264 - DNA, 1936 bp, Homo Sapiens
ttggcacaaggacaagtcattttctgatcaaagaagtgagctgaagagacgcctgaaagctgagaagaaagtagcagagaaggaggccaaacagaaagagctcagtgagaaacagctaagccaagccactgctgctgccaccaaccacaccactgataatggtgtgggtcctgaggaagagagcgtggacccaaatcaatactacaaaatccgcagtcaagcaattcatcagctgaaggtcaatggggaagacccatacccacacaagttccatgtagacatctcactcactgacttcatccaaaaatatagtcacctgcagcctggggatcacctgactgacatcaccttaaaggtggcaggtaggatccatgccaaaagagcttctgggggaaagctcatcttctatgatcttcgaggagagggggtgaagttgcaagtcatggccaattccagaaattataaatcagaagaagaatttattcatattaataacaaactgcgtcggggagacataattggagttcaggggaatcctggtaaaaccaagaagggtgagctgagcatcattccgtatgagatcacactgctgtctccctgtttgcatatgttacctcatcttcactttggcctcaaagacaaggaaacaaggtatcgccagagatacttggacttgatcctgaatgactttgtgaggcagaaatttatcatccgctctaagatcatcacatatataagaagtttcttagatggctgggattcctagagattgaaactcccatgatgaacatcatcccagggggagccgtggccaagcctttcatcacttatcacaacgagctggacatgaacttatatatgagaattgctccagaactctatcataagatgcttgtggttggtggcatcgaccgggtttatgaaattggacgccagttccggaatgaggggattgatttgacgcacaatcctgagttcaccacctgtgagttctacatggcctatgcagactatcacgatctcatggaaatcacggagaagatggtttcagggatggtgaagcatattacaggcagttacaaggtcacctaccacccagatggcccagagggccaagcctacgatgttgacttcaccccacccttccggcgaatcaacatggtagaagagcttgagaaagccctggggatgaagctgccagaaacgaacctctttgaaactgaagaaactcgcaaaattcttgatgatatctgtgtggcaaaagctgttgaatgccctccacctcggaccacagccaggctccttgacaagcttgttggggagttcctggaagtgacttgcatcaatcctacattcatctgtgatcacccacagataatgagccctttggctaaatggcaccgctctaaagagggtctgactgagcgctttgagctgtttgtcatgaagaaagagatatgcaatgcgtatactgagctgaatgatcccatgcggcagcggcagctttttgaagaacaggccaaggccaaggctgcaggtgatgatgaggccatgttcatagatgaaaacttctgtactgccctggaatatgggctgccccccacagctggctggggcatgggcattgatcgagtcgccatgtttctcacggactccaacaacatcaaggaagtacttctgtttcctgccatgaaacccgaagacaagaaggagaatgtagcaaccactgatacactggaaagcacaacagttggcacttctgtctagaaaataataattgcaagttgtataactcaggcgtctttgcatttctgcgaaagatcaaggtctgcaagggaattcttgtgtgctgctttccatttgacaccgcagttctgttcagccatcagaagagagacaaggaattaaaaatttctttttaatcctgttaccaaat

SEQ ID NO: 189265 - DNA, 902 bp, Homo Sapiens
tttgtacaaaaaagttgggcattttggacctatgaaccacaagaaaatcaaaagaaacttttgcccttatcagtaacacctgaggctttttctggaactgttatagaaaaagaatttgtatcaccttccttaacaccacccccagccattgctcatcccgcactacccactattccagaacgaaaggaagttctgttggaagcatctgaagaaactggaaagagggtttcaaagtttaaagctgccagattgcaacagaaagactaggccctgtctaggaaatgggaatttacatcctaaaacctagttgttcatttgtttagagtatctatagcaaaataggttacatgtagtttgaaataaggtatcctgagttactttggcaacaagttcttttacccttacccgtggtatttgaaaaaaatcaaggtaactgtctgaatactttaatatcagcttgttttgtgaattctctgaatactgtcaacactcttatctaagtttgcctttatgatgcagtggcagcattttgaattacttttcaaagaatactgttcatatgcattgtttttgtgtttcaaactaaatacaggcagttttgtgccagctgtgatattgtgcataccatatggaccattttaaagaaaattttaaaatttcaaatagattcaacaattacattacttgctttcacattttaaaggcactttaaaaaaatctacttctcttgtaggttttgcggctagttggctattcaagaaacctcgcccctctgaatgtcatactgtaatctttaaggaagaaagctacatgaattaattgtactctatgggaaaatttctttggaaagatattttgtaaaacttttttttccaagtaaaaactttatgaaacttggtctc

SEQ ID NO: 189266 - DNA, 989 bp, Homo Sapiens
ttggcgcagtggagccgtggctgagtgcagctgagcggctgtatgggccctacatgtggggcaggtacgacattgtcttcctgccaccctccttccccatcgtggccatggagaacccctgcctcaccttcatcatctcctccatcctggagagcgatgagttcctggtcatcgatgtcatccacgaggtggcccacagttggttcggcaacgctgtcaccaacgccacgtgggaagagatgtggctgagcgagggcctggccacctatgcccagcgccgtatcaccaccgagacctacggtgctgccttcacctgcctggagactgccttccgcctggacgccctgcaccggcagatgaagcttctgggagaggacagcccggtcagcaaactgcaggtcaagctggagccaggagtgaatcccagccacctgatgaacctgttcacctacgagaagggctactgcttcgtgtactacctgtcccagctctgcggagacccacagcgctttgatgactttctccgagcctatgtggagaagtacaagttcaccagcgtggtggcccaggacctgctggactccttcctgagcttcttcccggagctgaaggagcagagcgtggactgccgggcagggctggaattcgagcgctggctcaatgccacaggcccgccgctggctgagccggacctgtctcagggatccagcctgacccggcccgtggaggcccttttccagctgtggaccgcagaacctctggaccaggcagctgcctcggccagcgccattgacatctccaagtggaggaccttccagacagcactcttcctggaccggctcctggatgggtccccgctgccgcaggaggtggtgatgagcctgtccaagtgctactcctccctgctggactcgatgaacgctgagatccgcatccgctggctgcacattgtggtccgcaacgactactatcctgacctccacagggtg

SEQ ID NO: 189267 - DNA, 466 bp, Homo Sapiens
ttgtacaaaaaagttggctccaaggattctctgtgataagagacatacccactccagcacacagaagcatgaggttcatgactctcctcttcctgacagctctggcaggagccctggtctgtgcctatgatccagaggccgcctctgccccaggatcggggaacccttgccatgaagcatcagcagctcaaaaggaaaatgcaggtgaagacccagggttagccagacaggcaccaaagccaaggaagcagagatccagccttctggaaaaaggcctagacggagcaaaaaaagctgtggggggactcggaaaactaggaaaagatgcagtcgaatattttgaaagcgtgggtaaaggagccgtccatgacgttaaagacgtccttgactcagtactatagctgtaaggagaagctgagaaatgatacccaggagcagcaggctttacgtcttcagcctaaaacct

SEQ ID NO: 189268 - DNA, 820 bp, Homo Sapiens
ttgggacaaagcggaacatgaaatcagctcttctcctgggagtctgggagccattattaacatccttgatctgctctcaacagttccaacccaagtaaattcagaaatgatgacgcacgtgctctctacggttaatgtcatccttggcaagcccgtcttgaacacctggaaggttttacaacagcaatggaccaatcagagttcacagctactacattcagtggaaagattttcccaagcattacagtcaggagatagccctcctttgtccttctcccaaactaatgtgcagatgagcagcacggtaatcaagtccagccacccagaaacctatcaacagaggtttgttttcccatactttgacctctggggcaatgtggtcattgacaagagctatctagaaaacttgcagtcggattcgtctattgtcaccatggctttcccaactctccaagccatccttgctcaggatatccaggaaaataactttgcagagagcttagtgatgacaaccactgtcagccacaatacgactatgccattcaggatttcaatgacttttaagaacaatagcccttcaggcggcgaaacgaagtgtgtcttctggaacttcaggcttgccaacaacacaggggggtgggacagcagtgggtgctatgttgaagaacgtgatggggacaatgtcacctgtatctgtgaccacctaacatcattctccatcctcatgtcccctgactccccagatcctagttctctcctgggaatactcctggatattatttcttatgttggggtgggcttttccatcttgagcttggca

SEQ ID NO: 189269 - DNA, 882 bp, Homo Sapiens
aactctcaacccacttctccagccagcgccccagccctcccgccgcccgctcgcaggtcccgaggagcgcagactgtgtccctgacaatgggaacagccgacagtgatgagatggccccggaggccccacagcacacccacatcgatgtgcacatccaccaggagtctgccctggccaagctcctgctcacctgctgctctgcgctgcggccccgggccacccaggccaggggcagcagccggctgctggtggcctcgtgggtgatgcagatcgtgctggggatcttgagtgcagtcctaggaggatttttctacatccgcgactacaccctcctcgtcacctcgggagctgccatctggacaggggctgtggctgtgctggctggagctgctgccttcatttacgagaaacggggtggtacatactgggccctgctgaggactctgctaacgctggcagctttctccacagccatcgctgccctcaaactttggaatgaagatttccgatatggctactcttattacaacagtgcctgccgcatctccagctcgagtgactggaacactccagcccccactcagagtccagaagaagtcagaaggctacacctatgtacctccttcatggacatgctgaaggccttgttcagaacccttcaagccatgctcttgggtgtctggattctgctgcttctggcatctctgacccctctgtggctgtactgctggagaatgttcccaaccaaagggaaaagagaccagaaggaaatgttggaagtgagtggaatctagccatgcctctcctgattaatagtgcctggtgcttctgcacggggcgtccctgcatctgactgctggaagaagaacagactgatgaaa

SEQ ID NO: 189270 - DNA, 1909 bp, Homo Sapiens
  misc_feature (412)..(656): n is a, c, g, or t
  misc_feature (829)..(862): n is a, c, g, or t
tgcccgagattatcataaaaacatactagcaagccacaagtaccagagaggggtgaacaggcatatctgctagctctcctcttgcagtcctcagcctcccacaggaggcacaaggtccaaactattcctcaaaaaaaaggacagcctctttgtgctgaaataggaactttaaaggaagctcttcttgtagtccaaatggacgtaccttgtggtatggctgtaaggactcgattttacggcttgtgtattcctaactatagctaggcctgtcacctgctgttcctgtgatctcagctttacctagaagagctcctgaaacagaatgggtacacgaaaatctggaatgaatagctatctgctcaaaaacgattgtttaaaaacagatgattggggccgggcgcggtggctcatnnnnnnnnnnnnnnnnnnnnnnnnnnnnnnnnnnnnnnnnnnnnnnnnnnnnnnnnnnnnnnnnnnnnnnnnnnnnnnnnnnnnnnnnnnnnnnnnnnnnnnnnnnnnnnnnnnnnnnnnnnnnnnnnnnnnnnnnnnnnnnnnnnnnnnnnnnnnnnnnnnnnnnnnnnnnnnnnnnnnnnnnnnnnnnnnnnnnnnnnnnnnnnnnnnnnnnnnnnnnnnnnnnnnnnnnnnnnnnnnnnnnncagaacgaacaaagaaacaaacaaaccagatgactgggagactgaagaggaaaaaagatgggagaaaacgtagggaaaggatggggcctcacagactcagctgtgggtgggggggtaaatcattacctcaggagaagcccaaggaattgtccccgaggtgagctttggaaagnnnnnnnnnnnnnnnnnnnnnnnnnnnnnnnnnncctaaatttcctgtattaaagtgacacataatcatgttttctgattctcttcactgtctgcctgcggggagggggtggggaaggtgttaatgatgctgatccctacttctgcttcaaggagatctggtggggaattcttccaccagtccagagtttgctggtgctgacctcatccctgtatcacgggcctagaatgtgggaggctaataggatgggtgggttgcaggaggtagaagaggggatggcctagagagtttctccattcagagctggagagttgttgaagggaagggtattttaaaagggctccacccacccctagccccagcccctcagctgtggggagaggccgcctcctctgatggggtctcgatgctgctgctctgttcctggtctggcacgtcctcctcttcctgctccaagctgaagttctcgagctcctgaaaaatctcatccatgaagtcctgggagttctgtttgtaagacacagctaatcgaattgcatcattgaagagcttcacaacattggtaccatcagcagccgagacgaaatacaggggcagggagaacttcttggcaaaattgaagcttttttgggtcacgtttatgtctgcatcaattttattggccaccacgatgcatgggatctctggcctgaactcccgaagctctgtataccaggtgctcaggttcctataggtgactttcctctgtacatcaaacaccatgatgcaggcgtgggccttgtggtagtaggaggcatgcatgctctggaaccgctcctggcctgccgtgtcccaaaagtccacaaggatggtccttccatctaccgtggctgtgtgcttgtacagggtcagggcgtacgtggacagctgctgtggctgaaagccatccatgagaaatctctccatgagtttggatttgcccactgcgctgtctcccaggcagatgatcttcacgttgtcatcagcatcatacttcccttggtccaactcactcggtttggttttgtcttctgccattggctcctagctgtagagaggccaa

SEQ ID NO: 189271 - DNA, 746 bp, Homo Sapiens
ctttgtacaaaaaagttgggatagactgcctgcatccttaccactgatctggccaagaatgaggccctcccaacactttcactccctctccaagccttgatgggacctccacttatttaggcctcatgtgctttgaagaagctttgagagccaatgtgtcttccacgggtctcttttttgctacaagtaatcagccccatgtgttctcttaaactgagaattgcacctgggcaattcctgttttctaaggtggtctctgctgctatttaacaacccagagtaggcctctgtgaggcttcagtggcctcagaaaccagagggtccagatagggggcctgcttgggccctctgctgccaactgctcaaacctgctttagctccagccacttgtggcaaacaacctcgtttccttacaaattccagcatgtgactttggtgccgttacttgtgaaaaatctattctgttgtctttgatgtgtccaagaaaattcgtgtagtttacgtaaaaatatctgactcacaagaaagccaactgtatgtcttgtgatgggacagttcataatgtagttgctagaccactttacaaattgttcttgtcaccagatgtgttcagacattgctgtgcaattgttggggagggtagggggaaaggcgagaggagatacttattggtctttttgtttaataccttccccaagagaggacagtctggccaacttgctccagtaatgcaataaagacattgc

SEQ ID NO: 189272 - DNA, 816 bp, Homo Sapiens
ttggcaggacattggcccagagacaggctgatttccaacgtcctccaggggctgccgagccagagcccaaggacgggggcctacagaggaggtccagcccagctgctgacgtccagggagaaaacttctgtgctgccgtgaagaacacacagcctgaggacggggtggaaatggacactcggagcccacacgatgaagacccccaggcagtgacgtatgccaaggtgaaacactccagacctaggagagaaatggcctctcctccctccccactgtctggggaattcctggacacaaaggacagacaggcagaagaggacagacagatggacactgaggctgctgcatctgaagccccccaggatgtgacctacgcccagctgcacagctttaccctcagacagaaggcaactgagcctcctccatcccaggaaggggcctctccagctgagcccagtgtctatgccactctggccatccactaatccaggggggacccagaccccacaagccatggagactcaggaccccagaaggcatggaagctgcctccagtagacatcactgaaccccagccagcccagacccctgacacagaccactagaagattccgggaacgttgggagtcacctgattctgcaaagataaataatatccctgcattatcaaaataaagtagcagacctctcaattcacaatgagttaactgataaaacaaaacagaagtcagacaatgttttaaattgaatgatcatgtaaatattacacatcaaaccaatgacatgggaaaatgggagcttctaatgaggacaaac

SEQ ID NO: 189273 - DNA, 1111 bp, Homo Sapiens
  misc_feature (192)..(225): n is a, c, g, or t
tggggtggatgtttgtgtgctgcacgactgttgtgggggttggaggtggtgaacagaaggtccagcagtcacctgcacacagtaggcgctcatttcaatgacatcacccccatccctgacatcatcgtgctcaaggtctgggaaggcacctgggggttgtgatcggcatcttggtggccgtcgtcctactgnnnnnnnnnnnnnnnnnnnnnnnnnnnnnnnnnngacatcgacgtcagggcaaacactggacatcgagtgagtagggaaggggaaaccctgtgggccgaccgagggtgggctcagggcacagccaaagagaatccaaaccactgggcaaatgcagctttgagaaactgttccagcatttctcaccaggtgaatggagaaagcacttaacgtcagtcccatctacaaatataaagtgtcctccgggctcagtcccatctacaaatgtaaagtgtccttcggactctgtccatctcatgaggcatttggaacatggaggcaggagtgtttttaggtttccttccttaccttcgagctgtgtgtgcagggcagggggctccaatgttcccagggctgaggctctgtccttcttcccccagcccagagaaaggctgatttccaacatcctgcaggggctgtggggccagagcccacagacagaggcctgcagtggaggtccagcccagctgccgacgcccaggaagaaaacctctatgctgccgtgaaggacacacagcctgaagatggggtggagatggacactcgggctgctgcatctgaagccccccaggatgtgacctacgcccagctgcacagcttgaccctcagacggaaggcaactgagcctcctccatcccaggaaagggaacctccagctgagcccagcatctacgccaccctggccatccactagcccggagggtacgcagactccacactcagtagaagagactcacgactgctgaaggcacgggagctgcccccagtggacaccaatgaaccccagtcagcctggacccctaacaaagaccatgaggagatgctgggaactttgggactcacttgattctgcagtcgaaataactaatatccctacattttt

SEQ ID NO: 189274 - DNA, 1111 bp, Homo Sapiens
ttggagaatacagaaagctcggaaaagcattgcccaatcaggtgtaaacatgtgcaatcaaaacagctctcctcataagaatgttacaattaaaagcagcgttgaccaaaaacctaagtatttccatcaagcagcaaaagaaaagtctaatgccaaggcaaatagccactatttgtatagacacaaatatgaaaactataggatgatcaaaaaatcaggtgaatcatatcctgtgcatttcaaaaaagaagaagctagttcattaaattctttacacctgttttcatcatcaagtaattctcacaacaattttatttcagaccctcataagcctgacgccaaaaggcctgaaagcttcaaagatcacagacgtgtagctgtaaagagagtaattaaggaatctaagaaggaaagttctgttggaggggaagacttggatagctatccagattttttgcataaaatgactgttgtcgttttgcaaaaacttaattctgctgaaaagaaagatagttatgaaacagaagatgaaagttcctgggataatgttgagttaggagactacactacacaggccatagaagatgaaacctatagtgatattaatcaagagcatgtaaatttattccctttatttaagagcaaagtggaaggtcaggagcctggagaaaatgctactcttagttatgaccaaaacgatggcttttattttgaatactatgaagatactggaagtaacaactttttgcatgagatacatgatcctcagcatttagaaactgcagatgcttcattgtcaaagcatagttctgtttttcattggactgatttgtctcttgagaagaaatcgtgtccttactgcccagcaacatttgaaacaggtgttgggttatcaaatcatgtcagggggcatcttcacagagcaggattaagctatgaagcccgtcatgttgtatcaccagaacaaatagccacaagtgacaaaatgcagcatttcaaaagaactggcacaggaacacctgttaaacgagttagaaaagctatagagaagtctgaaaccacttctgaacacacttgtcagctctgtggtggttggtttgatactaaaatt

SEQ ID NO: 189275 - DNA, 1623 bp, Homo Sapiens
ttgggtcttctctgaactttttctctcttggtttcttttcttccttcacagttttatctcacaaaaccatttttctaataagagacatcatgttggaaagatgttctagaaatgtgcataaatttcagtgcctcttgtaagcattaaactgatgatgaagaaagttcctgatttgagaaatgaatcaaagtaattttaatgaatttttagcttgtattagcttgagttagctggcattgattttttagtccttttgttacctttaagttgtcaatatatggtttttgttcatctccccattgtagtcccacttgctctttcctgggggttccattgttctagcagtggaggtgttatagtgtcgccactcgtctaatttgaccagtgttaagaattttctaatttaataatttaatagtgatctcaataccacaccctcatggaaggagaaaagcatactattatatctgggacctctcttttagacctaaaattaattaacatatctacttatatgttacttatacctaaagctgttattaagacaaaccaagattctctgcttttgcactgaaattaaacttgaaaggaattctcctcaaaggtcggatattaaataagtcccaggcagatttacatatttaatttaaaacattggctttatttcattttgtgatgagtgatgtatctgtgttaacaaaaaattgtataatcattaccaatactatttattatgctcaaatatatcttggctttgaccttatttcaacacattctaagaagccttgacaaagtaagtatattttagagctgaatcagtaagattctagagaaagcaaaacatagtagttcacaattttgcaacatagaaagtcacattttgaaaggctattttgaaattgatttaatagctattatagtttatgaatatcaaaatttgtataatttgcatctttactaatgtatgctagagctacaagagaccttaaggataatatatgaaattagctttccttattttatagataaggaaaaagaaattgtgaaaggtgaatttacctaattagtgaaagttacataactaattacaacagtctgtactatataatgcagaggacgattctccctgtaaaaggaactagaagctattactaaaaatatatatagacaaaattaaaagaaggaatgataagaataaatttaatttaccaaatattgttaattaaaattttagatacttaacatttatttaacttaaataaaagataactgtcagataaaactttattttactaatgagcagtgattttcttaggaattgatgaaggcttattggtatcaagaatttaaaccaaattaaaactgacagaggacatttagatacataataaaattcgagctacataagtatatggaaactaatgtaccttgattattatgaaatagagcatcttgaaattcagttttactctaaatgtacttttaatacttgcagattctaagattacattgtaaaattccaggttttcataatgttaaaataggaaagtagaatataaagtatcaacaagtgtagtttatacattttgttttggatatttaaatcccttacttgggaaaaaa

SEQ ID NO: 189276 - DNA, 1450 bp, Homo Sapiens
ttgggaaatagcttttggttttagtggctaaatttgtaatgaaaaatttagaaacgtcccaaaactttcctgtttgtatgtatatgttttaatgtataagaaaatttaaaaattttcccttttatgaatgtagttaatctcatcatgataccaatacttaattctttttttcccccagaaaaagatcgttcagaagtttaccagaattaaaagatgctgtcttggaccagtattcaatgtggggaaataaatttggagtattgctttttctgtattctgtattactgacaaagggcattgaaaacataaaaaacgaaattgaagatgcaagtgaacccttgatagatcctgtatatggacatggcagccaaagtttaattaatctcctgctgacgggacatgctgtttctaatgtatgggatggtgatagagagtgctcaggaatgaaacttcttggtatacatgaacaagcagcagtaggatttttaacactaatggaagctttaagatactgtaaggatatggctttagttgcccctgaagctccttcagaacaagccagaagagtttttcaaacctacgacccagaagataatggattcatacccgattcacttctggaagatgtgatgaaagcattggaccttgtttcagatcctgaatatataaatctcatgaagaataaattagatccagaaggattaggaatcatattattgggcccatttcttcaagaattttttcctgatcagggctccagtggtccagaatcttttactgtctaccactacaatggattgaagcagtcaaattataatgaaaaggtcatgtacgtagaagggactgcagttgtgatgggttttgaagatcccatgctacagacagatgacactcctattaaacgctgtctgcaaaccaaatggccatacattgagttactctggaccacagatcgctctccttcactaaattaatttgtctaagtatttataaggaagatcttaataacagatgttgaaagaaggagtcaagactggcaattggctggattaagctaaacactggtatcactgattaactgtaaataacaattaaaaacacattttcagtgtttatgatatgtttaaattatttgtcctaaagctttatgttaaagattatcctattttaccccttcgtgtgaaatttactagcaaaattaagctttcatcaaagttcatcacttttgcattcagatacttggtcatttacttaccaaattacaaacgcaatactacagcatttgtatattaagtatcacagttactattgataaactacttttgggttttatttcattgaggcactttttttattgtttgaatgattccggcttgtaatatatcagcctctacaatgaaatgcagaagagttcatttttctagatctgtttttcattagaaatattgac

SEQ ID NO: 189277 - DNA, 699 bp, Homo Sapiens
tacaaaaaagttgggtcatactccatttggttcaacacaacaacctatgtgttatcattacagctttggctgctgttaaagaatccagctctctattttgataaagataatcttaaagctgaggcaatgctccctcctctatctctctctgtgtaatttaccatagaattaggatgattagattgaaacacatgttgtatgttttaaaaactacattgcttcattactttcattttccgacaacatcaaactaacaagaggcagtgttaaatattttaaatggtgctatagccaatgtatttgaatgcttgcactgctggttgtgtatcatcaatatgaactttttatccaatgactcaactctaattacatctaagttagacttgctcacgttcagtttgtacagttgtgtgttgacttactatgttttgaaagtggtgacttctaccgaatgagtggaagttcccattgtcaaaaaaaataaagacctgcttgcagtattcatgttgacaacagagtaaaagagaatactgtaaagaattactgcaaatatttcctgtttatgttatttgccgttgtttgaagatattataaagggttaattgtatatttatatcatgtgctttatcgttttcccctcatgtatccaagtaatttttatttacatacaactaaataaatgttgtcctctttgaagac

SEQ ID NO: 189278 - DNA, 832 bp, Homo Sapiens
ttgggtttttagtaagttttctttttcctttttcaatgaattgattcttcaaattaaaagttcttgagagaaggagaggaagatacagcagacataggactgagccaaggaagagtctgcctgagagagacgcttggcctgtgctttgctgccatccgtgcggccttggccacatccctattaacagaggcagctccacttcagacagggacaaggcttcctgctgtgcctttctggcagggttttgtggggtcacatgggaagcaatgtgttacgcaagcagtctccatgtgtgtgtaaactgctgtcctggtgacttgtccctcttcttagtggaaatgcatttgagatggtgacagggctggatgaacgtgtgaccctgggagatccgggctggactgtggaccccgatgggccagtgtccttgtggcccacagcatagcactggggacagagcgctctatgcaggtgaggcgtatgagaacagcatggtaaataattgatgaagtcacatttgttcaacttaaaggattgttctttattctgaagttattttcttccttatttggatgataaaatttccttttatgtaatgaaggtaaaagtagagggcaatatttttgctttttgaaatgctcttggttgcaaaacaaaatgttggttgctgtttgtcacccccagaatttcttcttaagttcgcctgtctctgaaatcccaaagtcacggaaccgcagtctagctgtggtgcatgtttacgtattggtgagaaattcctcttgggttcttgaacagcctgtacgctggcaggcagcactgcagcatttctgctgct

SEQ ID NO: 189279 - DNA, 938 bp, Homo Sapiens
ttggatcattctatacaggaaagaagaaaagggggactccaaaacaaagcaattgtgtgactcttttagatacgaatcaggtagtgaggattttacccccaggagaagtccctctaaaagatatctacccaaaagatgttactcctccacaaacatctggttatatagaagtcactgatcttcaatcaaagaaactccgatatatccctattcccagatcagaatctctctcgccgtataccacatggctgtcgaccatttcagacacagatgcactgctggctgagtgggacaaaagcggtgttgttactgttgatatgggaggtcacatcaggctttgggaaactggacttgaacgtctgcagcgatcactcatggaatggagaaacatgattggacaagatgacagaaatatgcagataacaatcaacagagacagtggtgaagatgtaagctcccccaaacacgggaaggaggacccagacaacatgcctcacgtgggcggcaacacttgggctggcggaacagggggaagagacacggcaggcctgggtggcaaaggaggcccttaccggctggatgcaggccatacggtgtaccaggtctctcacgctgaaaaagatgcagttcccgaagaggtcaagagagctgctagagagatgggccagagagcattccagcagacgctaaaggagatccaaatgagtgaatacgatgctgcaacctatgaaaggttttcaggtgctgttcggcgacaggtgcactccctccgaatcatcctggataatttacaggctaaaggtaaagaaagacaatggctaagacatcaagctactggagaattagatgatgccaagatcattgatgggctgactggagaaaaagccatctacaaacgtcggggctgagctggagccacaacttggcatcccacaaca

SEQ ID NO: 189280 - DNA, 991 bp, Homo Sapiens
ttggctcagctctggaggccacccccaggaaggagtttgaggttcattgtcattatggccacagtttggtgcttgtgcacgggactcaaagggcagcgtcgaagctggggttaggtgtagggttgtgagcaaagctcccctgtttgtggccacaccttccctttccaaaaaggctattaattctactcacccactatttggggggatgtaaattttgcccacagactttgccacccaggtgaggtgctgtgttcatgcacggaactgatgtcattagacaccatccaaggatgggcagcctgcagtgtggccggcgactgccatccagagaaaaggcaccttgtgccacagggcggggccgacaccctgagctcacaggtggcccctgcattcaggtggatgtccatccttgaaacagcctcttctgggaacacagcactggaggtctccaggcatcagggttggccggcagggtgccctgcagcttacataaaggtcgtggcaatgtttcaatgttaaactaaactattgccttcctcttacttttcctaaaatgattttctaatgggaacagtcacttcaagttcatgacatagtttgaaggaggataattcattttttcctggttgtcactgtcttcttatccccttggtgggctgggttcatactgtgaaataaactaaaatgaaaccaaaacgttcctgccgtaaatacgtggcacagcactgcagaaaaagcagtcacctctattcgtgagtccccaagccatagcagggcgtctgtaaaagaagggaaactgcacccaggaagtggtgggcgtcagacgcatcctttcgcccgtagttcatgaaataattccggctttggtcttccagaaaatctcaacttcaccgtgcacaagtgttaccggggtctttttagtgtagccatggaagatactttccaaaaggacatcttccgatcataagtcttaggaccaaacgtgttttta

SEQ ID NO: 189281 - DNA, 1466 bp, Homo Sapiens
  misc_feature (456)..(472): n is a, c, g, or t
  misc_feature (1152)..(1163): n is a, c, g, or t
  misc_feature (1344)..(1374): n is a, c, g, or t
ctttgtacaaaaaagttggatgaagagctcccaaaatctcaaaggtggattacaggaggtggcagaacagttagagctggaacggataggaccacaacatcaggcaggatctgattcattgctcacaggaatggcctttttcaaaatgagagaaatgttctttgaagatcatattgatgatgccaaatattgtggtcatttgtatggccttggttctggttcatcctatgtacagaatggcacagggaatgcatatgaagaggaagccaacaagcagtcatgacatgaaatagtccttttatttttatttcgagctacacacatgcttgtatataggttttatctctggttgaatccctcgaacaatagacagtacctttcccccccctttcatggcccattttattgtctgcctttcagtactaagtatgaccgttcctatctcagatcttaatnnnnnnnnnnnnnnnnncgcattcaggttaaatttggccttaatttaatatacttgttagcaagcgtgtgtgacagagagtggggaaagctacatcattgaatattttgataaactttaccgacttgagtttggtttatttttcccttttcctaaaattaactagcactgactgtaatttatttccctgtttcacgtctctcccttccattctgcaggagttttagctatttgagatcgtggaccatcagttttgcactttagagagtgtttctgactctaaacctgttttatcagaaaatttgttttttcttgatcttagctggaaaaatctgccaactttacacagtatttacttggttttgacccacagaatatagcacgttgtgcaaactgtcgattcagcgaaacttaaaaaagacaagaaactactgaggagcttagtaactgctgtttctgtacgtagtgtttaatcttccaagcacatctagtgtctgtcagtttctaattggcatgtgtaggctgctctgtgactgaagaattttcaaaccagctttacacccttcaggaaaaatcccttgtgattggatgtttactatctgccaggaaactggtactcaagatgttgaagctacagttattttatgatagcacacttcccttgatctgcttatttttattccatcaccatttacccnnnnnnnnnnnnaaattttgtagccattcttatgatgctcttgatttgttggttacacaaatcaattttattaaaaatccaaagataagtctttaggtatattttgtaccaaattaaattagaagacaaaaattgtgctttcatagttgctacaaaggtaaataatggagagatttggtacaaaacaacaaannnnnnnnnnnnnnnnnnnnnnnnnnnnnnngctgataaaattacctgaggagtgtaatgcttatttttttgtgtatatctttgcaatctattttatatatattgacaaaagagactgtgaaa

SEQ ID NO: 189282 - DNA, 888 bp, Homo Sapiens
  misc_feature (514)..(524): n is a, c, g, or t
ctttgtacaaaaaagttggcctcactggaagaacttcacagacaaatgctactatttttcagttgagaaagaaatttttgaggatgcaaagcttttctgtgaagacaagtcttcacatcttgttttcataaacactagagaggaacagcaatggataaaaaaacagatggtagggagagagagccactggatcggcctcacagactcagagcgtgaaaatgaatggaagtggctggatgggacatctccagactacaaaaattggaaagctggacagccggataactggggtcatggccatgggccaggagaagactgtgctgggttgatttatgctgggcagtggaacgatttccaatgtgaagacgtcaataacttcatttgcgaaaaagacagggagacagtactgtcatctgcattataacggactgtgatgggatcacatgagcaaattttcagctctcaaaggcaaaggacactcctttctaattgcatcaccttctcatcagattgnnnnnnnnnnngcactgaaagccaattactgaaaaaaaattgacagctagtgttttttaccatccgtcattacccaaagacttgggaactaaaatgttccccagggtgatatgctgattttcattgtgcacatggactgaatcacatagattctcctccgtcagtaaccgtgcgattatacaaattatgtcttccaaagtatggaacactccaatcagaaaaaggttatcattggtcgttgagttatgggaagaacttaagcatatactgtgtaaacagtgccatacatttctaaaatcccaagtgtaggaaaaatatgcagacatacagatatataggccaactattagtaatatatgaaatatacttaaagag

SEQ ID NO: 189283 - DNA, 1273 bp, Homo Sapiens
ttggctctcgctggctgatgggcgggaccgccccctgcggcgcctggaccctgggctgatgcccctgcctgacacagctgctggcctcgagtggtccagcctggtgaacgcagccaaggcatacgaagtgcaaagagccgtctcactcttctctctgaacgacccggccctgagcccggacatcccgcctgcacacagtcctgtccacagccacctgagcctggagaggggacccccgacccccaggaccacccctaccatgagcgaggagccacccctggatctgacaggcaaggtgtaccagctggaggtgatgctgaaacagctgcacactgacctgcagaaggagaagcaggacaaggtggtgctccagtcagaggtggccagcctgcggcagaacaaccagcggctgcaggaggagtcgcaggccgccagcgagcagctgcgcaagtttgcggagatcttctgcagggagaagaaggagctctgaggtgggaggccgccgcccgccttcgctccttcccctcaggccgtggccctgctgcctctctccctccactcagctcccagctgccggtgtgaccaagatgacccatccagggccctccccatggacacggaaactccgatggcctcactagggctgtgagtcagggtcagcgcgcacagccctcatgccccagagggcgaagtggtctcaggcctccctccaagctgcccagctgtggtcccggtgagctgggctgtgcttacaccgctcccgggcctgccccgctgtccccatctagcctcttcctgggaccagcccttcgaagctgatggggacggagagaggagccagtctccagacgcctcggctccaggaggtcacacagcaggtttctgcaccacgcacaacaaagttgcggcttgtggggccgaggcccctgcatgaaaagtacagcgtgaaagcaaccctttcttccccacacccagagaggtgaggcccgcgtggacacagaccagggcgcctcggtccctagcacgtgaagctccaaaaagcacgaacatgatcccctccctaaccccctcctcacaaaaagcaaccaggagcactttcttaaagtttaaattattttcttggggacctgaggatagagagaagcaaggctagcctcctgagccgatttatttgaaagagaaactctatttgggatctccaggacgatttatacgatcttttctctatcactcctcttccaccagaggccactgcaccctgggctaaggggtc

SEQ ID NO: 189284 - DNA, 784 bp, Homo Sapiens
ttggatcattttgtgctgctccaacaccagcagggtatctcccaataaagtgttcctaagcagcctgtatactgagtgcaagcaggctatcaattttaataatagtccataccatgtatgtgtttctgtcagcagaatgtacatgttgtacaaaacctccaggttccttaagctttttgctgtccatgaatcctctgtggcaactgtaatcacagagccagaagccagagggccagggatatgagaggctgacaaacatcaggggacatctggggaggagatccctgtcatgtctcttgtgccatggagctattatggctggtcttccatttgctttttctttaagtgaaaaccatttttctactttgcttttctctccatacttaaatggtcagtagctactgagtggtgctttatctgaataggcctggatcgaagtaaaatagaaatgggactggctttccacaggaagtaaactgcttcagagcccacagtcccctgctcagtgtccggaaagaagtcagtcatccctgttggcagtaaatcttcccacaggccgtccattagagatttaactagatatgttcaatagaaagagtctgaggcaagtggaaatgaggaacggaaacttaggttgggagaatattttctttttattcattctgtttgcttaattcagagtacagtttgtgctatttcatatctgtactccaggcagaaatataacttgaaaatactgtgtctaaagaaatttcagtgttctatcattaaattatttactaat

SEQ ID NO: 189285 - DNA, 1881 bp, Homo Sapiens
  misc_feature (1237)..(1245): n is a, c, g, or t
  misc_feature (1683)..(1725): n is a, c, g, or t
ttggctaacctgcgcttggctaaggtccgcgggaacccgtgagccaccgagagagcagagaactcggcgccgccaaacagcccagctcgcgcttcagcgtcccggcgccgtcgcgccactcctccgatggccacagatgtctttaattccaaaaacctggccgttcaggcacaaaagaagatcttgggtaaaatggtgtccaaatccatcgccaccaccttaatagacgacacaagtagtgaggtgctggatgagctctacagagtgaccagggagtacacccaaaacaagaaggaggcagagaagatcatcaagaacctcatcaagacagtcatcaagctggccattctttataggaataatcagtttaatcaagatgagctagcattgatggagaaatttaagaagaaagttcatcagcttgctatgaccgtggtcagtttccatcaggtggattatacctttgaccggaatgtgttatccaggctgttaaatgaatgcagagagatgctgcaccaaatcattcagcgccacctcactgccaagtcacatggacgggttaataatgtgtttgatcatttttcagattgtgaatttttggctgccttgtataatccttttgggaattttaaaccccacttacaaaaactatgtgatggtatcaacaaaatgttggatgaagagaacatatgagcacatgagttaagattgtgactgatcatgatttatttgaagatggagcactgctgatttatgaaggaaaaaagaagaattttctaaagattacacatatttcagaaagactttacccaattcagttgtcagacataatgatttatttgaaggcttgttttatttgaagaaaagcatattgccaaaaattctggttaaaagcttcctaacgggtaacagaccatgggagagatatgtggttgggtaatgcaaatgtagttatacaaagaaaaatacagatgtctccagacctgaggactttttaatagggcagttgttgtgttggtggcacattggatatttctaacatgtacaaagctatgtattttgatttactttcatttcttgctatgtatatgtacttttcttaaaatgccaagaactttctcttgctatcattgctccttttgaaacaattcaattttcatgtctacagctgactgttttgttaagattgagtcatcgacattcaggatttaagtctgaggtagtcaaccctcagggnnnnnnnnntggcttatctgaaatcagtactgtggaaatgaactatattagctattatgaataatgtccagtataagaatatgcttctggaattgagttctccttttaagtaccaatgatacttaaatttctcagaaatgtaatggtgtgtcattgccttgaaatgcttgcttagggcttcttttatgttatcttaaaaagtgctggtgaattttccattttttacatccatttcacatgtaagagacaaaaaagtctaaattggtcttgatattgagataataaaaagtaagtagcattaagaaaggtaacaatcttcattctacagatgaactcattgaaacaatttaggggaatgaggggcaaaaggggagaaatactgctaaagaacatgagcataaaaatgcgtgcgtttcagtgtttaagaaggcttgataaagaatgtcnnnnnnnnnnnnnnnnnnnnnnnnnnnnnnnnnnnnnnnnnnngataagtaaaccaaagaatatttgtatttcaagcagtttgtgtggtgtttctatataattttctgtgtataaataataaagtaggcatttgtttattttgtaaaaaagaaatgaaaatctgctggccagctatgtcctctaggaaatgacagaccc

SEQ ID NO: 189286 - DNA, 783 bp, Homo Sapiens
  misc_feature (108)..(117): n is a, c, g, or t
  misc_feature (555)..(597): n is a, c, g, or t
tgtacaaaaaagttggattcaattttcttgatacaaacagctgactgttttgttaagattgagtcatcgacattcaggatttaagtctgaggtagtcaaccctcacgnnnnnnnnnntggcttatctgaaatcagtactgtggaaatgaactatattagctattatgaataatgtccagtataagaatatgcttctggaattgagttctccttttaagtaccaatgatacttaaatttctcagaaatgtaatggtgtgtcattgccttgaaatgcttgcttagggcttcttttatgttatcttaaaaagtgctggtgaattttccattttttacatccatttcacatgtaagagacaaaaaagtctagattggtcttgatattgagataataaaaagtaagtagcattaagaaaggtaacaatcttcattctacagatgaactcattgaaacaatttaggggaatgaggggcaaaaggggagaaatactgctaaagaacatgagcataaaaatgcgtgcgtttcagtgtttaagaaggcttgataaagaatgtcnnnnnnnnnnnnnnnnnnnnnnnnnnnnnnnnnnnnnnnnnnngataagtaaaccaaagaatatttgtatttcaagcagtttgtgtggtgtttctatataattttctgtgtataaataataaagtaggcatttgtttattttgtaaaaaagaaatgaaaatctgctggccagctatgtcctctaggaaatgacagacccaaccaccagcaataaacatttccattgtcc

SEQ ID NO: 189287 - DNA, 930 bp, Homo Sapiens
  misc_feature (620)..(708): n is a, c, g, or t
ttgggttgatttcagatgtaaaagtcaagagaagactctaaaaatagcaaagatgcttttgagccagaatgcctccatcgtcagatcacttaatttggttctcatggtgtatatcagcctcgtgtttggtatttcatatgattcgcctgattacacagatgaatcttgcactttcaagatatcattgcgaaatttccggtccatcttatcatgggaattaaaaaaccactccattgtaccaactcactatacattgctgtatacaatcatgagtaaaccagaagatttgaaggtggttaagaactgtgcaaataccacaagatcattttgtgacctcacagatgagtggagaagcacacacgaggcctatgtcaccgtcctagaaggattcagcgggaacacaacgttgttcagttgctcacacaatttctggctggccatagacatgtcttttgaaccaccagagtttgagattgttggttttaccaaccacattaatgtgatggtgaaatttccatctattgttgaggaagaattacagtttgatttatctctcgtcattgaagaacagtcagagggaattgttaagaagggagaagatgagaaactagacatcagtnnnnnnnnnnnnnnnnnnnnnnnnnnnnnnnnnnnnnnnnnnnnnnnnnnnnnnnnnnnnnnnnnnnnnnnnnnnnnnnnnnnnnnnnnacccgaaataaaaggaaacatgagtggaaatttcacctatatcattgacaagttaattccaaacacgaactactgtgtatctgtttatttagagcacagtgatgagcaagcagtaataaagtctcccttaaaatgcaccctccttccacctgggccaggaatcagaatcagcagaatctgccaaataggaggaatattactgtgtttttgatagcattggtc

SEQ ID NO: 189288 - DNA, 1611 bp, Homo Sapiens
  misc_feature (285)..(331): n is a, c, g, or t
ctgtcgagtgcatacaacttgcacagggatatggggtggtggttgctgggcagctgacatcttagcggcccataactgaggcggcttgataggtgctacaggtggtttggattggatgggaattggtggcttaggggctgcatcaggtggaagagacaagggtgaagactgaagcatgggctgaacgaccagggtttgggcttgctgctgggactgggaaggtgggacctgctgagtaggtgggacctgtggtggctgaggggcagtgagggtggtggcttgcgnnnnnnnnnnnnnnnnnnnnnnnnnnnnnnnnnnnnnnnnnnnnnnngccaactggaggtgtgtagctgtgtgaaggagctgggactgccggtgctggaactgctgctggtggtggatggcaatctgctgctggatcaccacctgtttctgctggaggtggatctgttgctgttgctgaatcagtgaatggggctggatctgtgtgtaggtggctgagctaataagtgtctggctgggcgcaggtgtggctgtccgtgtcaggttcatgcccacattctgctggccactcccatctgcttctgccttcttggctgctgcactttctgcctctgtctggctgccctggctcacagtcactgtttgggctgcaggcaagggctgcaccactcctgtacccttcctgggacagctcccaccacccattcctgaggaaggcaactgacccaaaccaccatgtgcctgcccacctccacctggacccatggaccctgggatgctattcccactgcctccaccagcttgactaaggttgagggactggtttgtggccccagaggaagcctgtgccaccgctagggcctggctagaggcctgggagaggctagagacaggggaggctcctggaggaatggccttctgagtggagccttgcatctgaggtccttgagctgaggcctgttgattccttactgccaagttctgaacctgatctgcatctgcatgaactccaggagactgagcagatggcacctcctgctggactgcagccaccgccccattaggcatcaggatgagttgggaggctagaggcacattccgacccagggttcggtttacctgcaataggtttcccagctgtggccgtagatacatctgggcctgagactggttgaggggtggggaggtggtgttccccagtagcacagattgggtcaaggtggtagcactaggagagctcacactctgggatcggctgatgagctgggcggccgatgtggtggccagattgatcgaggcctgggtggtggtagtctgctgctgtgtagtgctggtgtttggggagctggcctgccgactggcagcaattgtggcctgctggacggcagccaggctatgcagctgggcattactgagctgctgctggagcatgaactggtggaaatactgagctgcattgggctgccgctgcagtgcttgcagagcctgcactgcttgtcgttcatatagtgacatttgagctatctggggccgagagctgccccctgagctagaactcccattggtggaattggagttctgctcgctctcagtctccatgatagccaa

SEQ ID NO: 189289 - DNA, 740 bp, Homo Sapiens
ttggattataactgttggcttttctaatcttgttaaatatatctatttttaccaaaggtatttaatattcttttttatgacaacttagatcaactatttttagcttggtaaatttttctaaacacaattgttatagccagaggaacaaagatgatataaaatattgttgctctgacaaaaatacatgtatttcattctcgtatggtgctagagttagattaatctgcattttaaaaaactgaattggaatagaattggtaagttgcaaagactttttgaaaataattaaattatcatatcttccattcctgttattggagatgaaaataaaaagcaacttatgaaagtagacattcagatccagccattactaacctattccttttttggggaaatctgagcctagctcagaaaaacataaagcaccttgaaaaagacttggcagcttcctgataaagcgtgctgtgctgtgcagtaggaacacatcctatttattgtgatgttgtggttttattatcttaaactctgttccatacacttgtataaatacatggatatttttatgtacagaagtatgtctcttaaccagttcacttattgtactctggcaatttaaaagaaaatcagtaaaatattttgcttgtaaaatgcttaatatcgtgcctaggttatgtggtgactatttgaatcaaaaatgtattgaatcatcaaataaaagaatgtggctattttggggagaa

SEQ ID NO: 189290 - DNA, 828 bp, Homo Sapiens
tgtcaaagaaagcaaacctcctgcctccagaatgaaggagaataatgaaagttctcagcatattcacaatgcgctgaccgaagtttgcatgaggtagacacgaatggcattggcggcagcaccacacagaaacacggcactgagccctaggcagaggcgggtcaggttgtcgctgtagtccacagtggggtttggtatagatgacatcaatgatcttccccaggaagaaaggggcagacatggagataacactggacatcgtgagaaatccaaccgcagctgccagcctccggcgctcagggtacgccagccccaggagcttccgggcctccgggagtccggccgctgcggggcgcagccgccccttgtccccgggaggcgccgccggcccgcgccgccaggcctcgtcccctgcccaggcagcggctgcgggaccgcccgggaaccgggcgcgcgggagccgaggagcgcctggcccggcaaaagccccgcacctgcagctgccggggccgcgagcccacagccccaggagccgcgcgaggcccaggacgccccgcgaggcgcccggacccccgccccggcagccgctcctccagcggcgcgcggctccaacgccccagagcagcgcgggccccgcgccccatagccgcgccggcctcaggccagtgaacggcgatagggacccgggaacgcggctggccgcggcccacacgcaggctaccggcaggagccgacctggctcggcagggctcggtggctcgagcagccgcagcggccaggcaggggggcctcgcatggcgctgcgtgcgacccgtacgcctcagccaa

SEQ ID NO: 189291 - DNA, 458 bp, Homo Sapiens
  misc_feature (130)..(188): n is a, c, g, or t
ttgggttgaaccaaaataataaaataattaatttaaacaatgtcaaaatcctttagcagttatgtatatattttctccattgtgtgtttaaattgtcatgtccagttgccaagcacaatgaaaaagatgnnnnnnnnnnnnnnnnnnnnnnnnnnnnnnnnnnnnnnnnnnnnnnnnnnnnnnnnnnnagtatgatatttttaacaagagtctataggcaaacaatatagggtgtgctgtgcattgtcagccctatactgtggtcttaataatgccagcttaaaaatcactgttgtgctctgcatttcgtgtgttagaagctgattctaggctgaggaaagcaagagttctctacttttgctcaatattgaggcttacccagtttgactctacagctagtgaagtggtttattgcttcaataaaaatatacttgaatgatgaatttatttatgttttg

SEQ ID NO: 189292 - DNA, 900 bp, Homo Sapiens
gctgagaaccggggctaactcttccctcagagttccacgcgcgcatcgcggtaggcccggtccagagcccactcgggctgtgagtcggtgcccccttctcgggcaaggcgggccatctcctgtggaacagcgcttgccgcgctcggctggggtccacattaatccagttgttggcaatccacttggtgccgcgcgtgaccaggcagcccccgtgcagcgagtagtcgtctacgtcacccacccaaccttgcccatcaggcaggtagttgtaccagaagactgctgtgccctgttggggcttgacacgcaggtttcccttgtcacagtgcctccgtgtgtcacggaggtccacgtcatcctgaatcagactctgtgggcagcagggtggtggggtgttcaacctgtccccactctatggccaggccagccaagggtgaccaaagggaaaccaaccagatatgcccaaggaataatttgggcccacatccttagacctggagaggtgtgtacttcacttgtctaagcccctgccagcccacaagagtaatagcccagttgacccttaccatttcatcgtaggttctgttatctgctacagggaaaacagtctcgcccccaccagtgacgttgttcaaataaaacagcactgtcatgtagctgtaaggcagggggggcactgagcaggtccccagttgtggatgctcccaggggcttacctgtgggcaggataagctgcccaggttcctgttgccagggaccaggacagactaggatgggagacaatagggcaggccagtgccaaaatgtccctagcccctccttccccgaaacccagtctcttactgtgagttgcaatggttttttggccaagatcacaggtgccaacttttttgtacaaag

SEQ ID NO: 189293 - DNA, 626 bp, Homo Sapiens
ttgggcaagaatgaagatgaagccccactgctcggtcagtctgcctccgtgtgtcctctgaaataagcagatgaagatgaaagggcaactttgttttcttctttttcctgatgtgaatgttaagcagaagggagagagtccttactcccttccaatctctgttcagtgcaaaacccagaaacatgaacagatacgattgtgggattttatcatctgtgtagtaggtgtgtgtatgtgtttctagagtgagatttgtgttttctgcccttttcctctccagccaatgggctggagctgggagaggtgctgagctaacagtgccaacaagtgctccttaagcctgcgaggcccaggcctgtggggctggttctcacctttgacagctgaatgttcctaaagaactgctgccccacagtgagggtgggagcagcggaacagggaatgccagacacaggctcgctgctgctggaaggcggggtgggacttccttcctctgtccggagaggcacaggtgtcaccagttccagccaaaggctcctcacaggcgctgtgaatttttgtacaagtcttgtaattatcgaatcaacaacttgtttcaatttaataaaaatgctcatgggaagtgc

SEQ ID NO: 189294 - DNA, 2211 bp, Homo Sapiens
  misc_feature (575)..(684): n is a, c, g, or t
  misc_feature (737)..(869): n is a, c, g, or t
ttggtggctttctccattcagcatgattcccatgagatccatccaagttgttgagattatcgatagttcattccttgttattgctgcattgtgtcccatggtacaggtgtaccatagtttgtttagcagttcacccactgaagggcatttgagttgtttccagtttttggctattacaaataaagctgttatgaatatttgtgcacacagacatacattgtgtgagcataggttttcatttctctgggataaatgcccaagagtggaattgttgggtcataagttaaatgcatgtttagctttttaagaaactgccaaactattttccagtgtggctgtaccattttatattccgaccagcagtatatgagtaatatcacttctccacagccttgccagcatttgatgttgtttttacgtttcactttagtcatgctgatgggtgtgtagtgatacctcattgtggttttagttgacatttctctaccggctaatgatgtgaaaacatcttttcgtgtacttatttgctatgtgtgttatcttctttggtgaaatgtctgtcttttgccttctcnnnnnnnnnnnnnnnnnnnnnnnnnnnnnnnnnnnnnnnnnnnnnnnnnnnnnnnnnnnnnnnnnnnnnnnnnnnnnnnnnnnnnnnnnnnnnnnnnnnnnnnnnnnnnncatttttatagtggcaagttctcactatattattatcatgagaatataccatnnnnnnnnnnnnnnnnnnnnnnnnnnnnnnnnnnnnnnnnnnnnnnnnnnnnnnnnnnnnnnnnnnnnnnnnnnnnnnnnnnnnnnnnnnnnnnnnnnnnnnnnnnnnnnnnnnnnnnnnnnnnnnnnnnnnnccaaagaagccctcgaaaatactgaagttcctgttggctgtcttatggtctacaacaatgaagttgtagggaaggggagaaatgaagttaaccaaaccaaaaatgctactcgacatgcagaaatggtggccatcgatcaggtcctcgattggtgtcgtcaaagtggcaagagtccctctgaagtatttgaacacactgtgttgtatgtcactgtggagccgtgcattatgtgtgcagctgctctccgcctgatgaaaatcccgctggttgtatatggctgtcagaatgaacgatttggtggttgtggctctgttctaaatattgcctctgctgacctaccaaacactgggagaccatttcagtgtatccctggatatcgggctgaggaagcagtggaaatgttaaagaccttctacaaacaagaaaatccaaatgcaccaaaatcgaaagttcggaaaaaggaatgtcagaaatcttgaacatgttctgatgaaagaaccaagtgacccaaagtgacctggacaagattcatagactgaaagctgttgacatcgttgaatcatatgtttatatattgtttttaatctgcaggaaaatggtgtctctcatcatttgctctgttaagggaacaaattagcactttttagaagtctgacaattgtaaacagttattagcttttccagaagctgattcccattttaagatgggggaaaattaaggtttgaggttttagaaattagcaagtagtgcatacccttctagccacaagtgcccagtccaggcaagtgctgacttcttagagaatgtgtggccagacccagggacctggagtgtgtttggactgcagtttgccaccctgagaacaccttctccaggactggcatttcagaatcagattcttcattttttgcagctacgatgttcttccagggcactgggggctgtgacttctctctaaattgtatataagttgtgtatatagagaccataattatatggtccttagaaaagactttgcttttataaagcatttagaaaaaatgcatacttttaaaacaagtgcttgagttgtcacttaaaaattatagcatattgctataataaaaccttatttatgtcttatttgaaagatgaatagtcttaaaagataaagacataaatgggacaattgttattgagcaaaaaaccaattatcccaccctcatggagcttatattctagcaggggagatggatatgatagattacacagtttattggaggacataagagttatggcaaaaagcaaaggatcacagggtaaggggatagtgccatttggtgtgagaatgctgactgaaaa

SEQ ID NO: 189295 - DNA, 1173 bp, Homo Sapiens
ttggcaacgatgtgggctcagcagccctggagtaggagctgggaaggtcagtgccttggtggcggcagggccagggcactgagagtattggcagggcacagcaggggaaagggaagagaagcagagggtgggactctccctctgtgctggaagagggctaacaccagcccggactctccactctggctaggccaagggggccctctgtcctctgtgttgccctagggctcggtgacctctgtcatagcactgaccacatggtatcctgcctgtgccttcctctagctgtccccgccctactccggaccgccccaaagactccatgggatggacctgagtcagccgaatcccagccccttcccttgggcctgggctgtggtgctggacatcagtgacagacggaagcaggagaccatcaaggctacgggaggcccggggcgcttgcgaagatgaagtttggctgcctctccttccggcagccttatgctggctttgtcttaaatggaatcaagactgtggagacgcgctggcgtcccctgctgagcagccagcggaactgtaccatcgccgtccacattgctcacagggactgggaaggcgatgcctggcgggagctgctggtggagagactcgggatgactcctgctcagattcaggccttgctcaggaaaggggaaaagtttggtcgaggagtgatagcgggactcgttgacattggggaaactttgcaatgccccgaagacttaactcccgatgaggttgtggaactagaaaatcaagctgtactgaccaacctgaagcagaagtacctgactgtgatttcaaaccccaggtggttactggagcccatacctaggaaaggaggcaaggatgtattccaggtagacatcccagagcacctgatccctttggggcatgaagtgtgacaagtgtgggctcctgaaaggaatgttccagagaaaccagctaaatcatgacaccttcaatttgccatcgtgacgcagacctgtataaattaggttaaatctgaatttccactgctttggagagtcccacccactaagcactgtgcatgtaaacaggttcctttgctcaaatgaaggaagtaaggggtggggctttccttgtgtgatgcctccttaggcacacatgcaatgtctcaagtacttttga

SEQ ID NO: 189296 - DNA, 1282 bp, Homo Sapiens
ttggggcggggccgcggcggcgcgcggaggccgagctcggctgggcttggcgaggctgcggcgcggccaccagcgggagtgcagcggccactgtacccagagattcaaaaccccaaacccgggacttgggggcgctgagccgggccgggaagcagagcctggtcgtgaggaacagccgcccgttgctgtctgcccctttgcggacagcgtctccctcgactccgcttaggaagtggtgggggcggcgtggcccccgtcgggaggcgttcgaacgcccgctaggagagagaaaggattcccctgtgcttggagcccgcactcgggcgcggagggagcggcggcaggctctcgctttcggcaccatgggctgcacgctgagcgccgaggacaaggcggcggtggagcggagtaagatgatcgaccgcaacctccgtgaggacggcgagaaggcggcgcgcgaggtcaagctgctgctgctcggtgctggtgaatctggtaaaagtacaattgtgaagcagatgaaaattatccatgaagctggttattcagaagaggagtgtaaacaatacaaagcagtggtctacagtaacaccatccagtcaattattgctatcattagggctatggggaggttgaagatagactttggtgactcagcccgggcggatgatgcacgccaactctttgtgctagctggagctgctgaagaaggctttatgactgcagaacttgctggagttataaagagattgtggaaagatagtggtgtacaagcctgtttcaacagatcccgagagtaccagcttaatgattctgcagcatactatttgaatgacttggacagaatagctcaaccaaattacatcccgactcaacaagatgttctcagaactagagtgaaaactacaggaattgttgaaacccattttactttcaaagatcttcattttaaaatgtttgatgtgggaggtcagagatctgagcggaagaagtggattcattgcttcgaaggagtgacggcgatcatcttctgtgtagcactgagtgactacgacctggttctagctgaagatgaagaaatgaaccgaatgcatgaaagcatgaaattgtttgacagcatatgtaacaacaagtggtttacagatacatccattatactttttctaaacaagaaggatctctttgaagaaaaaatcaaaaagagccctctcactatatgctatccagaatatgcaggatcaaacacatatgaagaggcagctgcatatattcaatgtcagtt

SEQ ID NO: 189297 - DNA, 785 bp, Homo Sapiens
ttggccttggccttgaaggtcatgccagacagctggaggggcctggtgaccaggaccgtgaggcagcatctcaatctaaacaacgcggagcagctgtgcagataccagggtcctgtactgctgatccggagaaccaaggatgagatcatcaccaccacggttcctgaggacatcatgtccaaccgaggcaatgacctcctgctgaagctcctgcagcatcggtatccccgggtgatggcagaggagggtcttcgagtggtggggcagtggttggaggcctcctcacagctggaggaagcctcaatttatagccgatgggaggtggaagaggactggtgtctgtctgtcctccgctcctaccaggcagaacacgggcccgacttcccctggagcgtgggggaggacatgagtgcagatggacggcggcagctggctttgtttctggctcggaagcatctgcacaactttgaggccactcactgcaccccactcccagcccagaacttccagatgccctggcacctctagggaccaactgggactcattatggaagaatggggtgagaggagacatgaggaaagaccctcttatttgtgattctctgtgttcatgttgctgtttatagtttgtggaaagtgggggaccatcccccttctcaccactgttcctcttgcacgtttcccctcattcatgtggctgtacttaaccttctccaacatacatcctgcattacatgaatggattattcctaataattaataaaaaggtattttttctactatca

SEQ ID NO: 189298 - DNA, 1753 bp, Homo Sapiens
tgagcaatgcttttcctttaatagccaactttgtacaaaaaagttggctgtgaataacattaaatcgttacccattgctacgaaagagcagcttgagaaacacaatgatatttgtgccatctgttatcaggacatgaaatctgctgtgatcacgccttgcagtcattttttccatgcaggctgtcttaagaaatggctgtatgtccaggagacctgccctctgtgccactgccatctgaaaaactcctcccagcttccaggattaggaactgagccagttctacagcctcatgctggagctgagcaaaacgtcatgtttcaggaaggtactgaacccccaggccaggagcatactccagggaccaggatacaggaaggttccagggacaataatgagtacattgccagacgaccagataaccaggaaggggcttttgaccccaaagaatatcctcacagtgcgaaagatgaagcacatcctgttgaatcagcctagaggagaagcagcaggaatgatgctttgatactctggaggagaagttaactcaagatggttcatgttctgatttgaggaatgaaaatgagatgatcaggcaggaaactgacattccaaggatctaatccaggaagtactctcagtggggaccacctgctttcatcccctgacattgtgggagaaattttgcaatgtatgctaatcaaaatgtatttatatgttctctgctgatgttttatagaggtttgtgaagaaaattcaacctcagcaacttcagaaactgcccctgatacgtgtgagagagaaataaaatcagattttgagtgttgaagggactgaggaagtgaggataaagagcatgaggacagcatggaaagaaggaggcagaagtggaactgaactttcactctccatgggacagatcaatctcattatcaagtctgaatagcaaccagccctctcctccaccccgtttctcctcagttaattggagctcagtcaggtgattattgagtcttgtacagcactgaaatgaaatcaaagatgaagaagcattgattgtattcaaagattgaagcacgctcatactttgtatgtgctttagggaaggggtgggtgggcacttgggccttgcgggtgcattcatgtaatctgagactcttgaactttatgacggagtcttcaatattttgatgtatatgaaacttttgttaaatatgttgtatacttcgctggctgtgtgaagtaaactaaaactctgatgaacactttggagtctgctttagtgaaggagaccaaagtgggaagggctttagggcactgatagaggccctgggtgtacttttcaatcctgtgtaatgtttaattcttgcaactgaatcaaaacagtgttaaattatggcaatatttgcactttgggaatgagtacataactgtatgatcacactctgcaaatgccacttttaaagctgttaatagactttgcaccttttctttgacaaggatgtgtcatatttaaatttttacattcatcatggctacaggtagaactggggaggggggaatgtaattttttatgggaattttgatatgaaaagaaactagtcatttatttatacaataggcttggctcaaaaagtgtttttcagacctcggtattcctaatgtgggatgtgactttattttatttttagtagcaaatttggatgtagactgacagacatagctgaatgtcttaataaatttaaatttgaagat

SEQ ID NO: 189299 - DNA, 933 bp, Homo Sapiens
ctttgtacaaaaaagttggctctcctggaagcacagaacggacttttcgtgtcccgctgtaaggaaacaagatggtccttaaaaccgaagaggaggacgttcccagtgacctgacagcagaggagcgtcaagaactggagaacatccgacggagaaaacaggagctgctggctgacattcagaggctgaaggatgagatagcagaagtagctaatgaaattgaaaacctgggatccacagaggaaaggaaaaacatgcagaggaacaaacaggtagccatgggcaggaaaaaatttaatatggaccctaaaaaggggatccagttcttaatagagaacgacctcctgaagaacacttgtgaagacattgcccagttcttatataaaggcgaagggctcaacaagacagccatcggcgactacctaggggagagagatgagtttaatatccaggttcttcatgcatttgtggagctgcatgagttcactgatcttaatctcgtccaggcactacggcagttcctgtggagcttccggctacccggagaggcccagaagatcgaccggatgatggaggcgtttgcccagcgatattgtcagtgcaataatggcgtgttccagtccacggatacttgttacgtcctctcctttgccatcatcatgttgaacaccagtctgcacaaccccaatgtcaaagataagcccactgtggagaggttcattgccatgaaccgaggcatcaatgatgggggagacctgccggaggagctcctccggaatctctatgagagcataaaaatgaaccctttaaaatcccagaagacgacgggaatgacctcactcacactttcttcaatccagaccgagaaaggctggctattgaactcggtggcaggtaaagacttggaagagacgctgggttcattctgactga

SEQ ID NO: 189300 - DNA, 1317 bp, Homo Sapiens
  misc_feature (353)..(468): n is a, c, g, or t
ttttcttcataaaggcttttatgagcatattttatgtatttgtgagtttgctaaatgtctgtctgacataagctacacaagagtgaagtctgtccgtttgattcaccacaatataagcagtgtctggcacagggccctggcacatagtggtcccgctccatatccacagatgaatgagacagcccctgccctcagggatttcactgatgggtggggagacaggcaaacataactaatcatgagacagcgagagaaatgccgacccaggcatgtgagagaaaggtgagcacaacttgaggaggttaagggagggataagaaagagctttctagggctgggtatggtggtgcatnnnnnnnnnnnnnnnnnnnnnnnnnnnnnnnnnnnnnnnnnnnnnnnnnnnnnnnnnnnnnnnnnnnnnnnnnnnnnnnnnnnnnnnnnnnnnnnnnnnnnnnnnnnnnnnnnnnnagaccttgtcgccacatttttaaaaaagaaagagattactggatgaaccagaagaacttgtttagaaaagagggagatcagcaaagagaaagattccagaaaagcaaactgatgtaagctcacaaaggccacatctaccagaccaaaagttctagctttttgtgctagaaatagtaagtcattgaagaatgtcagggggtgaaaaacatgatcagagtaacatgataaaaaccttggctgcagtgtgaggggtgggttttgcacatttcacctccaggccctcattctcaatattcctgggtgaaatgccccgcccgccctcactgctctggtttcctgggctcatttcaagccccaccacctccagtctccaccttgacagtgttggtggatcgagctgcttggtgcagagtccagactgctgtgagcctgttctcttctgctactgtgtgtcttttctccctcactagactgagagcacagcctgtgtctgatgactccctatacccccatagcctctccctaacacaaagctttaagcatgaaaagtgtttaataaatgctttatataaaaatagttctacttgcagagtgtttaggaatcgctttatagagtctagctctcataaaccaatgatacctgtcccatggcatccatgatgagtgaaaccctcgccaggtgacccagcccagcggaggaaggaaggcctactacctgccctgatctcccagtgccatcactcaaagtcatcttactgtttgtgcaaggaaatgccctcctatctgccctaagacactgacagaagctgaggacttgccaaatgataaagataggaagacaggagccaa

SEQ ID NO: 189301 - DNA, 909 bp, Homo Sapiens
ttggcaatcagtcactctcattcccttttgttgccttatttttttcacagcatttcacactgtcataatcccgattgtgatttccacaccttttatacagcattttattaacataagaattatttttataaagttcttaatgtgctatagatggaaagccaactttttctcaacatttcacttttttccttctttattcttaaaggaggatcctctggatcacccttcggacatggaagaagtttgtaaaatttatgaaagaggaaagagtaaaagaagaaaggcgacagcaacttcgtaggaaggtagttgaaattcttccagacttccaggtacctggaaggtaccacgagctatatcagcaatcagatacttggtccttgagtaagacaagtctggtgaacgaatgagccagattagtgtaatatttaggacaggaagctcgactagtctgtatgtgtgttatctccacccacccacacacatacatacatacacctggtttattctctacgagctacttcttagatcaaaggaattattttgagaatttttattcccttctttgacttttcctggattgctagtcattcactatagcatttatcacagtgggatcatccaaaggaacattctagagatcgtctgttcaaatatatcctatatatttttagcatagtaaactttaaaaaggacaagtgtttgcctgactgagcctgtgaagaaaatgtgtccgtatagcacgacaggagttgctgatgtgaccttaatgaaacagaaataaacaggggtgagtgctcggaaaggaagggcgggccaaggcactcagccttctagtgcagtagcatcagtgacacgcaccccaccagacctcgtccactttcaccacccctgaaggcagaccatgta

SEQ ID NO: 189302 - DNA, 1055 bp, Homo Sapiens
ttggctcctggggctctccgtggagtcccctctcagtgtcagtttctcagcaggttgtgtggcgctgccagctttaattaacatcaaagccgtgattgaacagaggcagtgtactggagtttggaaccagaaagatgaattacctattgaagtggaccttggtaaaaagtgctggtatcactctatatttgcctgccccattcttcgtcagcaaacaacagataacaatccacccatgaaattggtctgtggtcatattatatcaagagatgccctgaataaaatgtttaatggtagcaaattaaaatgtccctactgtccaatggaacaaagtccaggagatgccaaacagatatttttctgaagagataactttagtttgcaatttgtaagtgaaactgaatcgtgggtgcatttcagaagagaacgttccatataatgcagctaaccaaggactcctgtgtttctataagctaatgctccagaaactttgccaacctgttagtgtacacacactgaggggagtgctcccggtgaatattatcatagggctttattatattcttggtcttcatttctgatcaagtaaatacaccagcagttgtcattcaatgcaggtttttgtacttaattatatggtgatttttttactttttaagagcagaaacggaaattgacctccccgccatgtgtttaatattcctcctgcttttacttttgtcattttcttgataatcgtaagccttgagagtgtttgtgaaaaagttttatttcctgttatgtatacataattaaatgaaaattcttcagaaaaagtttgataaattgaattgtggttatgaaactaatttgcatttttatttgcttaagaaagaaagctgtgatagattccatatatgctttttgatgttttcctctgctccagctcccacaactcagcacacctgcattttagctctgcatgcagccccagcaggctgcgtgtttaaaaatttcattgtttaactggctggtgtgagaagtcttccgttagcatagaatgaaaggagtactat

SEQ ID NO: 189303 - DNA, 945 bp, Homo Sapiens
  misc_feature (324)..(385): n is a, c, g, or t
tggcctttctataccatgcctgacccaagaaatcccaaacagtccaactcttacgatatgttcatgagaggagaagaaatattgtcaggagctcaaagaatacatgatcctcaactgctaacagagagagctttacatcatggaattgatttggagaaaattaaggcttacattgattccttccgctttggagcccctcctcatgctggtggaggcattggattggaacgagttactatgctgtttctgggattgcataatgttcgtcagacctccatgttccctcgtgatcccaaacgactcactccttaaattcacactttnnnnnnnnnnnnnnnnnnnnnnnnnnnnnnnnnnnnnnnnnnnnnnnnnnnnnnnnnnnnnngaaagccacacttattcttttcagtaacctgctagtgcacaggctgtactttaggtacttaaaatatgcactagaataaatttgcaaggccctaaaatatcactgttatttttggagtaattcagtataggttcgtttaaaagagatttttataacttcagacatgcatcagtaggaaataacttgagaaattcatatggttatgttacaaattcatattctgttactacagtaaacgttaagagttttaaacagttaagattgtacaatttttcttcttttctatattacaagggccccagtgttaatgtcttagattttcagtatttgaacttatttttttaaattctgtcattgagataagaataattcaggtagcatctgaaattttaatgaatgtataattggcatatcatggaaaattaaccagaaagtatcagttcttaaaagttatgcctagaaattatgtaaagctaaactactggttagaaagtattcagtgtaatattgtattaatttgttaaattctaaacttgaatttcaataaaattttaaagcta

SEQ ID NO: 189304 - DNA, 766 bp, Homo Sapiens
ttggttagattgttcagcgctcagaacaaaagtttgaaaaatgcattgttcatatgaatgtcatctcttttcagtttccagtatcctttttaaaaaatggcaaaagcctagatttacaatttgatgaacactaaatatttcttattaatataatctatttttgtattttacttaatgagctttaagtgcctgtcgttctgaaaattgtgtatttataattcagcttatctcataattggacctaatagcatttctttgtgcagttaggtgatgagcactgctttgaggcccaagcactagtagagatgcgcgatacaggtctagtttcggtaactgttccagacatcaagcaataaaaaaatgaataccacaaaagatgtttgattttacagtggagccttactgaaccagcattcagaagtttaaggtcctcctaggtatgagtatttttagtagtggatcactgtggacagggtgcagctctaccagttcctgtttcttctgagccagaccctcttcagggaagggaccaattaattttaaaactcacttgaagcacagctggtcatggggcttggtataaagttcctatttccaccctgatacttccaattcctggaaccccagcccactcccccatccctcctccctatcaaactagtataatgattttgaatcggtacagtgtgtttaactgtaactaagttcgacagactattattatctttgtaataaattaacctagcaataaaaattattctgtttc

SEQ ID NO: 189305 - DNA, 1386 bp, Homo Sapiens
tgtacaaataagttagatcaagatagccttaaccaaatcagtctttgaaaaaacaacagttcttggttggtctacgtgaatacagggtctcaagacctaggtcaggactaaatcatgttacattttcttttgtcctgatggaaagttactaggaatgaccaggaattttagtgtaccatgggaagtagataaattgggaaatctggaactaagaaaattttctttgaacatatggtaataattgtggttccttattatccttcatttgtacatctttgtttctttcctattctttacggtatagggtaaaccccagacattggctgtcaaacgcaaggctgactctgaggaggagagagatgatgtctccacattgggttcaatgcttcctgccaaggcatctccagtagcagaaagcccaaaagtcatggacgagaagagcagtcttggagaaaaagctgaatcagtggctaatgtgaatgctaatgctccaagcagtgaactagtagccttgacccccgccccttcagtaccgcctcctacactagccatggtgtctagacaaatgggtgactcaaaacccccacaggccatcgtgaagccccagattctcacccacatcattgaaggctttgttatccaggaaggagcagaacctttcccggtgggttgttctcagttactgaaggagtctgagaagccactacagactggccttccgacagggctgactgagaatcagtcaggtggccctttgggagtggacagcccatctgctgagttagataagaaggcgaatctcctgaagtgcgagtactgtgggaagtacgcccccgcagagcagtttcgtggctctaagaggttctgctccatgacttgcgctaagaggtacaatgtgagctgtagccatcagttccggctgaagaggaaaaaaatgaaagagtttcaagaagccaactatgctcgcgttcgcaggcgtggaccccgccgcagctcctctgacattgcccgtgccaagattcagggcaagtgccaccggggtcaagaagactctagccggggttcagataattccagttatgatgaagcactctctccaacatctcctgggcctttatcagtaagagctgggcatggagaacgtgacctggggaatcccaatacagctccacctacaccggaattacatggcatcaaccctgtgttcctgtccagtaatcccagccgttggagtgtagaggaggtgtacgagtttattgcttctctccacgctgccaagagattgcagaggaatttcgctcacaggagattgatggacaggctcttttattacttaaagaagaacatcttatgagtgccatgaacatcaagctgggctctgctctc

SEQ ID NO: 189306 - DNA, 814 bp, Homo Sapiens
ttgtacaaaaaagttggattttcacatctctttaaaatatacctcagcatattttattgctgtgtgttgacacaatctggtataaaaaactttctctggattcagaggaagtttgaggaatcaggagaggaccaggccttctcctgtgcctgggtgaaggtacagacctcgctgtgtctccgatgaggtcagaagtgtctctatttcataccacaaaggaacccaagtgggagtagggaacagatggatggcgcgaagacctctgtgtctccccagagaaaggaagaaacttaagaaccatcatagcctggtcctccaacatcttacagatcatgttttccaagagaaaagcctgtgttttcagaaactctgaattcagaaaaagaaacggaatgtgcgtaagaatcaggccactgcctggaaagactttctctcaattcgtagcctgaggctcagtgaaggaaacatgcagaaagaatgcctgagacgcccccagggaataagggaactctttataacctgtccagtgctgtcatctgggatttttctctgaagtacaagaatttcaggtgatttaagctgcttgatcacacttatttgtgcaaaattgattttcatttaatgttaatgttttcctgcttaattttatataacttcagaatgtaaagagcttccaggtaaattacaaggtgtttaacctggggagttaaaatgtgtacacttgaattaataggagcaccggttgttgctagtataaagtaatttgtgtggcagtttgtactgtgctgagtttttaaaataaacccaatatttt

SEQ ID NO: 189307 - DNA, 663 bp, Homo Sapiens
  misc_feature (91)..(109): n is a, c, g, or t
  misc_feature (286)..(312): n is a, c, g, or t
  misc_feature (380)..(425): n is a, c, g, or t
ttgggttacaataaaccggagagaaaaggtccgcttgcacttttttagttttcttatttttagacacccctcccctccagggtgatctttnnnnnnnnnnnnnnnnnnncacgacttttccagcgctcagcgttttttcctttcgtccgaagccgttttctgatttgacttttctcgccggccggtctcaggccgcacagacgttccagaggaggagggtgacatttttactccctttttggggctaaccatttatgcttttgtacatcaaccgtgcgcggccggnnnnnnnnnnnnnnnnnnnnnnnnnnncgttccaatcaaatttctaactttctgttaattattaatcccctttttactgcggtttctgttgtcannnnnnnnnnnnnnnnnnnnnnnnnnnnnnnnnnnnnnnnnnnnnnacctcttgtgtatatgtagggaatttatagggaaatatgtactttatggaataaattttaagaactaaaatatattttattttaaataaagtaatggacctttaatcttacacagctaaattactgattatatatttgctgagctgatttaagggttaaaaaaattgtatcaagagttttattttttgacttccaagccttcttaataaagcctctttttctacatgtgaataaacaa

SEQ ID NO: 189308 - DNA, 2141 bp, Homo Sapiens
  misc_feature (1281)..(1341): n is a, c, g, or t
ccactatgacaatataaaacctttgtacattttaggtatttttcccttcaatatttaaataaacatgatttcttctggcatgtattaatgttaagtgaacatgattttaattagtctttttttatcgttatttcagccattataaaagccataaatgtgtttccagaaaaagtgcttttgatattattacagtattctctcataaaataggaggtacgcttgtgagtttagtactttagttgtaggcacagcttgcacatgtgtgtcgctgatgtgaaaccactgcccttttgattccatttcaaaatcttgtggaatatcaccgtgaagaacaagattagagagatgactatttgcggttcttgccttggcataggcagtgtaatgccccgacctcatagtaccactgtgttcaacaactccatataaggaatagagtacccttgtattttcttctgcaacattcttacatttaagggtgcaaaaaggagccaaatctaagatttccggaaactttatgtgtttgttaactttgcgtaggttaaaaccagcctgctgaaatctctttaaatgaagagtaagaacaggaggagcaagagaaattagcatctgctttttggcattggtgtaaacatgcttcctttcaccttttatatttgcctttggtccattacactgtctccgtgtgcatacttcacaaagcagtttattcgcatctcgaagtttctcattacgggtgaactgatataaacaatgttggattgaacactcatcagtattgaaaacttccctgtttgcaagagtacagaaagcagtttctggatcttcatttacaacctcatacacctttgttccaggagtatgactatcattcagaatctctatatttatttcatcaggatgaagagcagcattcaaatttaggtttttgaaaccattggaaatgtccacttctccattgctcccttccgttaggtaggcaccatttaaattcctagtgggagaagatgttaaaacctccagatcattatccatgttgatatttttcatatctacttcctctgtggatttttgattgtcagttacactttcgatcatttttgcttggccattcaaatctttctggttgacacaatattctttatgcataacaccctcttgtgaaatatggttggatttaatatttacttctccttgaagtgacatttcagcttcatattcactgtcttcaggatggtcaatagtacaaatatcatttaaatgaagaacttttccttgaannnnnnnnnnnnnnnnnnnnnnnnnnnnnnnnnnnnnnnnnnnnnnnnnnnnnnnnnnnnntaagtgcttacttgttccagaaggaatatcacttctctcttttatgtaactgtcgttatctttttcttcctcactatcttgatcttcatcctccactgtctttttcagatttttatcatttacacttttcttaccactctgatcatctaaaactgggagggacaaatcaaggaaagattcatgaaccaaggagacagttctgcattgatcacacatgatcatactagttagttcaccaccaaagatgcggtcaacaaaacttggcattgattttttcttctcataatctttaactttattttttagttcttcatccaacttttcagtagaattaccaaatgctttaagtattcctttactcactctttggtgttcttctgctctcatcccatccaataagtagcgaagcagctcctggctgtcttgctgctgatagcctttaaaccgcactgcttttttacagacctgagaaaagagttctttcggtgtcacaaccccctttttggtctcttgcatctcattaagaaactggctcatggctaaagtaagagggcctggaggctcaaggtttatttctaatggttctgttaatgccaaatcaggtggttcaatttttacaattgttccagacattttcacttcttttagtagttctctaagcactggtgtttgtgacaagttctgcataactgcattgaagaaacatgtgtttcccaaattactgagtcctttcacggttatttggcaaggagaattcatgggaggattctctttagccatgttttccttcttttctccaa

SEQ ID NO: 189309 - DNA, 1513 bp, Homo Sapiens
ttggggaagagctccctgaaacagcgggaggagatcactgccattgtgaagatgcgcgtggctggcactgccagtgggacccagcatgccggtgacttcatctgcacagtgtatctggaagagaagaaggcagagactgagcagcatatcaaggtcccagcatccatgactgctgaggagctcaccctggagatcctggatcgccggaacgtgggcatcagggagaaggactattggacctgctttgaggtcaacgagagggaggaggcagagcgccccctgcactttgcggagaaggtgctgcccatcctgcttgggctgggcacggacagccacctggtggtgaagaagcaccaggccatggaggccatgctgctgtacctggccagccgtgtcggtgacaccaagcatggcatgatgaagttccgtgaggaccgcagcctcctgggcctgggcctgccctcaggtggcttccacgatcgctacttcatcctcaacagcagctgcttgcggctctacaaggaggtccggagccagaggccgtggagcggggcccctgagaccagtcaccggcctgagaaggagtggcctattaagagtctcaaagtctacctgggagtgaagaagaaactcaggccacccacctgctggggcttcacagtggtgcatgagacagagaaacatgagaagcagcagtggtacctctgctgtgacacacagatggagctccgggagtggttcgctacctttctgtttgtgcagcatgacggcctggtgtggccctcagagccctcacgcgtgtcccgggcagtgcctgaggtccggctgggtagtgtgtcactgatcccccttcgaggtagtgaaaatgaaatgcgccggagtgtggctgccttcaccgcggaccctctgtctcttctgcgcaacgtctgagcacaggagcccatccttggctctaggattccgccgctggaagccttctgttcagacaccccttatgctccaaggcctgatgtgagccagcggggggtgcatgggaaactgcaccccacaacccacatcctccatcctgactgcagcatggggttccccggcaggggtgggaggcagcaggggtcagcctgggcaggaacctctcccaactctgtccaggtgttcagacctcttggcccaacctgctcaccccaccgggttcactgtccttgtggggctggagagatgggcataagtcaggaacttgggaggaccaccaccctttcagaggcgtgaggccctggggccctgccggaagggagccccctgctcctcccaacaaactccagaacagcataaagcgggtgctgtagaggagcactcagctcacggggagggagctcttggctgagcttctacagggctgagagctgcgctttggggacttcagccttccttccagtctgggctgagtggggggtccagactacctgatgccccttccccaatttggggactttttgataatataaatatatctgta

SEQ ID NO: 189310 - DNA, 1353 bp, Homo Sapiens
tttgtacaaaaaagttggaaaggttttccctttaagagcaatcttgttgtacaccagcgaactcatactggagagaaaccctttatgtgcagtgaatgtggaaaaggcttcaccatgaaacgctatctcattgtacatcagcaaattcatacagaagagaaatcttgtatatgtagtgaatgtggaagaggctttgccaaggaaacagagcttgctttacataagcaagttcatactggagaaaaaccttatggatgtaatgaatgtggtaaaggcttcactatgaagagccgtctaattgttcatcaacgaactcatacaggagagaaaccctttgtatgcagtgaatgtagaaaagccttctcctcaaagagaaatctcattgtacatcagcgaactcataatggaaacaaaccctgacaatgcagtggacatgttcatgcctttgggaagaaaatctgccttgtacaacatcagagatttcacagtatagattttctacatgtgtactgagtatgaaaaatcatatttcaaaatccagtgttattcactaggatgaatgctatcaatgtcagaaaggcttcaacatgaattcaggctctgaattctttgatgtaccaatgtatagaaaattactcatctgagagagagtctgtggattgggggtaacctttcatttgtcaaccttcattaaaactatgacaacgtccacatgacaaatgtgtaaggtacatagtccttttgcagagaatctgaactgattacatacaaacaaattcatgcagagagaaaaccacgttagtaatgtgaactgattaaacagcagtgtgctcctagcatacatgcatataggcagtgtagagcagcctgttgctagattttcacccttggaagacaatgcaatttccaggagcgaattttaatgaatgcagagaatgcactagtgccttcggtgattaattacctcatattttatgtcacaataaacatgtaggaaataaacttgatacatccaatgcagaaaagtcttgaaaattttctaagtaactatgtcttgaaaagtatttactgagataaatcttacaaaggagtaggctaggaaagccttctatgggaagaaagaccctatctcttcagtgatcataatagatcatcaatgaacttacacatactagcagcattatcatgggaaagcctttgcccagaaataataccttaacagttggcagatatatttcatactggagaacaagtttcagatggcagtgaatacacgaggatttcagtgatacatgctgcctcatcatcattacttcatacagaaataaaacttatatgaagagtaactttaaa

SEQ ID NO: 189311 - DNA, 958 bp, Homo Sapiens
ttggcagaaagttcaaaaacaccagtgaccatagaaaagatttatccatattatgtgaaagcacctagtgattctaactcaaaacctataaagcaacttttatctgaaaataatttcatggatattaccatcattttgtccagagacaatacaactaaatataacagtgagtggtgggttctcaacctgactggaaacagaatatacaatccgaactctcaggccctggaactggtggtcttcaatgacaaagtcagtcccccaagtctggggttcctggctggctatggtattatgggattatatgcttcagttgtccttgtgattgggaaatttgtccgtgaattcttcagtgggatttctcactccatcatgtttgaagagcttccaaatgtggatcgaattttgaagttgtgcacagatatttttttagttcgagagacaggagaactggagctagaagaagatctctatgccaaattaatattcctatatcgctcaccagagacaatgatcaaatggactagagaaaaaacaaattgaaaccttagaacacagactgcaaataatgttaacatttgaattttttttaaaagcacaatattctcataagagctaagcatttctagttcgacggaaatggtttgtttctcttctgataggtagacaaaaggagctgatatccttctgcagtaaaagctaccttgcaagttaaggcactgttgaaaatgttatttgtaactccatttctctgaaatcaggggctacttgctttatgttttagtcaacagtgtctcgcattctgattgatcatgtgaaggaatcatttatgggccccgtccctaagagaaacagaagaggagtcagaaagaaagatgcctgtgttttcctctgtggggcccgtgcacttcctggagagatgctacaatgcatatacagcgctccatccccactgggg

SEQ ID NO: 189312 - DNA, 981 bp, Homo Sapiens
ctttgtacaaaaaagttgggtggcctctgcagctcagcatggctagggtactgggagcacccgttgcactggggttgtggagcctatgctggtctctggccattgccacccctcttcctccgactagtgcccatgggaatgttgctgaaggcgagaccaagccagacccagacgtgactgaacgctgctcagatggctggagctttgatgctaccaccctggatgacaatggaaccatgctgttttttaaaggggagtttgtgtggaagagtcacaaatgggaccgggagttaatctcagagagatggaagaatttccccagccctgtggatgctgcattccgtcaaggtcacaacagtgtctttctgatcaagggggacaaagtctgggtataccctcctgaaaagaaggagaaaggatacccaaagttgctccaagatgaatttcctggaatcccatccccactggatgcagctgtggaatgtcaccgtggagaatgtcaagctgaaggcgtcctcttcttccaaggtgaccgcgagtggttctgggacttggctacgggaaccatgaaggagcgttcctggccagctgttgggaactgctcctctgccctgagatggctgggccgctactactgcttccagggtaaccaattcctgcgcttcgaccctgtcaggggagaggtgcctcccaggtacccgcgggatgtccgagactacttcatgccctgccctggcagaggccatggacacaggaatgggactggccatgggaacagtacccaccatggccctgagtatatgcgctgtagcccacatctagtcttgtctgcactgacgtctgacaaccatggtgccacctatgccttcagtgggacccactactggcgtctggacaccagccgggatggctggcatagctggcccattgctcatcagtggccccagggtcctttcagcagtggatgctgccttttcctgg

SEQ ID NO: 189313 - DNA, 943 bp, Homo Sapiens
ttggctcatgatatatttgaaaagctccaaacagtttctgctggaaatgtacaaaacgaagagtatcctataagaccctccacacttaattctaggcagtcttctcttgccccgcagtcccaaccacacgattttgttttttcaccccataattcaggaagaccaatggaacttcagatacctactcccccactgccatcttactgttccacaaacgtttgcaggtgttgtcagcatcatagtcatattcaatatagtccgctaaattcttggcaaggagcaaacacagttggatccattcaagatgtccagtctgaagcccttcaaaagcattcattatttcacccaagtggatgtccagccctgtactgtaatgcattctgttcttcaagtagtcctatagccttgagacctcagggagatatgggcagttgttctccccacagcaatattgaaccatcgcctgtggcaagaccgccttcacatatggacttatgtaacccacagccttgcacagtgtgcatgcacacacccaagactgagtcagataatggaatgatgggactatctccagatgcatatcggttcctcacagaacaagacagacagctaagactacttcaggcacagattcagcgtttgttggaagcacagtctctgatgccctgttcccctaagacaactgctgttgaagacacagtgcaagctggaagacaaatggagttggtttctgtggaagcacagtcttcccctggcttgcacatgagaaaaggtgtaagcattgctgtgagcacaggtgctagcttgttttggaatgcagcaggtgaggatcaagagcctgactctcaaatgaagcaagatgataccaaaatttccagtgaggacatgaatttttctgtcgatattaataatgaagtcacaagtcttccaggtagtgcatctt

SEQ ID NO: 189314 - DNA, 929 bp, Homo Sapiens
ttggagcaaatgtgaatttgaggcgaaagacaaaggaggatcaagagcggctgaggaaaggaggggccacagctctcatggacgctgctgaaaaaggacacgtagaggtcttgaagattctccttgatgagatgggggcagatgtaaacgcctgtgacaatatgggcagaaatgccttgatccatgctctcctgagctctgacgatagtgatgtggaggctattacgcatctgctgctggaccatggggctgatgtcaatgtgaggggagaaagagggaagactcccctgatcctggcagtggagaagaagcacttgggtttggtgcagaggcttctggagcaagagcacatagagattaatgacacagacagtgatggcaaaacagcactgctgcttgctgttgaactcaaactgaagaaaatcgccgagttgctgtgcaaacgtggagccagtacagattgtggggatcttgttatgacagcgaggcggaattatgaccattcccttgtgaaggttcttctctctcatggagccaaagaagattttcaccctcctgctgaagactggaagcctcagagctcacactggggggcagccctgaaggatctccacagaatataccgccctatgattggcaaactcaagttctttattgatgaaaaatacaaaattgctgatacttcagaaggaggcatctacctggggttctatgagaagcaagaagtagctgtgaagacgttctgtgagggcagcccacgtgcacagcgggaagtctcttgtctgcaaagcagccgagagaacagtcacttggtgacattctatgggagtgagagccacaggggccacttgtttgtgtgtgtcaccctctgtgagcagactctggaagcgtgtttggatgtgcacagagggaagatgtggtaaaatgag

SEQ ID NO: 189315 - DNA, 810 bp, Homo Sapiens
tcgggtctctgcgctcccgctccggagcccgcagcctcccccagcggatgccggggactcggaccccgcaccctgagagtctttgttaatggatgtggtggcccgaggcaccacaacccggaggagcaggttgaaaagatccgatggcagcaccacttcgaccagcttcatcctcagacagggttcagcggattcctacacaagcaggccgtctgactccgatgtctctttggaagaggaccgggaagcaattcgacaggagagagaacagcaagcagctatccagcttgagagagcaaagtccaaacctgtagcatttgccgtgaagacaaatgtgagctactgcggcgccctggacgaggatgtgcctgttccaagcacagctatctcctttgatgctaaagactttctacatattaaagagaaatataacaatgattggtggataggaaggctggtgaaagagggctgtgaaattggcttcattccaagtccactcagattggagaacatacggatccagcaagaacaaaaaagaggacgttttcacggagggaaatcaagtggaaattcttcttcaagtcttggagaaatggtatctgggacattccgagcaactcccacatcaacaggtgagggttgtagttaaactctttttcatacactgtattccttttaaaaatatttgaacacaccatgcaagtagttttgctaatttggaaacaatttgaaggcttaatttaaagattctctaattaatatttcatttctcatttgttttctatggtaatttgatttcatttaaaatgg

SEQ ID NO: 189316 - DNA, 920 bp, Homo Sapiens
ctttgtacaaaaaagttggctgatagatagactatagtaaaatttgggtgttgcctgactaacggtctagggtctgtaagctgacagtctgcctgctttctgattgtatccattgaagtgtatgtacattatggtaattctctgtctattaaatgtgtctaacaaaggaaggaattaagcactccacatgttttctttataggggagttctgtacactatgattttaaatagatatttcttatatagtagtggccaaattctcattattttgtacaagataaaggttatgcatcacttttatggtattttgtgaactcagctaagggaatgcctgttcagagcttggagttgttacctttacttgaagtcatctcatccagtcccctgctttagggcaggacttcagttccactgttcatttctgaagcttctgtgtccccagcttaccctgttctggaatgttgtattccattggacagggctgctatttttagtcagccatgcatttggattttacgcttaatctagtaagtaaaaatgagaagaaaatttggcatttaaaaattgattttaagggttggcaaaagtattttttccagtaagcctttcactggatatctgtgaccaatgtttacctacgcaatgtttttgtatctgaattgcttatgtacgttttttattatattgacctaacaagaagatcaacttatgctggtatggtgatggttttgctatggcaaaatcaaagggctgatcatacatggtgccctttgggaagggggatggtgtggggctgagcacctctgggttgaatgggaatgggtcagattgggaagcctaggaagagagttctactgtagatttcctaggcactgctctgttgaaataggaacataagtctttagcaacattctgattt

SEQ ID NO: 189317 - DNA, 822 bp, Homo Sapiens
ctttgtacaaaaaagttggcccaaggcgcggtgccccagagtggggtgcctgcactctcagcttccacaccctcaccctacccctacatcggacacccccaaggtgagcagcctggccaggcgcctggatttccaggaggagccgatgacaggattcgtgagttctcattagctgggggaatttggcatggaagagctgaggggctgcaggtggggcaggatgcacgggttctgggtggggagtgaggggtcttggaggcagggctgtcccacagggcgcccgccgacctgcacctgtctgtgaagtatgtagggtgggcagaagccacagtcgccgccgccaggggcttgctcctggctctgtcctttgcttccctccgtcctcgctcagttgtgatccagcagcccccctccccactgcctccccagctctcagtgaccccgactgtctcctgacttagccgaggtaaggtcagtgcagcagacagggccagactggggtgtggggggctgagctgggcacatgagtgagggctctggcttactgggaaacagcgattgacctgtgcttctgacagcccccgagacaccttgaggaggccgctccttcccagacacacccccacgcccccactggacggcattggaggaagggacagctgcttgggttctaatgctcctgctctcttctctttcccctccaaccagttcaatctcatccctcccagcagctccccttccaccccccggggaactgaaaattgtcctggccgcgacctgagacctccatgagtggagggaagagtgatctatgtctcttcc

SEQ ID NO: 189318 - DNA, 839 bp, Homo Sapiens
aaaaagatgcactgtgttgttatgcagcggtgatatgattactatgtgcacaaaaacaaaaaagtcagataattcgaagagagggagaatcagaaatacaatcacatttgttcttattctgttttagggatcttctaggtcctcgtttctgagtgtggttttaggccagcagcataggcatccctgagactccttagaaatgcagaatctcaggcccagcccagattacttggagcagagtctgcagtttcacaagatccccaggcaattcatgtgcatgtgaaatctggacaagcacctctctgggcgatacaaagccactcatcctcgtgtgcctatcacgttttccaaacacataggatcccatctcaggagcaggaccagtgtttagctagattaaacttcactggtgatcttgttgatgcatataaagtaatctggcatatatggttacattcaagatgttatggcagaagtgactttgttttgctcacaaagcattgcccaaaaggtaaattatggatttactgcttccttcttaggtagacatgggaatgaaaaatttctaggtcataattcaaactgtaagattttcctcgcaccataccaaactcatagaaagcttttttattcctctcaataaaataattgcacattgctgataacagaaacattacataaatgcatataatgcaaaaaaacctgaaaacactcatttgcttttctttttttctccaacaccagttgctaaatcttatcaatctctattatggatgaccaaagaaaatctctctccctgaaatcaaacacacaataagtccaacttttttgtacaaagt

SEQ ID NO: 189319 - DNA, 983 bp, Homo Sapiens
gtactaagatgtacgggtcttggggatatctgccttatatgttatattcaaggaaattaacaaaacatcctgtaaaacatcgtttaaggaaacgtttactagtccaaaggccaaagctaatttatttccactttagaaaagttagcacatgcttttgaaaatctgtgatttcattttattaggctaaaagggtaaataggctttattacactgaagctgcatctatatgtcactgacataaagttgaaaaaataaatgcaggcaaataactagagacttcttttaagggggtttggctggttttctctcactgaaatggccagtcgtgattaaagtgataaaaccccatatctgttttggtatattgtacacaaacctacaaaaataaactgaacttgcaatatttttgcaaaaaaatctgtcgttaaaactgaggataaaatacctgctcaattttattttactaagtatatatttacatttcacccaggcaggccattttcttttgtgattataagaaagagtagttgttgattaaattttcagactaaatataggacaggtacaattttggataaatagcacatttataagaaccgcaatgaaaactgacttgaaataatgcttgtaatcaggaaagtaatttcatccaccgatttcaaaaccagattcactgagcataaaagtcaatacatatttgaggaataagtctcctaaaattttaagcttcacgtaataatgtttgcatagcaaaatatttctgcttcaagcctttaggaattaagatctgatcagaatttaactaaagggtagttgttttacaatgaagactaaaactgaacaagatgttgcatgctcttgaggccataatttggtagtgttggcagttgttaataaagcttgtcaggatgttaagcatctcacgagaaatattggaaaattatatgtataaaaccaaagtgctatttttaaaagcatcattt

SEQ ID NO: 189320 - DNA, 1567 bp, Homo Sapiens
aagacagaaatacaaagtgaccaagcccagtgacgaggccgatagggctggcgggacgggacgcagtaaaaaagtctcactcacacacacgccacatggacacccccgcacacagggacgtgtcagtaaaaactcaaggccagctgtgaggcctcacacgacactctgccggcccccagagccctccaagtcggacatgccagagccccggccccggccaaagtcaatgaaaatcccttcagaatccgagtccacggactccaggatctggtccaccaggttctccgggctggagcggggcagggagctgcgggtgggatccaagccctgctcagggggctgggtcgtggggtacagtctgctggggcagggccctgagtggggcgccggggaggacctgaaggtcccggtggggccctggccgggcgggtcggagaagccctgaggctcggggcaggacgtcatctccgacacagagtgcctgcggatgctggtaccgccggccgccgcgccctccgcctcgtgctcctgcacggggttcagcagaggcgtgttgtagctcttggagcgcaccacagggttcttggccagcacgtcccccgagcgggagcggcggaggaggcgcttttccaggatgcaggaatgggtgaagggcccctcgctggagtggaggccgtaggtgcccaggtatggcgacaccaccttctggaccagcgtctccaggcgcaggtagtcctcagtcacgcccctggactcatgtaccccctgcagcaccagcagcatctgcacgatggcagggggcacacgggcatgggcccgggccagcgcatcctctagcttcacactgagggtgatggcattccggaagtgcagcagggccagctggcgcaccgatggctccttgccctgcaccgggtagaagatggcctgcagcatgggcagcacgtcactgaagaagaagtcccaggtctctgccagtgagtccagcagcttctgtcctgtgggcatgggggccatcaccactgggcctgactggcgcgggcagatgcctccactcacccaggatgggtcatcagaggatgcgggagtggagggcctgggctcaggcccctggcagcacctgcccaaggtcgatgtccagctccacagctcagctgttctatggccctgggaccactgcttaacctcagtcttccatttataaaatgtggcagtaaagggattggcctcccagagctgagggcatgaaatgagcctaaggcacagggaacttggctcagggtctgctcctggcagatgacagctgccaattcccaggcctttgtcacataccagacccacacaagtgagagccacacaggtatacacctggcacaggtgagacgttcacaggtgagacccctacacgtacgcctgacacaggtgagacccgcacaggtaggtacactcggcacaggtgagacctgcatcaggagacctgcacaggtaagacccacacaggtacacctggcacaggtgagacctacacaggtgagacccacgcaggtatgcctggcacaagtgccaa

SEQ ID NO: 189321 - DNA, 213 bp, Homo Sapiens
gtacaaaaaagttggatacttcctactctttgacctactctcctaaggaaataattcaaaagaagaaaaacaaaccatttacaaatatgtttaatagcagcatttctttaaagaaaaacaaagttcaaatgcccaataataattatgtttaacacttggtacacatataaatagacaaaaggctgcggagaacactggatttagataaaggtg

SEQ ID NO: 189322 - DNA, 189 bp, Homo Sapiens
ttgggccagccccaaactagccgatggaaaaatccaaaaatttccgcatcgacgccctgctggcggtggaccccccacgagccgcctctgcgcagagcgcgccgccgcatctggcaccggaggtggcggcggcggctgcggggcgagcggcgggactagcggaagctgcagccccgcgtcctcagaacc

SEQ ID NO: 189323 - DNA, 913 bp, Homo Sapiens
ttgggccattaacgccttaaaaagagactgcttgctgcggcagagacgccagaggtgcagctccagcagcaatggcagtgacggcgttggcggcgcggacgtggcttggcgtgtggggcgtgaggaccatgcaagcccgaggcttcggctcggatcagtccgagaatgtcgaccggggcgcgggctccatccgggaagccggtggggccttcggaaagagagagcaggctgaagaggaacgatatttccggtgaggctcaccgggtcccaagtccagccctggatctcccaatggccttccaatccttaaactgccaatcgccccacccgttcctacctggtgccttgggcgccccatcccccaacagaactcccgggccccaatccagtataccctaacccttgatgtcccgaccgttgccacgtatagggcactcccagttacctgcacaacagtttcaggcccccaaaccgtttccaccggcgggtctccaaaacaacccacggctcaactcctcctttatcattaccatctcccgcgtggagttctcctcaggtcgtgcgaaacacccccagattcttcgcacagtgtctagatccgaccgcccaacgtttgcctcccagcctgactccctcggcccttacccacctgtcaccccctctacgctctccttcctcgccagcacgccttagctttgcaagcctgcatgcattcaggcttctcaggtgtttctagacccccgactccgcaagagtgaggatgatgggagctggtcatgggagctacttatggttggacaccatcttctaaaggcttttgccctactcagcccaacctagacctgtagatttccctctcctgcttagagtatggagtgggctgggctccctttgccagccttgagttatcttt

SEQ ID NO: 189324 - DNA, 391 bp, Homo Sapiens
tttgtacaaaaaagttggagcattgatacccactgaagagtgcgtttattttttgtatcactctaagtatgttggaatatgcaaggactgtggttcaaattagaatgtataaggcatattataatttagttcatactgaaaaagaaattaacagaacattgttcggttcacacgttccaaaatttgagtgatttctggagttagacatagattttctattttgttttaatttgtcaaggtatttttcttcccttcatgaactttaggtacacataacttatgtcatttatttatggtcttttatacctagtttgtaaaattgtaaaatatcaaactaaatgcaaagagtttgcatttgaaaataataaagtagttaccgtatacaaccctg

SEQ ID NO: 189325 - DNA, 879 bp, Homo Sapiens
ttggcaatctactgtccgattcctgccagaaaaaactccacagctgctgaggtgattgagtctcttataaacaaacttcatcttgacaaaacaaaatgttatgttctagcagaggtaaaggaatttggtggagaagaatggattctcaatccaacagattgtccagttcagcgaatgatgctgtggccccgaatggctctggaaaatcgcttaagtggagaggactaccgcttccttctgagagagaaaaaccttgatggatcaatccattatggtagcctgcagtcatggctacgggtaacagaagaacgtcgcaggatgatggaacggggttttcttccacagcctcaacagaaagactttgatgatttatgtagtttacctgatttgaatgagaaaactctcttagaaaacctacgaaatcgctttaagcatgaaaaaatttatacctatgttggcagtattctaatagttattaacccattcaagtttcttcctatttataaccccaaatatgtcaaaatgtatgataaccaccaactgggaaaacttgagccccacatttatgctgtggctgatgtagcttatcatgccatgcttcagcgcaaaaagaatcagtgcatcgtgatttcaggagagagtggttctgggaagactcaaagcacaaactttcttattcaccaccttactgctctcagtcagaaaggatttgccagtggagtagaacagattattcttggagctggaccagtacttgaggcctttggaaatgcaaagacagctcataataacaattcaagtcgttttgggaagtttattcaagtaaattaccaggaaacaggcactgtacttggtgcctatgttgaaaatatctactgg

SEQ ID NO: 189326 - DNA, 538 bp, Homo Sapiens
agatatagattccattctacatgaagggaaaattgagtccgggagcagaaggaagcagtcggggagagtcagaaccagcctccttaagccgggcagactgggccttagacagacatgccttccttaggtccagccgatggtaccaggaaggtagggatggcagtccgtgcgtctgagttcaggagttcagaccaagatggaagtcccttagaccaataacataaaaatcactttttaattcaggtggtgtgggtagggagcaagggcagctatattttcctttcagaagctatcttgggctgtggaaagtgcccacgagcctggcagatcaaggaggaaggaggcagaagttccaggcccagaacctgggtcccaggctgcattcagagaggattccttgaggcccgggcagccaggaaccctgttttatgtgccccgaaggctgtaatgaaaacattcatgaccacagtgaagaagaccaagatggtgggtgcgttgttgagctggttgagtcgccactgctttttgtcggggacaa

SEQ ID NO: 189327 - DNA, 831 bp, Homo Sapiens
ttgggtgggaataaaagaattctttctttcctactacattctgttttatttaaatactcattgttgctatttcactttttgacttgacttttatatttctttaaaaaattccttccttttaaaaaatataaaagggactactgttcattccagttttcttcttctttgttgttcttctagtgtgacttttcaagtgtaacagccattcttcctgactttaatattgtccagttctggtcttttctgtgaattaccactgggccccttacctcaatgctttttgttgatgcccactctggttcccttgtttatctgagtctgttggtaccccaaatgaccccacacccatcttaaagtactttttttcaccttccctgtttagtactggccagatgagttttttctagagctctgtcactatctgaaaagaaagaggctatgggaaacatagaaatggtatgtattaataactgatcataggctgaggagaaaaaatgtagctggctgcaaacccagtgctgtgaggtgacttatatgaggttccagatcaaagacaggccgtgtgagccagtccaggagggtgtaagttctgaatggttccttgctgactttgggtgacacatgtaccacatactggctcagtttaagtcatggttctattgtagatttatttttatattagttaataaatgactttaaattgtcaccaattgaaaatcttgtcactcttttggttttctttatatagctcagccaaatcttgttttatgtcctgtcctcatctcttaagctaaatctgtttggatcatatttaataaactaatgaaattt

SEQ ID NO: 189328 - DNA, 1672 bp, Homo Sapiens
ttggcaagaactcaaatgatcctgcggtattcaaagacaaccccactgaagacgtcgaataccagtgtgttgcagataattgccattcccacgccaaaatgttaagtgaggttctgagggtgaaggtgatagccccggtggatgaggtccagatttctatcctgtcaagtaaggtggtggagtctggagaggacattgtgctgcaatgtgctgtgaatgaaggatctggtcccatcacctataagttttacagagaaaaagagggcaaacccttctatcaaatgacctcaaatgccacccaggcattttggaccaagcagaaggctagcaaggaacaggagggagagtattactgcacagccttcaacagagccaaccacgcctccagtgtccccagaagcaaaatactgacagtcagagtcattcttgccccatggaagaaaggacttattgcagtggttatcatcggagtgatcattgctctcttgatcattgcggccaaatgttattttctgaggaaagccaaggccaagcagatgccagtggaaatgtccaggccagcagtaccacttctgaactccaacaacgagaaaatgtcagatcccaatatggaagctaacagtcattacggtcacaatgacgatgtcagaaaccatgcaatgaaaccaataaatgataataaagagcctctgaactcagacgtgcagtacacggaagttcaagtgtcctcagctgagtctcacaaagatctaggaaagaaggacacagagacagtgtacagtgaagtccggaaagctgtccctgatgccgtggaaagcagatactctagaacggaacgctcccttgatggaacttagacagcaaggccagatgcacatccctggaaggacatccatgttccgagaagaacagataatccctgtatttcaagacctctgtgcacttatttatgaacctgccctgctcccacagaacacagcaattcctcaggctaagctgccggttcttaaatccatcctgctaagttaatgttgggtagaaagagatacagaggggctgttgaatttcccacataccctccttccaccaagttggaacatccttggaaattggaagagcacaagaggagatccagggcaaggccattgggatattctgaaacttgaatattttgttttgtgcagagataaagaccttttccatgcaccctcatacacagaaaccaattttcttttttatactcaatcatttctagcgcatggcctggttagaggctggttttttctcttttcctttggtccttcaaaggcttgtagttttggctagtccttgttctttggaaatacacagtgctgaccagacagcctccccctgtcccctctatgacctcgccctccacaaatgggaaaaccagactacttgggagcaccgcctgtgaaataccaacctgaagacatcgttcattcaggcaacgcacaaaacagaaaatgaaggtggaacaagcacagatgttcttcaactgtttttgtctacactctttctcttttctctacatgctgaggctgaaagacaggaagatggtgccatcagcaaatattattcttattgaaaacttgaaatgtgtatgtttcttactaatttttaaaatgtattccttgccaggggcaagcaa

SEQ ID NO: 189329 - DNA, 832 bp, Homo Sapiens
ttggcgtccgagcccccccgcctttggaggaaagagccagacttctcagaggtcagtctgttcaacaagtgggaccccagggccttctgtatgttcagcaaagagagcttgcagtgacctccccaaaggatggctccatctccattctgggttctgatgatgccactacttgtcacattgtggtcctgaggcacacaggtaatggggccacctgcttgacacattgtgacggaaccgacaccaaagctgaggtccccttgatcatgaactccataaaatccttttctgaccacgctcaatgtggaaggctggaagtacaccttgttggaggcttcagtgacgacaggcagttgtcacaaaaactcactcatcaacttcttagtgaatttgacaggcaagaagatgacattcacttagtgacattatgtgtgacagaattaaatgaccgggaagaaaacgaaaaccactttccagtaatatatggcattgctgtcaacattaagactgcagagatttacagagcatcctttcaagatcggggtccggaggagcagcttcgtgctgcgcgaactttagcaggaggaccaatgattagcatttatgatgcagagacagaacaacttcgtataggaccgtactcctggacaccatttccacatgtggatttctggttgcaccaagatgacaagcaaatactagagaatctttccacttcgcctctggctgagccaccccactttgttgaacatattagatctaccttgatgtttttaaaaaaacacccatctcccagctcacacactgttttctggaaataaagcccctactctac

SEQ ID NO: 189330 - DNA, 490 bp, Homo Sapiens
tcttaataccagataccctaatcccagtcctaacttcatttaaccttggtcacattgagtcattccaggatgagtggctcaagtatttcctcagggaaaatacttctgtgccccctgatttgagggtaagaagtagataatgaggccactgtgggtgttattttttcatgtctggacctcagcctatatcctgagactaagtggaagtgggaaaagagtacaagagaagagacaaagtggggatatttgtaaggcttagatgagatagtgtttttttagaaaaaaactttatcttaccattaagtaaaatgtttgccatagctttctggggctttctctttttaaagtcagactgttgaagggtttcttctattcttatttgttaagagttttcttttattgtttaaatcatgaatgaatgttggaattttattaaatgcagtttctgtaaatattaacgtgatcatattatttttattctttcaattac

SEQ ID NO: 189331 - DNA, 899 bp, Homo Sapiens
ttgggattgagtctgtttagtagtttccatcattctagtctttaagtaaaaatgacactattgaggaaagtcagtctactcccttcttcctccccccaaacacgtgttctcttttgtcaggaaactcagccagtggactgtggcagagaaagtcctccactcagaggcagagactgagttaagtcataggtggccttaggcatctgcattgtttgcaggggttaagttttccttccagtgagggctggagggatgaattagctggtacctgaagccccgcttagctctgacactctgccaacatcctctgattctaggtgtggtgttgactgtcctttcaaggaaaaacttgcaatagagggaaaagccattaaagcagctccctgcttcatcattaagtcctgtcatccctaccagccaatcccagtcaaagaagttatgctttattcacttctgtggaattacaagtgagagacacttttaggacctgatggacaaagcaggagattcactgtcagctttcctggtcctctccttacttctgtgggccttgcaccgtcttagtttacacatctgccaaaggggtagaattacacttctttttacaggtaaatgtcaaggcacaatcagttttcaggaagtgcttcaagaccccaggtgaaatgaaaatgctaagtaccctctgaatggccatgcctgttaccaggtgctgcttcttcagatgatggggagcacttttcagggtgaaattcaggcgagttttgcccaggcctgctgtcttgagtacaaatgtgaatgatcgactgactgcttgttgccaaactggaaatgttctgtagggatttactggcatggtatcattcctagaagaaaaaaagagagaaacttgactgcacttt

SEQ ID NO: 189332 - DNA, 1016 bp, Homo Sapiens
ttcttagctgaaaacaggcatttcaccaaagggcatccagccagcggcagcagttgagctctcaggctgacatctgggcagagctgatgggcagcttctggccatctggtgaccaggtgtgccgccagctgcacccacatgcacagcccctttcctaataaccacattctaggttacgtagacacgttaaactcctattctagaacatcgtgcttgaatgcagacccctcagcccacaatcgggctggctgggcctcctgtgagcccctcattgcatccagtctgtggggcagtgaccccgcttccactggtggctggtcttcctcatggtgctatgcaggtgccaaacacagttatattctcaaaggtacaggtcttgtctggacattgttcaaaccaatagctactgcgttaggcacacgggagatccctattcccaaaaatagctgttgagttctggcctgagagcatctccagtgaccacctttaaataaggctttggttcaaacagcatggacccagcacctggggagggtgggcacagggggcatggacccagtacctggggagggcgggcatggtggtaggagacaactcaaccactgagtcttggaggtcctgccttggccacggagggcagtggctgccctcacaagaagagttaaggcactttctttaactctggcctaggagaattatgtcttagtactcagtgagtttaaatgacactgcctgggctccctaaagttgtttacttttctcctatttcctgctttattccttgctctcaccatgctaatgtacagatgttgtttagatttctatgcttattgaaacaatgtaactttggtactaacagaacaggagcgaccttttccagcattgctcgtaacaaaacaaaaatgttaactagaaaaactccttatgatgaagaaatctaaagccagagctgggactccaaaccccttccaggctggaagacaggtcgctgagtccaggcaaggggcccccgccaa

SEQ ID NO: 189333 - DNA, 903 bp, Homo Sapiens
ttgggacggagatcggcgggagggctgggggaagggacccggactagaacaactgctgactaatccgcgggccgcggggaatgggtggcgcgccagccggtcggcaggggtcacgcggccgggtgtgcgcggaatggattcagggttctcgggtcgcgcccgggagctagagtcctgactcccagccggggtccccgaccggcctttcggggttgccgggcgcgctctgcaaaggggaaactgaggcccaaggaaattgagtatctctgcaaagtcaccagctgagttcgaaccagacagatcctgggaccccctactctatccgccaccggaagaatctccgtccttgtctttccattctgccctcccggcttcccagtaagcacacagccccaggaccacccttgaccgtcctcaaccaagcgatgcatgccaggggcccccatggccaactgtccccagcactgcctctggcctcctcagtcctgatgctgctgatgagcaccctgtggctggtgggggccggccccggcctggtcctggccccggagctgttgctggacccctggcaggtgcaccggctgctgacccatgccctgggccacacggccctgccaggcctgctcctgagcctgctgctcctgcccactgtgggctggcagcaggagtgccacctgggcacgctgagattcctgcatgcctcagccctgctcgccctggcttctgggctgctggcagtgctgctggcaggccttgggctgtccagtgcagccggcagctgtggatacatgcctgtccacctggccatgctggctggggaaggacaccgccctagacggccccgtggggcactgccaccgtggctgtcgccgtggctgctgcttgccctgaccccactgctca

SEQ ID NO: 189334 - DNA, 760 bp, Homo Sapiens
aagcagttcaggggccggaagtaatgaaggaagcccaagaaaagggtcaggattagggctgctaggaagagaaggctgaaaaaaacgcctagaggcacgtggagtagccccagacaattgagtgcagcaagggtaaggagggtgaccccgacgatctgcagggggaggaagaccagcctcttgaagcccgtggtgaagacactgccctctccgggcttgcagtctctcagattggtcaaagagatcccatagaaataattgaagccgtgatgtaaagggtggtgacagaagtcagtcttgctgtgacagctcatcccaaggtgccatttccctatcagtgctgttgaataaccttgatccttcagaagcttagcaaaggtaatctcatcggtgggaagtcctcccgaagaggctgtgaagaggaaaactccagtgcgggaccaagatgccattcctgatcggacagggtaccggccagtcatgaaggctgccctgcttggtgtgcacagcggtgatgctgccaggtgctgagtgagtttcactcccccactggccaaccggtcgatattgggagtcctgatagttttgttcccatagcacccaggatctccaatgccgaggtcgtcagccatcaccaggatgatgttcggccttgatgctgcgtggctctcggcttcccacagaaagaacagtaggaggaaagggatcttcatcttcctgtaaaggacaaggacacaaaaaggaactgaaggatgtcagc

SEQ ID NO: 189335 - DNA, 971 bp, Homo Sapiens
gcaatgctttccctataatagccaactttgtacaaaaaagttggcttaaatggccaaaaactttaactatgaaatgttactgtgtagtatattgaatataggaagtgatgaagattataggtattttattcccatgtttccatctataaatagccttctcagattcagaaaacaatacagagaacatcagaaattttctaaaatgggtcactttgaaaagaattctttttctcactattaatgctttagaagcaagacgcaattttaaagctttagttccttttctttcagtcattgtcttagtttgggtacaaaaatgtcatttcagtaatgtactgaaatcttataagtgaatagttgaagctagtaaaaatgataccagtataaaaatggtacttgtagtccatgagcttgaacccaatgactgattgtttgacttttaaaataagtaatagcagccatttgggagtagggggtaggtggggaagatgtactccgtatcaaataataatgatgttgaaataatgatagtaggtatgtattatggattggagaagcacttattacactatctaacctaatatgtagaacaattcttgagagttgtatctgtcgttatttctgaatgtgaagctcagagaagtgacacagagtaaatggctgatcttctatattgtagtatattttgtccttccctcttccctgaggaacaaagcacgtatctttagtctctttgatatttattctgagaccaagggcttgcttgacctgatgattttccttcagctctctgaaggtgctttttccacaatccaagtgattctgatacacactaaagttgagaatcactgcactagatcactttgtgttttctgattttcaaggttgatacatagctttaatacagctcttctgttgacagtattactttattttgcatttgttccttgtagaatggctggaaactgtgt

SEQ ID NO: 189336 - DNA, 1105 bp, Homo Sapiens
tacaaaaaagttgggttgtcgaagtggagaaaatgaggatatcttgcagacgagctataggtcatacatgaatgtctagtgagacattcaaaattcgtatagggtgcagagtaatttcttattgtgaggaactgtccaatgtattgcaagatgttctgcatacttggctctcacatactaaatgctagtagcgcccccacccccacgcccagtcacggtgacaaccacaaaccctatcagatctattcacctttttcagagcagatattttgtaacattctctttgctgacctgaaatgactcatagataatacaatctacttacacacatgaatttcttaaaaaaatcaatttaatgccctaactctcttattaaggagaaatagaaaagaagaaatttataatgaaaagaagatgaatttcattatgtaaacgctcaggcatgactacgctgtttgaaacagacagatgtttactcttccttgtaatgagtaggtttggatttaagagccgattagaggctacttcctgtaaacaagtacaggaaaatgaaactagacgggtgggggacactagaatgaaaaccagtgttagggtaaagacaaaacagactatgtacataatctgtatatgggaaaagaaagagcgaaattaccttacttaaggataataggacaagacaaattacagattgtctcagagaaaacaaatgagttactctctcggacaagctgtaggtcctacctaaatgtccagcaggacattagacagtcgtacagggtacagaataattcttcgttgtgtggcactaacccacacactgcaggacatcgttctccctggctgcatccactcagtgctgggagtagtccccagttattatgaaaccaccaataacccactgaccacagtgagaaccactgattttttccactgacctactgaatatctagcatccttagattgggctcaactgttactttcctaaggagtccttctacagaatagtcagatcttggcctcccaaaccccttatttttaaaatactttgcgccttgctttgataatttgtattatgtatccaaactgaaattatcttgctttc

SEQ ID NO: 189337 - DNA, 904 bp, Homo Sapiens
gaagtctatggcgttggcggtgaccagcaggtcggcgttgtcgaagagcgtgacacctggcactccacgatgagcacgtagatgagctcgatggccagcatgagcaccagcttcccgatgcagctgatctgcaggaacacggagcaggccagcaggctgagcagcacgctgtaggtgaagtactcggggaagttgcagttgggccaggggctgccacagaagccctgctcatcgcccaggctgtagttgacggccgactccgccacgtgacacgcgttgacctggctcgcgctgatgttgtgctcctgtgccaagcagcccagcaggtccctggagttgcacgtgaacatgttgacaaaagccgccaggaacaccagggtgatggtgaacaccccaaccagggtgctgttcatcttggaccgcacgatcttcctggagagggtctgcagtggggaggggaagagctttacgcaggagtagatcacagacacaaacaccaccaaggtcagcagcagggaacaggtcaggtagaagctgagcatgaatatggagtggggcacgatggtgatctggacaaagcagatgaagaggaagacgagcgaggcacacgccacataggcaccaaatcggtcgtctacctgcttggagtacttcttctctaagtcaggctccctgaaggtcaggaggaacttgcggacgtgctcagaccgaagcctatcaatgctcctggcgtcaatggcacggcccagaaactcatccacttcatcctcagggttcgcactctcctgggcgttcttgtccttggggtcttcaaagcccatccgcttcatctccttggacacctggttgccacccaggtggttgtagaaggggcgctcagccccccagtgtggtgggttgccaa

SEQ ID NO: 189338 - DNA, 908 bp, Homo Sapiens
actttgtacaaaaaagttgggtctgtccacacgtccgtttgcgtcgtcccactaatgtgaatttcagcagcaagtgtggtgtttgttttttatttttgtctttgtctccgtgccgttgctgtcgttgtccttcaataaggttgactgcattcagccagtgccaaaagaggagcccagtcccgctaccaaattccagtccatcggggttcaggtagaggacgactggcgaagcagcgtcccctctcacagtatgtcctcccgacgggacacagactcggatacccaggatgccaatgactcaagctgtaagtcatctgagaggagcctcccggactgtacccctcaccccaactccatcagcatcgatgccggtccccggcaggcccccaagattgcccagatcaagcgcaacctctcctatggagacaacagcgaccctgccctagaggcgtcctcgctgcccccacccgacccctggctcgagacctcctccagctccccagcagagccggcacagccaggggcctgccgccgagacggctactggttcctaaagctactgcaggcagaaacagagcggctggaaggctggtgctgccagatggacaaggagaccaaagagaacaacctctctgaagaagtcttaggaaaagtcctcagtgctgtgggcagtgcccagctactgatgtcccagaaattccagcagttccggggcctctgtgagcaaaacttgaaccctgatgccaacccacgccccacagcccaggacctggcagggttctgggacctgctacagctgtccatcgaggatatcagcatgaagttcgatgaactctaccacctcaggccaacagctggcagctggtggagacccccgagaagaggaaggagagaagaaaccaccccct

SEQ ID NO: 189339 - DNA, 889 bp, Homo Sapiens
actttgtacaaaaaagttgggttctatgagtcataaatatccacaggctgttttcttggaagtcgatgtacatcagtgtcagggaacagctgccaccaacaatatatcagcaacacctacatttttgttttttcgaaacaaagtgagaattgatcaatatcaaggagcagatgctgtgggattagaagaaaaaatcaagcagcacttagaaaatgaccctggaagcaatgaggacacagatattccaaaaggctatatggatttaatgccttttattaacaaagctggttgtgaatgtcttaatgaaagtgatgagcatggatttgacaactgtttacgaaaagacacaaccttcttggaatctgactgtgatgaacagctgcttattactgtggcattcaatcaacctgttaagctttattccatgaaatttcaagggccagataatggtcagggccctaaatatgtaaaaatttttatcaacctgccccgatctatggattttgaagaggcagaaagaagtgaaccaactcaagctctggaactgacagaggatgatattaaagaagatggcattgttccacttcgttatgttaagtttcagaatgttaacagtgtaactatatttgttcagtcgaatcaaggtgaagaggaaacaacaagaatttcatattttacttttattggtactccagtccaggcaacaaatatgaatgacttcaaacgagtagttggcaaaaaaggagaaagccactaaggtacaaaagacactggacaaccatattgcaatcagatctacagctcctggataattgcttgattctcgccagagactgtcaatgtttcattcattgccattaccaataaatcattgcttttgttcagatgg

SEQ ID NO: 189340 - DNA, 1764 bp, Homo Sapiens
ctttgtacaaaaaagttggcttagaaaatgacctctgagaagcaatgaggacacagatattccaaaaggctatatggatttaatgccttttattaacaaagctggttgtgaatgtcttaatgaaagtgatgagcatggatttgacaactgtttacgaaaagacacaaccttcttggaatctgactgtgatgaacagctgcttattactgtggcattcaatcaacctgttaagctttattccatgaaatttcaagggccagataatggtcagggccctaaatatgtaaaaatttttatcaacctaccccgatctatggattttgaagaggcagaaagaagtgaaccaactcaagctctggaactgacagaggatgatattaaagaagatggcattgttccacttcgttatgttaagtttcagaatgttaacagtgtaactatatttgttcagtcgaatcaaggtgaagaggaaacaacaagaatttcatattttacttttattggtactccagtccaggcaacaaatatgaatgacttcaaacgaaaagtgcaacagtatacgttaataattcaagctacagacatggaaggcaatcccacatatggcctttcaaacacagccacggccgtcatcacagtgacagatgtcaatgacaatcctccagagtttactgccatgacgttttatggtgaagttcctgagaacagggtagacatcatagtagctaatctaactgtgaccgataagatcaaccccatacaccagcctggaacgcagtgtacagaatcagtggcggagatcctactggacggttcgccatccagaccgacccaaacagcaacgacgggttagtcaccgtggtcaaacaatcgactttgaaacaaataggatgtttgtccttactgttgctgcagaaaatcaagtgccattagccaagggaattcagcacccgcctcagtcaactgcaaccgtgtctgttacagttattgacgtaaatgaaaacccttattttgcccccaatcctaagatcattcgccaagaagaagggcttcatgccggtaccatgttgacaacattcactgctcaggacccagatcgatatatgcagcaaaatattagatacactaaattatctgatcctgccaattggctaaaaatagatcctgtgaatggacaaataactacaattgctgttttggaccgagaatcaccaaatgtgaaaaacaatatatataatgctactttccttgcttctgacaatggaattcctcctatgagtggaacaggaacgctgcagatctatttacttgatattaatgacaatgcccctcaagtgttacctcaagaggcagagacttgcgaaactccagaccccaattcaattaatattacagcacttgattatgacattgatccaaatgctggaccatttgcttttgatcttcctttatctccagtgactattaagagaaattggaccatcactcggcttaatggtgattttgctcagcttaatttaaagataaaatttcttgaagctggtatctatgaagttcccatcataatcacagattcgggtaatcctcccaaatcaaatatttccatcctgcgcgtgaaggtttgccagtgtgactccaacggggactgcacagatgtggacaggattgtgggtgcggggcttggcaccggtgccatcattgccatcctgctctgcatcatcatcctgcttatccttgtgctgatgtttgtggtatggatgaaac

SEQ ID NO: 189341 - DNA, 898 bp, Homo Sapiens
gagcaatgcttttccctataatagccaactttgtacaaaaaagttgggttgaaattagtcattttaagtttcagtgtaccaacgataagggcatttggaacagtgctatcaggtgagctcagtggtgctgttgtaggttcagaaatggaaatatgtaagggaggtcacacatacactttacctgtatgttcaacctatgttatcaaacaaaccaattcaccaataatagcatgattagtagggattcccaaaaagtttttaaaaacacgaacaggattttaatgataattaaatttgcagtggaaaggtctcatttaatggttttcaaggaaatgggatttggttgctgacatgaattgatgatattagtaatatttataaagcctttcaaacttccatcaatcctaagctaaaaatctttattacctgtatatccttttcagttaactgagaggaagggatttggaaaccatgtacttttggggagtaattgattaaaaacaatggctgattggcattgttaatgaaggctttatttgtgaggatgatgctggtaaatggagcatgcttagagtactaaattgatctaatgagaatttggatgaacataaacttaattttggatttaatataacattccagtcagacgcatgtaaacagaatatttgaatctttgtacctccatacaagtgttagcctgccaggctgtaagcttaccttaattaaactttcagtgaaagtggaattattaagatataaatttatatttgtgctttttgtcagtgtgtaagctgtgtagaaattctttgatgtattagttgtattaatgtaaagtaaaacccattgttgaaactcccgtagctattatgcttttaatattgttttaatgatcttcctt

SEQ ID NO: 189342 - DNA, 960 bp, Homo Sapiens
tcgcacattttataaaatcctctccgaaattcttcataaccgcctttacagagtcgttgaaaatgtaattgatatacttagaaacatagtctctcttgttagtctggttgacagttatgctacttccattaggaattaagtttgtgtcgtttctgtcccagtgcacattaaaatggatgtaaaatacttcctcaaagttatcaccttcatcatccagaagtgtttgcaaattctttcccaaatcaggactgagttctttcaagtcttccaatgatggcatttggtccaaaagtttcttaaacagtgccagtgggaaagggaggttggcaacattgcaattgaacagggaaagtccacatagaaccccaaaaaagaagtatcttttcttctcaaatttaggcttgacaggaaaccacatgcaggaagccccttcaggatacatgaacatcccatattccggctggatcatctctgcaaacagacagtagaagaactctttcttgactcctccgaggtcatacccaatttctccactaaatgaaacccataactctttcctcaggtcttcattctcaaattgacttagctgattcaaaacatcctcaatcaagtgattccttctgactgttagatcaaacgtgggcctcaaagcgaattcagactctctttcttcctcaattgctgccgacctaagataagctttatgttttttactctctatttttaaaagtgtgtctgtatgtagtagtttaattttcgacagattattaaagataaatggaaagtgactgaatatgacgcagcattgtacattttctgaagcgtccacagtcattttccacaagtaccttctgcatacttctacaaaaaaattgagacggtgcaagagttcgtctacttggaaaatactttcaggtagttgacatttcacctggtttaccctgtgcagcttcttcccaa

SEQ ID NO: 189343 - DNA, 826 bp, Homo Sapiens
ctttgtacaaaaaagttggcaaaatgatgctgtggttctgagattatttgggacatttttggctctcctttagtggacacctagagccacagattcccttctttactaaacaaatcccatggattctgatttctgggtcttaggattttaaaagtgaagggatatttttcttatatttgtgagttcagttccgatggtgcccgtggtcaaaagcgaaaaacatggacaattcctattcattcttagcactttgacatgtcttggggaaaagcttacattttaatttaaaagaaagatcaattatatccatgcttaacaggatcagcaggagctttataaatgactttacagagactaataagggatttgatctttctttttttgttatcgaggcttttgaaatgtggaacttgtgtgttctgctttatatgttatattcaatatcttttcagatgcagtctatattttatgctgagttttaaaaatgaaatactttatgcaaacaggcaaaattggtaccaaagggaaacattaaccatgaggaagagcatttttctaaggagaacaggtgacaatatacacatgtgcgctaatcgtaaaatgagcatcttagtctttaaaacacatcagaattgaatacgaataatctatttgtcgatgaaataaacacaactctttgaggatttgagactacattcaccctttattcacagtcacttgcagttttgcttttctctgcatttctctgctgtaagatgactgttgcattgttgaattgtattttgagtggatatttttgtttggtaacaattaaaattttaaatcg

SEQ ID NO: 189344 - DNA, 660 bp, Homo Sapiens
ttggggattataattgtcaccgaagccttaaatccttctgtcttcctgactgaatgaaacttgaattggcagagcattttccttatggaagggatgagattcccagagacctgcattgctttctcctggttttatttaacaatcgacaaatgaaattcttacagcctgaaggcagacgtgtgcccagatgtgaaagagaccttcagtatcagccctaactcttctctcccaggaaggacttgctgggctctgtggccagctgtccagcccagccctgtgtgtgaatcgtttgtgacgtgtgcaaatgggaaaggaggggtttttacatctcctaaaggacctgatgccaacacaagtaggattgacttaaactcttaagcgcagcatattgctgtacacatttacagaatggttgctgagtgtctgtgtctgattttttcatgctggtcatgacctgaaggaaatttattagacgtataatgtatgtctggtgtttttaacttgatcatgatcagctctgaggtgcaacttcttcacatactgtacatacctgtgaccactcttgggagtgctgcagtctttaatcatgctgtttaaactgttgtggcacaagttctcttgtccaaataaaatttattaataagatctatagagagagat

SEQ ID NO: 189345 - DNA, 937 bp, Homo Sapiens
ttggcatctttgctccaggatcaaatattgaagactttgtgcattcactgaagcgtcaggatacagttttggaaatagatgacctcagaaacagaaatggctcagatgatccctcctacaatggagccatcatagtgtctggtgaccagaaggattagattttcagttgcatgtaataccaagaaatcgaattgttttccgttcttatgggaattgttagcaatgcccttattggaatttttaacttcacagagcttattcaaatggagagcaccttattttttcgtgatgacatagtgctggatcttggttttatagatgggtccatatttttgttgttgatcacaaactgcatttctccttatattggcataagcagcatcagtgattattaaaaaaagttcaatctcagttatggatttcaggcctctggccttcagcataatggtgtggacaggctctggtggacattccattacacttcttgattctcctttcaatacatttaatttactacttctcatttctgggattccagcttccatgggaactcatgtttgttttggtggtatgcataattggttgtgcagcttctcttatattcctcatgtacgtgctttcattcatcttttgcaagtggagaaaaaataatggcttttggtcttttggcttttttattgtcttaatatgtgtatccacaattctggtatcaactaagtaagaaaaacccaacttaattttgtgcatgatattcataccttcctttactttcctaggatatgtcgttattgatccagctcaactttatgtatatgagaaacttggacagtctggacaatagaataaatgaagtcaataaaaccattcttttaacaaacttaataccataccttcagagtgttattttcctttttgtcataaggtgtctggaaatgaa

SEQ ID NO: 189346 - DNA, 1075 bp, Homo Sapiens
tacaaaaaagttggctggaacttggaaaggctccctgtcctagtcttgatctgttctgggccaggtcccagcttgagctgcctctgagatttgggctgtgcggatctctggagtgagctctgtttcggttgacccaggtcatggaatggaaacggtgaggccccagtggctgttctggaagaaacagatctcctggcaaaggccccagcatctccctcactgaaaccaggtggccggctcctcggactctgctttatgttgcggtgagaactctgcccaggtgtgcagggtttggcttgtgggctgcttgctgctcatctgatttttgtcccagtagtccctgcgttcttcattcaaccccttctgggacttcagctcagagagcaccatcccgggggtcagggcctccccacaggagccctgcagtgtggtagcgccatggctgtctcaaaccaagcaaaggaaggaccctgaggccttcacgctaaccctcctcgagcaactgctgttggaaggcctccctgggcctggcccccaccctctgccacccagtcctcccagctgccatgtttcaaagacgacctttacctcctgcctttggattgactctgcatttgaccacggactccagtctgtgtgtagggagagagctgagtaggaggcctccactccggatcgaggcctgtatagggctcgtttccccacacatgcctatttctgaagaggcttctgtcttatttgaaggccagcccacacccagctactttaacaccaggtttatggaaaatgtcaggccttccccacaactcctgtctaactgctgtcgcccccctacttgctggctctcaaaagcctaggggagtccctgtggtcctgaattctttccccaaagacgaccagcatttaaccaacctaaggggcccaaaggccttggacaactgcatggagctgcactctagggagaacgaggggaaccagatgttagatctggggaggggagcacagtgtccctcccgtcagtgcctactcacctgtgaggcagcctttctgatggcctggcccaccttccccagaa

SEQ ID NO: 189347 - DNA, 536 bp, Homo Sapiens
  misc_feature (402)..(414): n is a, c, g, or t
ttggcccaagatgaggccttccttcctggagatcatcagcagcatcaaagaggagatggagcctggcttccgggaggtctccttctactacagcgaggagaacaagctgcccgagccggaggagctggacctggagccagagaacatggagagcgtccccctggacccctcggcctcctcgtcctccctgccactgcccgacagacactcaggacacaaggccgagaacggccccggccctggggtgctggtcctccgcgccagcttcgacgagagacagccttacgcccacatgaacgggggccgcaagaacgagcgggccttgccgctgccccagtcttcgacctgctgatccttggatcctgaatctgtgcaaacagtaacgtgtgcgcacgcgcagcnnnnnnnnnnnnnagagagagttttaacaatccattcacaagcctcctgtacctcagtggatcttcagaactgcccttgctgcccgcgggagacagcttctctgcagtaaaacacatttgggatgttcctttttt

SEQ ID NO: 189348 - DNA, 1255 bp, Homo Sapiens
ttggatgaacatcctcaacagcggccggttcagcatgggcagcgtcgtggctgggctgctcaagagattgattgaaatgactgctgagtacgcctgcacaaggaaacagtttaacaagaggctcagtgaatttggattgattcaggagaaatttgcactgatggctcagaaggcttacgtcatggagagtatgacctacctcacagcagggatgctggaccaacctggctttcccgactgctccatcgaggcagccatggtgaaggtgttcagctccgaggccgcctggcagtgtgtgagtgaggcgctgcagatcctcgggggcttgggctacacaagggactatccgtacgagcgcatactgcgtgacacccgcatcctcctcatcttcgagggaaccaatgagattctccggatgtacatcgccctgacgggtctgcagcatgccggccgcatcctgactaccaggatccatgagcttaaacaggccaaagtgagcacagtcatggataccgttggccggaggcttcgggactccctgggccgaactgtggacctggggctgacaggcaaccatggagttgtgcaccccagtcttgcggacagtgccaacaagtttgaggagaacacctactgcttcggccggaccgtggagacactgctgctccgctttggcaagaccatcatggaggagcagctggtactgaagcgggtggccaacatcctcatcaacctgtatggcatgacggccgtgctgtcgcgggccagccgctccatccgcattgggctccgcaaccacgaccacgaggttctcttggccaacaccttctgcgtggaagcttacttgcagaatctcttcagcctctctcagctggacaagtatgctccagaaaacctagatgagcagattaagaaagtgtcccagcagatccttgagaagcgagcctatatctgtgcccaccctctggacaggacatgctgaggcaggggacagtgtcccctgctaccgcccgcccctacccatggcccgttgctggatgactgttactcttttttcagaatgtgttgggattatcacaggttaagccttttgttccccgtctgcaccttgaaaggttgtcgcctggcctgggagagcctcttccaggttttgacctgcaggcagtgctctctaacaggaccatcaagcttctggaactgagccggagagaaagaatggaattgctgacccctgcaaactggcgggtattctggg

SEQ ID NO: 189349 - DNA, 1053 bp, Homo Sapiens
ttggcgaaccaaagccctctttgcctttgaagaaattgatggtgttgacctgtgcttctttggcatgcatgttcaagagtatggctctgactgccctccacccaaccagaggagagtatacatatcttacctcgatagtgttcatttcttccgtcctaaatgcttgaggactgcagtctatcatgaaatcctaattggatatttagaatatgtcaagaaattaggttacacaacagggcatatttgggcatgtccaccaagtgagggagatgattatatcttccattgccatcctcctgaccagaagatacccaagcccaagcgactgcaggaatggtacaaaaaaatgcttgacaaggctgtatcagagcgtattgtccatgactacaaggatatttttaaacaagctactgaagatagattaacaagtgcaaaggaattgccttatttcgagggtgatttctggcccaatgttctggaagaaagcattaaggaactggaacaggaggaagaagagagaaaacgagaggaaaacaccagcaatgaaagcacagatgtgaccaagggagacagcaaaaatgctaaaaagaagaataataagaaaaccagcaaaaataagagcagcctgagtaggggcaacaagaagaaacccgggatgcccaatgtatctaacgacctctcacagaaactatatgccaccatggagaagcataaagaggtcttctttgtgatccgcctcattgctggccctgctgccaactccctgcctcccattgttgatcctgatcctctcatcccctgcgatctgatggatggtcgggatgcgtttctcacgctggcaagggacaagcacctggagttctcttcactccgaagagcccagtggtccaccatgtgcatgctggtggagctgcacacgcagagccaggaccgctttgtctacacctgcaatgaatgcaagcaccatgtggagacacgctggcactgtactgtctgtgaggattatgacttgtgtatcacctgctataacactaaaaaccatgaccacaaaat

SEQ ID NO: 189350 - DNA, 775 bp, Homo Sapiens
tttgtacaaaaaagttggcatctatataatttccctccaccaagaagagcgtctgacatggcctaaattaatcttccacgttttcatcatcattttgggcgtggctaacctgattgttcagttttttatgtgaaatacctcaactgtttttttcaagagctctcatgatattttgagccttgacaacagttctatataaattcacttgtaaatgctgctgttgtgtaattctaaatattttctaagataatttgaaagcaagggaaatagtggccccttaataagtatttttttattggggtggggaaaggggcaaaaagaatgatcttagtgtctttacctttctcatattaactcacctctttattctgtggtcttttctgaatagaaatgtatgccctaggaagaaatcatgctgggttttgcttttagagataaaaggtggtggatttattttgcctgcagtaaagattctcagggtgtcagagcagcatattgtcaaatcctgcttctgttttatgtttcagtgtattcactttcattttcttacttactagaccatttctgcagtttgcccaaacctctactgtttgggacagtaagccaaatacctcatttttaaaaagaagttttcatggcatcagtgttaataaagtacatttttaactgagtcttaatctctatttgaagaaaaagtagagacaaaagtaatgtcaatgtaatccccaggatcatgaaatgtatacaaaataaagtaggagagtttgttgctgtc

SEQ ID NO: 189351 - DNA, 429 bp, Homo Sapiens
tatcaggaatttccaattcccatttccatttaacaagagaactaactaactgaattaatcctgccttctaatgtttctggaacacatcctctaccttcgcctgccggctcctctgatgtcccaagggccttttggtagcagttagcatcatttagcaaatacagagtggaaagagtgtgccggaggcccgggcttgggtgtgctgtctgctcctgtggcctgtcaggcaggtccagggagacacaagggaagcctgagggaccctgactccccttgaagaatttctccatacagcaagacagtgtggctttatcccagatccctgactcctaaaaagagtctaaaaagagctaagttctctctaaattctttaatggttcatgaccaaattcttggttctaagactttgaatttttaaataatagccaa

SEQ ID NO: 189352 - DNA, 507 bp, Homo Sapiens
tgggtcgagactggtacccggaggagctgtctcaccaggagaccacgtcctggaagtgtccgggactcgcgggacctgtggctgcagaccccgccggcacgcaggcccagagctggcgcactcctgaggatgagactctgggggccctagccggggtccacgggagggctgtccttggggactctaggatggcttcgttctggcccggctcacttctggagctgtgagacccaagacaaaaggggctgagggatttctcattgacaagagttcgtgcgggaaaaccacctgatccctagggatttgtcatcttaagactcaaaaggcttaataccaggaaccaccttggcaagatatttacccaccggccatctctgtttactcatgaatgttaaatgttaaaacgcagcgctctaaccctgcatattatttacttgcaaatgtctgtaatctgtaattgtgatgcctctgatggaataaattatctttttcagtctcctctataaa

SEQ ID NO: 189353 - DNA, 882 bp, Homo Sapiens
tggagtgaataaatagggttgttcggcagtacttatatttttattcagttccatttggtcataaaagtaagcatagttgtgtgtgaatgtctgatgggaccaaattaaatccgtgaatctccgacaagattttcagaagcaagaccacagtacggctcccacacttgcctaccctgttgtacaccacctagcttgggaaaggtagtaccttactaggaggtgggtccatggtcatccaagtaagtggaatttcccaagtactgccgcaggtcgagcaggaagcgagggggtcccccgctgagctgatagaggagggagcccaggcagaagaccagcagggtggccatgcagaagccgtagtcccggagggagaagcgcaggaaaggcagcaggggcacccgacgcttccagctgcccaggcccggaggggcgccccccataggggccccatggggccagggatccgcgccgccgccgggatgctgctgcttcttcttcatcgcctgctccgctgcctcccacagcctgcccgtgccaggaaaaggtcacccatccgccgcgaggaggagagcccggctggccggctgcacatggggagggccgcgcggagggcagccgggtgggggcggggaggggccgaagttgccgggctcaggagactttcttcggcatggtccccgccgccgcggcccgagcggccgaggtgtccggccccggttcggggcgctgcccgtgacggggcgccgcgcccgtccggcgcccgctagcgtccccacgccccgcgccccgccgcgcctcgggctcgcttgcggccgccggggctcgcctccagcgccagcgtggaccccccggctttgtgtctgtagccaacttttttgtaca

SEQ ID NO: 189354 - DNA, 924 bp, Homo Sapiens
actttgtacaaaaaagttggctgctgagaaaggcaacagcgactggccagagaggcctggactgacacagactggccctggacacagacggatgctgcggagacacacggtagaggatgcggtcgtgtcccagggcccggaggctgctggccccctctccactccccaagaggttagtgcttcccggtcctaacaggaatgaggagttgttgaacccactgctaggaagcaaggatgcaacaagatgatgctgagcgtgaacacatctgagaactaaatgtgcttccatgagactggcttgagaagtcttcagcaccaagttcctgaaagcttttctgtggcaggaaagaatgcaacaaaaaagttaaccaccaccatctctctcctcttcaaagctaatgaatacaattgaaacagacaaaaattccagtagcatccagatccttaagccagaggtgcatgcttctttttaagtatgagggtttgttggtcacagtgggagaggtttcaccaccgcattctgacctcctcctcccaaaaggtgctaaacctctctgacctgtgtacattcacaaaccacagctagaattcctccacctaggattaagctggagagaagtaagtaatttaggtttcatggtactgtagaggccaggctgaaatgtcatatctgaaggaagaaagcagcagctggacaatgtttctttgcaaagcaacactcgaaccaaaagatgcctcaatcccattttgatattcattttagtgaaaggatgcatcagacctgttccacatcatgcacatggggaaagggtggttatcattttccttctaacaagtaggtacagatattcggttactacacgtgcacctgtagcagtatttctagaaacatccctttttgttgaaaacctcccttgaaatgtc

SEQ ID NO: 189355 - DNA, 834 bp, Homo Sapiens
ttgatgagcaatgcttctctcttataatcgcccactcttgtacaaaaaagttgggtttatatttttagcctaaattttcaggagtgaaaagaaaaagaggaaggaagaaacccctctcaggcaatcatgtacagccacccgaaacaatgaaatgtaatacattcataagacaagtgaaagaagagcatggcagacacacagatgcaactgtgaaagttccttttcttaagaaatgcaaggaagcaggacttcttaattacttacttgaagaaatattagacaaagttcattcaattccagaaaaactcatggatgagactacttcagaatcagactatgaagaaatcgggagtgcactttttgactgtagattgttcgaagacacatttgtaaattttcaagcagcaatagagaaaaaaattcatgcatctcaacaaaggtggcagcagttgaaggaagagattgagctacttcaggacttaaaacaaaccttgtgctcttttcaagaaaatagagatcttatgtcaagttctacatcaatatcatccctgtcttattagggattaccgtttcctaagccaagagtcatgtcaaattgcaatcaggctcaaaaccagagaccaggctgtgaaatccacacatctttagaactagtcgtctcctcttggcctcagcagctcttccctgttcttactggttgacattttgatcactctttgcacactcttgtgtttttttgctcactgtcacatttcccagcacctaatatgctcagtaaatgtttgtggaataagtgcataaaatgttcttaacctttgattctacttacagccc

SEQ ID NO: 189356 - DNA, 759 bp, Homo Sapiens
caaattgatgagcaatgcttaacataaaaaaccaactttgtacaaaaaagttgggattgaccaatatctgggacttgtgaggactcacataaatgctgttgtggcaaagattcaggctaaaatcccaggcgctaagaggcacgctgagtaaactgatttcccaccggggactggacacaaacaggaatgtctggagtggtaacagctctcttcttactcattactgcaaattgattgtctttcccccctccctccagtaccataatcttagagacaaaccttaaaacagctgtttttaggctgttccttgtactcttaggatatttgagtcacttgtgtcaaccactaaagtatagagaaaagtgtattagatgtggtttttaattttgtgttgctaaaaaaagtgcatgatggtgagagcccaagttatctttccctcttcggtgttcttcttctcttctctgcaatgcttctgtagcttctaatgttccccgtggctaggcctttcctgccgagtgctctgatgcaatagtggaaatcgcttatatgtccttgggttgctggttggattaatctttaataacaatatatagaattgtagactgatgttttagcatttttccaacacacacaacgtaaaaataaaagcagtcgaccgcacttatggtaatcagttttgtataacttaaaataattaaataaatgaataaatcccacccaaacatgcagtacttttgttgtatgggattggtgggctga

SEQ ID NO: 189357 - DNA, 912 bp, Homo Sapiens
actttgtacaaaaaagttggctgagaatgactttcagtctctctgaaaatgaaaagcttaggaccagaagagagaattggagctgtacgagtgtgtctcggatctggtgttgttaggtgggccacggcggctccagcagggtctggttaaggggtccagcccagcactggaccattccgtctcctgctctggacttgccctctcccttcctggcactctcatgttgcataccctgaccccagtgctgctctaagcaccgtccctgcccagccccacttctccatcgcagccccaccttggctgctgagccaggagctaaaaccttagatatctggttctgttttgcacccagcttggcagatgtggatttgaatccaagccttgtgtctgcccctatgtgacagctctatattttatccccgttttataaaagaggaaactgaagttctgaaaatctccttccagggccccagctaactaatgccataggtgagattcaaaccttcatccttctgtctccagggcctgatctttaccactgcaggggctgcaggccgttaagtggacaggaagtggccccacatagcccgagcagggtctggaagcatcctgtgctgtgcacacctgctctctcctctctcccaggcaggcagctgcaggcgctctcctccttctctgcctgtttccctcctcccttcctttccaccctggtgtgggttctcctgttctctctgtgctcttgcattctctcattcccttttcctctattgagcagagcctggagttttgagactatggaatccaacctccccattgcacagatggggaaactgaggcttagaagagaatgaaacttgtggaggagcttatacagagcctctgggggaaaaagagcccttatttgtggggtga

SEQ ID NO: 189358 - DNA, 900 bp, Homo Sapiens
ttggagctagaattgggttaggtgagaaagaaagttaaggttaaggctagagttgtctttaagggttagggttaggaccaggttaggtcagggttggattgggtttagattggggccagtgctggtgttagtgatagtgtcaggatggaggttaggtttggagtaagcgttgttgctgaagtgagttcaggctagcattaaattgtaagttctgaagctgatttggttatggggtctttcccctgtatactaccagttgtgtctttagatggcacacaagtccaaataagtggtcatacttctttattcagggtctcagctgcctgtacacctgctgcctacatcttcttggcaacaaagttacctgccacaggctctgctgagcctagttcctggtcagtaataactgaacagtgcattttggctttggatgtgtctgtggacaagcttgctgagtttctctaccatattctgagcacacggtctcttttgttctaacttcagcttcactgacactgggttgagcactactgtatgtggagggtttggtgattgggaatggatgggggacagtgaggaggacacaccagcccattagttgttaatcatcaatcacatctgattgttgaaggttattaaattaaaagaaagatcatttgtaacatactctttgtatatatttattatatgaaaggtgcaatattttattttgtacagtatgtaataaagacatgggacatatatttttcttattaacaaaatttcatattaaattgcttcactttgtatttaaagttaaaagttactatttttcatttgctattgtactttcattgttgtcattcaattgacattcctgtgtactgtattttactactgtttttataacatgagagttaa

SEQ ID NO: 189359 - DNA, 401 bp, Homo Sapiens
actttgtacaaaaaagttggctcttatcctaattaatttttctttagcccttattttgatgagtattatgccgaatacaggcagccctcacttttcatggcagtgcaagattgcaaaaatgactgtgcaacctgaaacccaggaaagcagtctccatagtcaatcagaaaaacaatgatcattctgtgacctttaccattttttgtcaaaatattagaaactctcacactctcagttacaaatgtagaggacaatgaaaatataatgaaataaatatttatttgtgcactacaattcaaagcattagaaacattgagagttcaagtgctgtttctttgtaaaaatgtatccagagtagttggaagagtgcttgcctttttttgtatatttctaatatggag

SEQ ID NO: 189360 - DNA, 916 bp, Homo Sapiens
cataaaagacaactttgtacaaaaaagttgggtttgattgtttacttttctgcattttctaaattgtctacagtgggcccttttgtagtaagaaaagaaatgttttaaaaattttgaaaggtttgaaaaccagcaaatagaaaaagaccccttaacattttcctctgaagaggccactgaaacatggatgtgtagtaagtcaggcctgcagggagctgtggctataggtggcttcagctggagccatccatggctctggctgggaccttggtaggttccagggttcctgggttctttccttacttcttgcccagctggattcactcctgcttgcgaaaagctgacaaaaacaaggacaacaagatgagcttcaaggagctgcagaacttcctgaaggagctcaacatccaggtggacgacagctatgcccggaagatcttcagggagtgtgaccactcccagacagactccctggaggacgaggagattgaggccttctacaagatgctgacccagcgggtggagatcgaccgcaccttcgccgaggccgcgggctcaggggagactctgtcggtggatcagttagtgacgttcctgcagcaccagcagcgggaggaggcggcagggcctgcgctggccctctccctcattgagcgctacgagcccagcgagactgccaaggcgcagcggcagatgaccaaggacggcttcctcatgtacttactgtcggctgacggcagcgccttcagcctggcacaccgccgtgtctaccaggacatgggccagccacttagccactacctggtgtcctcttcacacaacacctacctgctggaggaccagctagcccgggccagcatcactgaagcctacatcctggtgctgctcaggagccttgggtcgggagtctgggtgg

SEQ ID NO: 189361 - DNA, 879 bp, Homo Sapiens
ctttgtacaaaaaagttggaacaggcctgacgaaaggagagattaaaaaatggtttagtgacacaaggtacaaccagagaaattcaaagagtaatcagtgcttacatctcaacaatgattcctctaccaccattattatagactccagtgatgaaaccacggaatccccaactgttggtactgcacagcctaagcaatcctggaatccttttcctgactttactccccaaaagtttaaagagaaaactgcagagcagcttcgtgtccttcaggcaagttttctcaacagctctgtacttacagatgaagaattaaataggttaagggcacaaaccaaacttaccagaagagaaatcgatgcttggtttacagagaagaagaaatcaaaagctttaaaggaagagaaaatggaaatagatgaaagtaatgcaggtagttccaaagaagaagctggagaaacttctcctgcagatgaatctggtgcacctaagtcagggagtacaggcaagatatgtaaaaaaacacctgagcagctgcacatgcttaagagtgcatttgtccggacacagtggccatcaccagaagagtatgacaagttggccaaagaaagcgggcttgctagaacagacatagttagttggtttggggacacccgttatgcttggaagaatggaaacttgaaatggtactactactatcagagcgccaattcaagtagtatgaatggtctgtcttcccttaggaaaagagggagagggagacccaaaggacggggaagaggaagaccgcgtgggcggcctagaggagcaaaagaattaaacaactgggacaggggaccatcactcataaaatttaaaacctggaactgcaatacttaag

SEQ ID NO: 189362 - DNA, 910 bp, Homo Sapiens
  misc_feature (528)..(536): n is a, c, g, or t
  misc_feature (642)..(654): n is a, c, g, or t
ttggcacagtggcttccgggcccggacgccatttccagcggttgctggttctgacgggttgtagtctgccaggacaatgagttatgactaccatcagaactggggccgtgatgggggtccccgcagctccggtgggggctatggaggggggccagcagggggtcatggaggtaaccgaggctccggaggaggcggcggcggcggagggggtggtcgaggcggcaggggccggcatcccgggcacctgaaaggccgcgaaatcggcatgtggtacgcgaaaaaacaggggcagaagaacaaggaagcggagaggcaagagagagctgtagtacacatggatgaacgacgagaagaacaaattgtacagttactgaattctgttcaagcgaagaatgataaagagtcagaagcacagatatcctggtttgctcctgaggatcatggatacggtactgaagtttctactaagaacacaccatgctcagagaacaaacttgacatccaggaaaagaagttgataaatcaagnnnnnnnnntgtttagaatcaggaacagatcatatattgaccgagattctgagtatctcttgcaagaaaatgaaccagatggaactttagaccaaaaattattggaagatttacnnnnnnnnnnnnntgaccttcggtatattgaaatgcagcatttcagagaaaagctgccttcgtatggaatgcaaaaggaattggtaaatttaattgataaccatcacgtaacagtaataagtggtgaaactggttgtggcaaaaccactcaagttactcagttcattttggataactacattgaaagaggaaaaggatctgcttgcagaatagtttgtactcagccaagaaggaattagtgccatttcagttgcggaaagagtagctgc

SEQ ID NO: 189363 - DNA, 840 bp, Homo Sapiens
  misc_feature (350)..(418): n is a, c, g, or t
  misc_feature (458)..(467): n is a, c, g, or t
ctttgtacaaaaaagttggcccattcgcaaatcatatgcaattgaagtgagcagcatgagcatctgggtcatgagggccttcatttacgtaaatttgtcactaaaacccagtagtagctctacaaaatcttaaactgctgcagtgctcaaggagatggaatatctttgtcattggtgctgaggagagcatttcggtagaagacagttgcgcctgaagattgagtgtaaatcattcaaaccagtggttctcagtgttggctgtatacactttgtagtcactttggaatgttggaagacacatcgatgcttgggttccgtatgccaagattctgatgttggtctggaatatnnnnnnnnnnnnnnnnnnnnnnnnnnnnnnnnnnnnnnnnnnnnnnnnnnnnnnnnnnnnnnnnnnnnnttgtaaaattcaccttgagttttctcatctgcaaaatagnnnnnnnnnntccttgctccctcccttcactacctcacaaggatattgagggtaaaggagaaaataatgggaaagtgcttgtgccgtggatgaaaagtgctattaaaagtcaaaggagtgttctgtttcaattcatagtatgatcagggaaagtgtaactgagtatactttgttgacttgggaaacctggagcactttctttggttggttaacgaagcatgcagatgtggaagcagacgttactattatccctactatggtcttctgtcatactgagacaggctgttttaattacctggttttacataggaaagaagaaatattaacgcttaaagtttgtaatgatcaatggctcataattcattaaatcttttcatacaagg

SEQ ID NO: 189364 - DNA, 932 bp, Homo Sapiens
tccccaccaaacaggccacagctgggcagcaagtgttacagctccttgtcaggagccagggcccccagtcctaccccagagtcctcacccaggacagctgatgtgttgggggttggggggcgtaggtgttgggagactagtgaagaaggcccccaggggaaggctgggtgacccctttctgcccccagggttcgattttgcccctgcagccacccaggcaggctcacctgacgcagcacaggtagattgagtgtaggatgacagtggaggcacagaagtagtccattttctctgtgaggtcagtgtccctggtgtggaagactgtggaccagaaccatgcattgagggacaccctttcctcagatttgggaggtagtggtatcattaagaatgcaagccctacagccagactgccagggttcagttcctggctctgcatttcctgtgtgtccttgggcaagttatttagccttgctgtgcctcagttttctcatccaggcgaaggccacacaggtgtggtacatgggggaggaggctggcacgaaggtgcggtagcggcagagcatcaccaggctggccaggccattgagaagcgaggccacggccgatgccggctcttgaaagaacaggaaccgggagaagggccacttgccatggaactgaggcactttgtgaccttcctggaggtagagcccaacggtgacccacatacactcatacttacagtcgtcccgacaggtccagcctgctagactcatgtagattggctggcgggagcggaagtgattcagagcgcccccagagcagttctgctcttcgcactgcagtacgcagtcgcggtacaccggctcacggtcgccctgggagccgctcgccagcgccgctgccccagctagcaggaccaaccgcgccgccaggccggccatccccaa

SEQ ID NO: 189365 - DNA, 476 bp, Homo Sapiens
ttggcgatgcttctgtccttataaaagagtggcctttgtgagccgtggcacgcagctgctgtccagcggttcggatggcctcgtgaagctctggaccatcaagaacaacgagtgtgtgcggacgctggatgcccacgaggacaaggtctgggggctgcactgcagccggctggacgaccacgccctcactggggccagtgactcccgagtcatcctctggaaggatgtgaccgaggcggagcaggcagaggagcaggccaggcaagaggagcaggtggtcaggcagcaagagctggacaacctgctgcatgagaagcggtacctgcgggcgctgggcctggccatctccctggatcggccccacaccgtgctgactgtcatccaggccatccggagggaccctgatgcctgcgagaagctggatgccaccatgctctcactgcggcgcgaccaaaaagaggcactgctgcgcttct

SEQ ID NO: 189366 - DNA, 774 bp, Homo Sapiens
ttggttttctaagtaatattttttagccttgtcaccaataagaaatttttttagaaggacatatgattaaatcactcatccattccatgatgttttgacaacaaatttacttttttttatacatattttcttaatattgcagcagacctataagtaacaatgctgggcttctgttttgttttcaccccaggttctcctcaaaatctaagtctatggacaaatcagatgaagaactccagtttcccaaagagttgatggaggactggagcaccatggaggtgtgtgtggactgcaagaagttcatttcggaaatcatcagttcaagccggcgcagtctggtgttggccaacaaaagggcccgattgaaaaggaaaacgcagtctttctacatgtcctcgccaggcccctcggagtactgcccttcagagaggacgatcagtgagatctgagcctcgtgcctttcagctgcttttgtgctacgagtcagcgtccgtgcgcgaggacactgagccgggctggctctcctttctgtggttttatttaatgggcttgaatttgcattagatcagatttttgccgcatcacattgttccacagactgaatgctgtgttcgtatcgattgatgaaacgtgacaggtccgccaattgctcgtttgcactgagagaggacaacagtttgaaacttacttttgtgtgtgtgtggctttggaagccagtagctacttccttagttcagttctttactgttcctcgaataatctcctgactaaggc

SEQ ID NO: 189367 - DNA, 587 bp, Homo Sapiens
ctttgtacaaaaaagttgggtgctttggccctaatagcactggacaacaccacgaccacatggaaacatatttttggaagcaaaactttaattttatataacgtatgctatggagagctaagacaatttaaggactacttgttttctattttttttcttaataaaatggaatccactgtgttgaagactcttgatatcatgtgcttgtctaaccattttttgttttataaattagaataaaatatagttgtgataatggtcatcgaatggatttgtttggaaagctacatcttatttgtgaaatgttttttaaatcagagtaactatcaactgattcagctttttgttgttttgttcttggctataatacttgtgactcatgaagaattatgttgacaaacaggataaattccacatgcattttatttcccagtgagttgtataaactttatttttgttgaaggttgtatgttaaatcaatgttacattcttatatcacttcttgagaaggaagttccgatttgaaattgtatcatttccttcaaaatgaagggcagtgcttaattaaataaaagattgatgatatc

SEQ ID NO: 189368 - DNA, 891 bp, Homo Sapiens
ttggctcgggaccgggagcagcggctctggcggtcgtggcggtcggagatccgagagctctgcttctctgaaaagcgtgtggctttctggacttgtttcaggccacccacgagccagcgggaaaggattgccagccagagaaagacgaactccgaagtcccaatgcacagatcagcccccagtcaaaccaccaagaggagccgatcgccattttccactactcgtcgtagttgggacgacagcgagagttcgggaaccaacctgaatattgataatgaggactattccaggtatccgccaagagagtacagagcttcgggtagcagaagaggaatggcctatggacatattgactcttatggggcagatgatagtgaggaggagggggctgggcctgttgagcgaccgccagtgagagggaaaactggcaagtttaaagatgataagctgtatgacccagagaaaggggcaaggtctttggctgggccacctccacatttctctagttttagccgtgatgtgagagaggagcgagacaagttagacccagtccctgcagcaagatgctcagctagcagagctgacttcctgccacaaagtagtgtggcctcacagtcgtcttctgaaggcaagctggctacaaaaggtgacagctcggagagggagagaagggagcaaaatttacctgcacgtcccagcagggctcctgtgagtatttgtggtggtgggggaaaacacctcaaagagtgcagaggaacctgtggtcaggcccaaaatcagaaacctggcaagtccaaactgcgtgaaaccaaaaattttttttgatactgatgatgatgacgatatgccacacagtacttccaggtggagggataccgccaatgacaatga

SEQ ID NO: 189369 - DNA, 1262 bp, Homo Sapiens
ttggcagacagtgatctatcaagctagccaggctcttaactgctgtgttgatgaagaacatggaaaagggtccctagaagaagctgaagcagaaagacttcttctaattgcaactgggaagagaacacttttgattgatgaattgaataaattgaagaacgaaggacctcagaggaagaataaggctagtccccaaagtgaatttatgccatccaaaggatcagttactttgtcagaaatccgcttgcctctaaaagcagattttgtctgcagtacggttcagaaaccagatgcagcaaattactattacttaattatactaaaagcaggagctgaaaatatggtagccacaccattagcaagtacttcaaactctcttaacggtgatgctctgacattcactaccacatttactctgcaagatgtatccaatgactttgaaataaatattgaagtttacagcttggtgcaaaagaaagatccctcaggccttgataagaagaaaaaaacatccaagtccaaggctattactccaaagcgactcctcacatctataaccacaaaaagcaacattcattcttcagtcatggccagtccaggaggtcttagtgctgtgcgaaccagcaacttcgcccttgttggatcttacacattatcattgtcttcagtaggaaatactaagtttgttctggacaaggtcccctttttatcttctttggaaggtcatatttatttaaaaataaaatgtcaagtgaattccagtgttgaagaaagaggttttctaaccatatttgaagatgttagtggttttggtgcctggcatcgaagatggtgtgttctttctggaaactgtatatcttattggacttatccagatgatgagaaacgcaagaatcccataggaaggataaatctggctaattgtaccagtcgtcagatagaaccagccaacagagaattttgtgcaagacgcaacacttttgaattaattactgtccgaccacaaagagaagatgaccgagagactcttgtcagccaatgcagggacacactctgtgttaccaagaactggctgtctgcagatactaaagaagagcgggatctctggatgcaaaaactcaatcaagttcttgttgatattcgcctctgggcaacctgatgcttgctacaaacctattggaaagccttaaaccgggaaatttccatgctatctagaggtttttgatgtcatcttaagaaacacacttaagagcatcagattt

SEQ ID NO: 189370 - DNA, 1047 bp, Homo Sapiens
ttggctctttgatgccaaatcagcaaccattgttgttatgatctgcagtcttcctggtgacactggaatctctctctctgccgcctcagtttgtctgctggtctcttggggggccaggccctgcacgtctctcctacccggcctcaaatggtgctgctgcccatgatggtaccacaccagggcctcagcctggcccctcaccacataccctttgccttttagaactcagtgccatcctgggtgcccagggcagagcaggctttgttcgcacctcatctgctgcagaaccacatcctgaggagtctcagcttatcctggagggaattgggaacagtgtcactgggaagtgaaggcctagccctgtggcttccaccagtctcctcctgcagtgccacgtggtggcatttctcgcctcacaccaagaagcagcaagtggaaaatttcaggatacaaagcacataacaccccataagagatgattatgtttttagaagcaagagcaaaattatgaaacctctagagatttgggtcatgttactccatttgatgaagattctcactaccgcccgctcctcccataggagcctacactaagtccaagtgtgagccattcacagactagaacacaaggagggagagagactcttaaacgtaaataaaaatgcaattcactcacaactctaaatgataattgacatttcagcctctttcttttaggcaaaacagaagatacacactattaacagttatttgaagccttaaattacaatagcctgttaggtgatcggctttctgccttggctttctgatgcagcacattttaagatttgcctttaaagctttgagccttgagattaggttagttaggaagaggacaacaaagggaagagattattctaataaaacttccacagagggaagaaaattgaggagcttcagatctctaaagccaaattcaacctgatctttctaggttggttataaagctggtccacttccaggaagtgatgtgtaggtgaataggaacaaaaggtgaagaagcaccaa

SEQ ID NO: 189371 - DNA, 1428 bp, Homo Sapiens
ttggctctcgtctgagcgtgtggtccgtgggccgtgtggcagcctcagacaaggacctcacccccacctgtgctccgggaaagcacggagggtagcagggcccctggggtgggcactgagggggcgggttccatccccccaggacttctcctacgatgagtccaaagtggagtttgacgtggacgcgcccagtggggtggtgatggagggctacctcttcaagagggccagcaacgctttcaagacatggaaccggcgctggttctccattcagaacagccagctggtctaccagaagaagctcaaggatgccctcaccgtggtggtggatgacctccgcctgtgctctgtgaagccgtgtgaggacatcgagcggaggttctgcttcgaggtgctgtcacccaccaagagctgcatgctgcaggctgactccgagaagctgcggcaagcctgggtccaggctgtgcaggccagcatcgcctccgcctaccgcgagagccctgacagttgctatagcgagaggctggaccgcacagcatccccgtccacgagcagcatcgactccgccaccgacactcgggagcgtggcgtgaagggcgagagtgtgctgcagcgtgtgcagagtgtggccggcaacagccagtgcggcgactgcggccagccggacccccgctgggccagcatcaacctgggcgtgctgctctgcattgagtgctccggcatccacaggagcctgggtgtccactgctccaaggtgcggtccctgacgctggactcgtgggagcctgagctgctaaagctgatgtgtgagcttggaaacagcgctgtgaatcagatctatgaggcccagtgtgagggtgcaggcagcaggaaacccacagccagcagctcccggcaggacaaggaggcctggatcaaggacaaatacgtggaaaagaagtttctgcggaaggcgcccatggcaccagccctggaggccccaagacgctggagggtgcagaagtgcctgcggccccacagctctccccgcgctcccactgcccgccgcaaggtccggcttgagcccgttctgccctgtgtggccgctctgtcctcagtgggcaccctggatcgtaagttccgccgagactccctcttctgtcccgacgagctggactcgctcttctcctacttcgacgcaggggccgcaggggctggccctcgcagtctgagtagcgacagtggccttgggggcagctcggatggcagctcggacgtcctggctttcggctcgggctctgtggtggacagcgtcactgaggaggagggtgcagagtcggaggagtccagcggtgaggcagacggggacactgaggccgaggcctggggcctggcggacgtgcgcgagctgcaccccggggctcttgacgcaccgcgcagcgcgtgccc

SEQ ID NO: 189372 - DNA, 1592 bp, Homo Sapiens
  misc_feature (924)..(934): n is a, c, g, or t
  misc_feature (1384)..(1407): n is a, c, g, or t
ttgggggcgcggaggtgattccacactgaggcgagcgcggcggccggggtggtagtggcagtgttcgtgtgctcaggtctgaatcgccgagggaggaggcggtggaggaagaggtggcggcggtggcggtggtcgtagcggtggcggaggaggcgggtacgaatcagctgcgggcggagacatggccaacatcgcggtgcagcgaatcaagcgggagttcaaggaggtgctgaagagcgaggagacgagcaaaaatcaaattaaagtagatcttgtagatgagaattttacagaattaagaggagaaatagcaggacctccagacacaccatatgaaggaggaagataccaactagagataaaaataccagaaacatacccatttaatccccctaaggtccggtttatcactaaaatatggcatcctaatattagttccgtcacaggggctatttgtttggatatcctgaaagatcaatgggcagctgcaatgactctccgcacggtattattgtcattgcaagcactattggcagctgcagagccagatgatccacaggatgctgtagtagcaaatcagtacaaacaaaatcccgaaatgttcaaacagacagctcgactttgggcacatgtgtatgctggagcaccagtttctagtccagaatacaccaaaaaaatagaaaacctatgtgctatgggctttgataggaatgcagtaatagtggccttgtcttcaaaatcatgggatgtagagactgcaacagaattgcttctgagtaactgaggcatagagagctgctgatatagtcaagcttgcctcttcttgaggagcaccaacatctgttatttttaggattctgcatagatttcttttaaactggcattcttgcctaatgatgttatctaggcaccattggagactgnnnnnnnnnnntccctgctctgtaaataaagctaattaaacgtctgtgtaaatttaaaaaggggaaatactttaattttttttcttaatagtgtaaaaattccctgagctaagctaaaaccatggaagaaacatgctactttagtgtttagcagtgtaccaagactagcaagagtttgcttcaggattttgttgaataattaagataatattttgagtgtgtcagggccattcaaattgttggtgttgcatcacagctaccttaactgtttttaacatggatcctctgtgcctgtgaatttacttgcatgcttgtacttgacttcttaggatgggtagctgaaaagaccaccattttaagcatttgagaattcttaaatatgaaatttattcagaattgaagatggtgacctattcagagcctttttgtccttgtcaacagactgggacagtgtctgattnnnnnnnnnnnnnnnnnnnnnnnngccttgccacacacagctaatattctaatggtaaattttctctgtatcaggtggggaaatgtgctgaagacagtatgtatcccttgcttcatttttaggtcgtaggttgggaatgtcttgtcccagttcttcaacactctaaatttttcttaagtaatgtaaaaatggaactgccaattttattt

SEQ ID NO: 189373 - DNA, 1036 bp, Homo Sapiens
  misc_feature (415)..(427): n is a, c, g, or t
ttggaatcttacacgtctactctaaactgctctaatgaagtttcagtgaccttgagggctaaagattgttcttctgggtaagagctcttgggctggtttttcagagcagagttcttgttgtgggtagactgtgactaggttcacagcctttgtggaacattccgtataacggcattgtggaagcaataactagttcctatgaaagaaccagagctgggaagatggctgggaagccaggccaaagtgggggcaacagcttgcttctctttctcttctcaccctcagtttgtatgggaaaatggagatgtcctctccactttatcccacgatatctaaatgaaaaagaaagaaaacccacacacaaagcaaaaactcaagtattaagagcacatatttttgacccagtggaggcttnnnnnnnnnnnnntccaagaacacaattcattttcaccacctctggtgttcagagggggcttttaaaaaagcgtgtatgctgggatacccattaaaaccattttctagaaggctaccatgagctgcactttttggggtgggaaaggtgaatgccagtggggatgcggggggatgagggtaggagggacttatagaaggggatttgtggctgtgggggagaaggttctacagcataagccttatcctgccagccaaggggatttattctaagagaagtgcatgtgaagaatggttgccactgttattagattgacaagatgttaatttctctgtaggttgtaactttaaaaataaatgaaattatttaagggttatgctgcactagtattccttagaggaaacagttctttaaagttaggaaagggagtaggcaggcatgtgttggcaaaggctgttaatagtagttaagtgttaagactgcttttctttaacgttttcatggtaatgcatatttagagcactgtatttttgtcttgttaccaaaatttagcatttctaaaagaaaaaagaaaccctctttcaaactgttaattctgtcacagcctgtatattttattcattt

SEQ ID NO: 189374 - DNA, 1363 bp, Homo Sapiens
gcactgccagacccgtagtggttttccttaaagtgggttacagtcaatattgctatgcgtaggagattagtacaggcctacagatcagtttttataatattctttatcaataggttcacaatttaaatattttaaatattttggataactttcggtcatcgagaactgcagacacagtgtgctactctattctggaatgcctcctagagaacctgcagtcgcagctgacagctcccaatgacagagtgagccagtcctgcttcaaaagggcagaccgcagacattttaaagcttgtccttgctgggcgtcgatcacattcagagatcaatctagaactccccactgctgcacatgcatcagatgtcatggtaataagtatcttgtcttgacattctccactagtggacttcaaagaccaacctacctgtagtgtttagcaagaccagacccccgttttaaaaacaggaagtcagatggcctacaagatgcaaccaactcccaggacaactgtggtgctccaaaaactcagggttaggcaggatggatatattcttgttcaaaaaaaggtaacaaagacagtggttgttgtggcagaatacacttgcatagtatacctgtatgcttccgacgtcgggcgccagcggtcccggccccaacgctgggctgtgctctcctgcgacacgatccgttaaaacactccccacggcgcactgggcagctgaagcacttctcctagatttgctcttaacagaacgaatgcatacgctacagattcctcaacggaatcaacagaattcctttctccacattcctaaaactgggtaccacggtccgcaataatagtcaccagacccatcatcacaggctatgtcactaaaactgaccgaagcgttttccagttcacattttcctaaagattttataatgtgacaacccttctctccttagaaagttatacttctggcacttgaaatgctggatttgttgtccagtttaaaagaagtgaaaaccaaaacattaaaactctgtggtcagagcaggacaacggcctggggcccgacagcagggccacgggcagtctgccaggtggctctggagccaagccctttggaaaaccttcagggcgacctggctccttcactcacttccgaccaaaagaaaagacatcaaaataaaaccccaaacccctcatcatggtgtttgtaacgatgctcgtcagacaaccagccgacacgatgacccaacttagaaaatgcagctcgggaaaggacctaagcttgtttaaaaaaaattccctcctcccttaaatataacttatgtgaaaataggaaattaaataaaaaatatctgagttattgccaa

SEQ ID NO: 189375 - DNA, 912 bp, Homo Sapiens
ttggctacgaaattgatgcctggtatttctcaccattccccgaagactatgggaaacagcccaagctctggctctgcgagtactgcctcaagtacatgaaatatgagaagagctaccgcttccacttgggtcagtgccagtggcggcagccccccgggaaagagatctaccgcaagagcaacatctccgtgtacgaagttgatggcaaagaccataagatttactgtcagaacctgtgtctgctggccaagcttttcctggaccataagacactgtactttgacgtggagccgttcgtcttttacatcctgactgaggtggaccggcagggggcccacattgttggctacttctccaaggagaaggagtccccggatggaaacaatgtggcctgcatcctgaccttgcccccctaccaacgccgcggctacgggaagttcctcatcgctttcagttatgagctctccaagctggagagcacagtcggctccccggagaagccgctgtctgacctgggcaagctcagctaccgcagctactggtcctgggtgctgctggagatcctgcgggacttccggggcacactgtccatcaaggacctcagccagatgaccagtatcacccaaaatgacatcatcagtactctgcaatccctcaatatggtcaagtactggaagggccagcacgtgatctgtgtcacactcaagctggtggaggagcacctcaaaagtgcccagtataagaaaccacccatcacagtggactcccgtctgcctcaagtgggcacctccaagcacaagcaagtcaagctctccaagaagtgagcagcctgacccctgctgtcggacctgagctctcctggcctcccagcctgtaaatatgtatagacctgttttgtcatttttttaataa

SEQ ID NO: 189376 - DNA, 790 bp, Homo Sapiens
ttggcccttactttaaccctttctgggatgcaatactaggaagtaaagtgaagaatttatctctttagttagtgattatatttcacccatctctcaggaatcatctcctttgcagaatgatgcaggttcaggtcccctttcagagatataataagcccaacaagttgaagaagctggcggatctagtgaccagatatatagaaggactgcagccactgattctctcttgtccttcacatcacccattttgagacctcagcttggcactcaggtgctgaagggtaatatggactcagccttgcaaatagccagtgctagttctgacccaaccacagaggatgctgacatcatttgtattatgttccaaggctactacagagaaggctgcctgctatgtatttgcaaggctgatttatggtcagaatttccctctgatatgtctagggtgtgatttaggtcagtagactgtgattcttagcaaaaaatgaacagtgataagtatactgggggcaaaatcagaatggaatgctctggtctatataaccacatttctaagcctttgagactgttcctgagccttcagcactaacctatgagggtgagctggtcccctctatatatacatcatacttaactttactaagtaatctcacagcatttgccaagtctcccaatatccaattttaaaatgaaatgcattttgctagacagttaaactggcttaacttagtatattattattaattacaatgtaatagaagcttaaaataaagttaaactgattataata

SEQ ID NO: 189377 - DNA, 875 bp, Homo Sapiens
tttgtacaaaaaagttggctttaacatcctggacatcaagcctgctaacatggaggagctgaccgaagtcatcactgcagccgagttccacccgcaccagtgcaacgtgttcgtctacagcagtagcaaagggaccatccgcctgtgtgacatgcgctcctcggccctgtgcgacagacactccaagttttttgaagagcctgaagatcccagcagtaggtccttcttctcagaaataatttcatccatatccgatgtaaaattcagtcatagtgggcggtacatgatgaccagagactacctgtcggtgaaggtgtgggacctcaacatggagagcaggccggtggagacccaccaggtccacgagtacctgcgcagcaagctctgctctctctatgagaacgactgcatctttgacaagtttgagtgttgctggaacggttcggatagcgccatcatgaccgggtcctataacaacttcttcaggatgtttgatagagacacgcggagggatgtgaccctggaggcctcgagagagagcagcaaaccgcgcgccagcctcaaaccccggaaggtgtgtacggggggtaagcggaggaaagacgagatcagtgtggacagtctggacttcaacaagaagatcctgcacacagcctggcaccccgtggacaatgtcattgccgtggctgccaccaataacttgtacatattccaggacaaaatcaactagagacgcgaacgtgacgaccaagtcttgtcttgcatagttaagccgggacatttttctgtcagagaaaaggcatcattgtccgctccattaagaacagtgacacacctgctacttcccttcacagacacaggagaaagccgcctcc

SEQ ID NO: 189378 - DNA, 1375 bp, Homo Sapiens
aggccgtctccctggtctgccgcggtccccgcccgtcccgccgccggctgccatggcaggagccggaggcggcggctgccccgcgggcggcaacgacttccagtggtgcttctcgcaggtcaagggggccatcgacgaggacgtggccgaagcggacatcatttccaccgttgagtttaattactctggagatcttcttgcaacaggagacaagggcggcagagttgttatttttcagcgtgaacaagagaataaaagccgccctcattctaggggagaatataatgtttacagcacctttcaaagtcatgaaccggagtttgactatttgaaaagtctagaaattgaggaaaaaattaataaaattaggtggttaccacaacagaatgctgctcattttctactgtctacaaatgataaaactataaaattatggaaaataagtgaacgggataaaagagcagaaggttataacctgaaagacgaagatggaagacttcgagacccatttaggatcacggcgctacgggtcccaatattgaagcccatggatcttatggtagaagcgagtccacggcgaatttttgcaaatgctcacacatatcatataaattccatttcagtaaatagtgatcatgaaacatatctttctgcagatgacctgagaattaatttatggcacttagaaatcacagatagaagctttaacatcgtggacatcaagcctgctaacatggaggagctgaccgaagtcatcactgcagccgagttccacccgcaccagtgcaacgtgttcgtctacagcagtagcaaagggaccatccgcctgtgtgacatgcgctcctcggccctgtgcgacagacactccaagttttttgaagagcctgaagatcccagcagtaggtccttcttctcagaaataatttcatccatatccgatgtaaaattcagtcatagtgggcggtacatgatgaccagagactacctgtcggtgaaggtgtgggacctcaacatggagagcaggccggtggagacccaccaggtccacgagtacctgcgcagcaagctctgctctctctatgagaacgactgcatctttgacaagtttgagtgttgctggaacggttcggatagcgccatcatgaccgggtcctataacaacttcttcaggatgtttgatagagacacgcggagggatgtgaccctggaggcctcgagagagagcagcaaaccgcgcgccagcctcaaaccccggaaggtgtgtacggggggtaagcggaggaaagacgagatcagtgtgacagtctggacttcaacaagaagatcctgcacacagcctgtaccccgtggacaatgtcattgccgtggctgccac

SEQ ID NO: 189379 - DNA, 1731 bp, Homo Sapiens
  misc_feature (1524)..(1568): n is a, c, g, or t
ttggcgtttgggcttaatacagctttggcgaggtcggatgacgggtgggagccagcggtggaaggggtggcgaaagtaccggtttgccccaggccgccgaggggcctccttagagagaccttgcctgctccgctcgcgtccgccggggccgcgcgggtcctcctggcgccgccaggttcaaaaagccactcgagttgtcactgcgacggccctgggccaggagccgtttcgggatctgtcaaacaacgagttttcgtcgttcgaatcaggttgactgtggtccttcatccccccaatctcccgtacctggcgagtccagctcgtcgcggataccgttaaccctggataaagagaatggaggttacctctgtccgtgtagattcctaagctgtcctggagtgatccttggagtaaaggaaaggtgctttgaagcacattcagccatcagccctgtgggatggcagccactgatttgtcctatggtctttacagggacccagtctgccttcaagaaaagacagaagtagaaagggtggtggctgactgtctgacaaattgttatcaggtatgcaggaagtatatccttctccaaaatatcatacttgcatcaccaggtagacacatttccttctacacagaattatcttcagagcttcttaaagcaaataaagcctgcttcaaggactgagtccctagtcgaattcccggaaggagtggagcctgtcatattggtgagggtttgccttgaatgtcatcccagtatttcaatattgattaattagtcttccctcatggtcccaactgcatagtttttattttgttgagtgttctgacacatggtaagggacatgaaagtatcctttgagataatctttccattcatcagtgtttatctagcatctgctcaagagtgtgctgcagtggagggaaatcagatgacctcccagtctggttgtgttacatacaatcatgtgtaagaagtgccattcaagccgtgtcactggaggggactgacagtgagtgagtgtggatagagaggacctcctggggtgggcaatgtgagccctcagactctgtaggtattgcattttgcagtgaacactggtagacatgttttgtggctcaagccagcatgtgtgtgatggtttaggattcagtgacttttgatgatctggctgtggacttcaccccagaagaatggactttactggacccaactcagagaaacctctacagagatgtgatgctggagaactacaagaatttggccacagtaggtaagactggcctcatcccttgtagcctactatggaacagattatgttatgtacttactgtattgcacatcagagatagcaactctgaacacaatgggaaataacagacatagtccctgccctaatagggtttcatctacttggtgattctcaaaatgtggtgtcagatgaagagcatcaccagcactgttggagatgtatgttctcagtctccacctttgacatactcagtgagaaactgcaacannnnnnnnnnnnnnnnnnnnnnnnnnnnnnnnnnnnnnnnnnnnntgctataatgttgaagaatgagatgtatagttgtttcccatgagaatgaagatctctttgtttcacttaacttcctatttggataaaagtcttagtgctttgtaagtgtgtacatcagcctggatttgggcttcaggatcagagatcaccaatcttttggggg

SEQ ID NO: 189380 - DNA, 776 bp, Homo Sapiens
ttggaaacaagtccaggcgcctgcgaacccgggcccgggggggacggcgcccgccaggagcgccccccactcccaggccagcccaccccggcggaccgggccccgcgcgcccaggcgaggcactgggctccctctgctccccgtgggccgctccccgcgtggggccactgcccccggcccccgccatggtgcggatttcaaagcccaagacgtttcaggcctacttggatgattgtcaccggaggtatagctgtgcccactgccgcgctcacctggccaaccacgacgacctcatctccaagtccttccagggcagtcaggggcgtgcctacctcttcaactcagtggtgaacgtgggctgcgggccagccgaggagcgggtgctgctgaccggcctccatgctgtcgccgacatccactgcgagaactgcaagaccactttgggctggaaatatgaacaggcctttgagagcagccagaagtacaaagaggggaagtacatcattgaactcaaccacatgatcaaagacaacggctgggactgacccccgctccccccgacgcatgtggctccagcccggcctggactgagggagcgccactggcttcccgctcatcccgaagggagctctggaccctcttagcccctgcataggacggatctagctcctgtatatatattttattgcatgcactgtgaccttgggtgtgataacagaagggggactacgccccccgcacctcctgcgatctgggtggcttggatctcgttttta

SEQ ID NO: 189381 - DNA, 686 bp, Homo Sapiens
  misc_feature (305)..(315): n is a, c, g, or t
  misc_feature (317)..(370): n is a, c, g, or t
tgaactttttaaataaacgttagcccattacacatcctgtcatatggcatgtaggcagtgtggtatggatgaaagagatgtggagagaggcagacatagactgaaatcccagctttgtctgttactagatgtggaccttgggcatattacttagcttctcttagcttcagtttcctcatctgtaaaatgggaatattaattacaatgctcatatggttgctctgaggtttaagagaaatagcatatgtatacttcagcattcagtatgtgccttcttgtaacttcctacactggtaacagtgggnnnnnnnnnnngnnnnnnnnnnnnnnnnnnnnnnnnnnnnnnnnnnnnnnnnnnnnnnnnnnnnnnaacgtaattcaaatcaagttctttcagtgacctaattctggtatacagttaggattttgttaagggaactaatattagactttacctattatgatgcttttaaggttacattaccatccagtgaaataaattttaatatttttagttgaatgatcttttattcaaaaggaccccacttttctacatataaaactttgtgatagcagttaaatgtcaactttaagaagcaattattatcagttgagtattagcatacaattaagtcattttaaataattttgcttaggaaaatattacagattttaaacgtatccaa

SEQ ID NO: 189382 - DNA, 1978 bp, Homo Sapiens
  misc_feature (1154)..(1224): n is a, c, g, or t
  misc_feature (1510)..(1598): n is a, c, g, or t
  misc_feature (1717)..(1726): n is a, c, g, or t
tgagccaccgagcctggccggttaacatcttttaattgtttccaggattgagcaggttctcagctgggctctgatatcccgtgcggagttggacaagtgggcagcataaagtcactcatttcttaccattttattcccctcaattctcaatatattcagtaatgaagaatggtgccaccactcaagcaacaagcctcaaactcaaccatgtcatctttttcttggatgattgcagttatttcaaaaatttgcatgcaaaatatacactcatcctacttcaagatggtggtggcaatagtcaggagaaggtaacattggagtcctggtttgattcgaaggatgaagacgaagaagcaagggaggaacaaatgaagaaccatctttgttcatgaataggaatattcaagattataaaggtatcaggtctcctaaaattgatctatggatttaataccattttcaatggaaattccaacagattttattgaatgaaacaagcaggtgtttatatggagtagcaaaggacttaaaattaccaaatgcttctaaatatgaaggagaggttggggacacgcaccctatgtgataccaagttttattgtcaagacagtgtcatggtgcagaggtaggcattttgagcaggggaacaaaataagggcctagaaactcacccgtgcatatgttgacctttgcaaaatgacctggtgacatggcaagtcagtggggacaggaaggaccactccctaagtaatcccagaacaatggctattcatgtgggaaaaaaagaaattttactttctctcaccttacctggtgataagttccaaatatgttaagggctttaatacaaaaagcaaaaattgtcagtgtttggatgaaaaaagccttagggcaggaaagaatctcttgagacataaagtagtaatcataaaggacaagatggttaagtcaattctgttaaaactcaaggcttatattaagcaaacacttgaagtgagaagatgatccacaacttgagaagacatttataatacaaataactgatgaaggattcataatcacaaatatagagaattcctatttaaaaaaatagaaaaatagtgaagactacacaagaggaaatagggcttttaaataaatagatgttctgtagnnnnnnnnnnnnnnnnnnnnnnnnnnnnnnnnnnnnnnnnnnnnnnnnnnnnnnnnnnnnnnnnnnnnnnngggtctgacagtaccagttgttagatctgtagggacttgtacaacattgtggatgtgtaaacaggcaccactgctttaaaaaacaattatcccttacagacttgaacatttgcagaccttatgatcttgcttccaactcccacctgtatgtccagcaaactcttgcatgtggccactaggaggaatgtgtaagaatgttcatagttacatatttataatagttaataactggaaaaagtgaaatgtatgtctgtctacaggaaaataggtgaataattagatatannnnnnnnnnnnnnnnnnnnnnnnnnnnnnnnnnnnnnnnnnnnnnnnnnnnnnnnnnnnnnnnnnnnnnnnnnnnnnnnnnnnnnnnnaggaaaaaagcaagtttgaagagaccacatggggcgtactatttttattgagcccaaaaacaagcaaaaccaaagaatatgtagtctaagcatacgtatacaataaaactatgctattnnnnnnnnnngaaggtaactgataaaccaaaattgagcatagtaattacccacagaaggaggaagtggaagggacaggagcacataggtagatgccaagttatgcagctgttctggttcctcctggtaggcttacaagtgtttactatatgctattaatacattatactttataactaatagataacagttttttacatattaaatatgttctacttaaatatattataaaaaataaaaggcaaaagtggaatgataaccct

SEQ ID NO: 189383 - DNA, 1011 bp, Homo Sapiens
  misc_feature (357)..(371): n is a, c, g, or t
ttggcttaacattggtttcagaaagaatcttagctacctagaatttacagtctctgtttcatggcaacactggataatggctttgtgaaatttaaaaaatttttgtagcgactgtaaacagaaatgccaaattgatggttaattgttgctgcttcaaaaataagtataaaattaatatgtaaggaagcccattctttcatgttaaatacttggggtgggaggggagaaagggaaccttttcttaaaatgaaaataattactgctattttaaaatttcttgatcattgaatgtgagacccttctaacatgatttgagaagctgtacaagtataggcagagttattttcctgtttacannnnnnnnnnnnnnnggggaaaaaattggtaggtgtctaattactgtttacttcattgttatattgcagtaaaagttttaaaacaaccattgcatgtttgcttttgatgtatccctttgtgaaattagcacttttggggccaatggagaaatgcagcattcactctccctgtcttttccccttccctcagcagaaacgtgtttatcagcaagtcgtgagtcaaactgctgccttttaaaaaacccacaaaatgctgattcagttcaaaattaatgcaaatgtttcaaaactgggtttctgatatttgtaaatgtgtttctttattagataagagtgtattaccattaaagtcattagtataatattgctttcaaaaagaaatggtagacaaaactataatccagcatcttttattgcattggaaagactggcaaagtcttttggatgggttgggagatgtggctggaaagtactttggaaaatatacaatcaagatatctcatggcatattaaaagaaaaatcttaatagcagtgttggcttttatttggattttttcatctcagttttttctgtggaatctccttcattggcattgttatttaatcataaacggggcagatgtctacttgttcagtttttcaaatctgttttcc

SEQ ID NO: 189384 - DNA, 1258 bp, Homo Sapiens
cactcgcctcactttatttttccccgtattgatttttctgagcagtggtacgggcgtctctggcagagtaggcgtgaggtcgttggagtcttcagatgcttgcttttggatgagcgtctctggactgcacatttgaggatagatccaatgagtgtgacttcagtgtgacctcagagagttgctgagccttgggtgagacatctccagtctgggattttgctagcaggtctcccagctgtggtttggggggcaggtccttcatctgtggtttgggaggtaagtctgagagttggggtttgggtggcaggtcccccagctgggtttggggggcagttctcctggcttaggcggcaaatctccaatttggggcttgggggccagttctgtgggctttgggggcaggtctccaggtggtggcttttgtggcaactctgccaactgtgatgatttctgaaagatttcgggcgggatggtggctttgtctagggagagatgatctgttttccttagtgccactttctgaggtagtttaggaagaactcttgggccaagggcagtctttgcagaactggtgctcgactgctgggatagtccctcaaacttgtttgtagtcttacttgaagaggatggacccccatcgttaccccaaggaactgcgcctttgtttgggggcccatgaggtagtgggctgggagggtcggatagggttctcttgtgtccgggtggtgggggaggaggcctcttcttggatagggtggagctgccactagaggtctgggtgcttagagggagtgttgaaggtgggccagttggacctttcccggcgttcctaggaggcagagggggagcctccgtggttggtgatgtgggcgagtctgtgcttgtggaaacgaagatctggttggtgaaggctccataggagagccgctgtttgtcccttggagtgctgaatcctggcagtgccagcttgtcctggggggagatgctggaggagtggcagaagctctgaggtctgggtgagcgctctttcttgacagggcttggtttgtcatccagatcatcatcgctctcatctatctcctcctgtcgaagattccactcatattctacgtggacgtgtggattgaactttccagatttagcctgggaaagcagatcttcacactgggtagcttttagtctctttgctatgtctagggcagtttctccagcctggttaactatatccacagtgggcttgctcctgagcaaaagccaa

SEQ ID NO: 189385 - DNA, 871 bp, Homo Sapiens
ccactttgtacaaaaaagttggccagccttgcctcctcctccgatggctccttcctcgctgatgctcactttgcccgggccctggcagtggctgtggatagctttggtttcggtctagagcccagggaggcagactgcgtcttcatagatgcctcatcacctccctccccacgggatgagatcttcctgacccccaacctctccctgcccctgtgggagtggaggccagactggttggaagacatggaggtcagccacacccagcggctgggaagggggatgcctccctggccccctgactctcagatctcttcccagagaagtcagctccactgtcgtatgcccaaggctggtgcttctcctgtagattactcctgaaccgtgtccctgagacttcccagacgggaatcagaaccacttctcctgtccacccacaagacctgggctgtggtgcgtgggtcttggcctgtgtttctctgcagctggggtccaccttcccaagcctccagagagttctccctccacgattgtgaaaacaaatgaaaacaaaattagagcaaagctgacctggagccctcagggagcaaaacatcatctccacctgactcctagccactgctttctcctctgtgccatccactcccaccaccaggttgttttggcctgaggagcagccctgcctgctgctcttcccccaccatttggatcacaggaagtggaggagccagaggtgccctttgtggaggacagcagtggctgctgggagagggctgtggaggaaggagcttctcggagccccctctcagccttacctgggcccctcctctagagaagagctcaactctctccaacctccccatggaaagaaaat

SEQ ID NO: 189386 - DNA, 1488 bp, Homo Sapiens
  misc_feature (1119)..(1155): n is a, c, g, or t
ttgggcttaggtttactctccaatgttaaccgaaatgccacggtagaaatgacaagaaggcatataggaagaggagtgcgcttatactacataggtggggaagtttttgctgagtgcctaagtgatagtgcaatctttgtgcagagccccaattgtaatcagagatatggctggcaccctgcaacagtgtgtaaaattccaccaggctgtaatctgaagatcttcaacaaccaggaatttgctgctcttctggctcagtctgttaatcagggttttgaagccgtctatcagctaactagaatgtgcaccataagaatgagttttgtgaaagggtggggagcagaataccgaaggcagacggtaacaagtactccttgctggattgaacttcatctgaatggacctctacagtggttggacaaagtattaactcagatgggatccccttcagtgcgttgctcaagcatgtcataaagcttcaccaatcaagtcccatgaaaagacttaatgtaacaactcttctgtcatagcattgtgtgtggtccctatggactgtttactatccaaaagttcaagagagaaaacagcacttgaggtctcatcaattaaagcaccttgtggaatctgtttcctatatttgaatattagatgggaaaattagtgtctagaaatactctcccattaaagaggaagagaagattttaaagacttaatgatgtcttattgggcataaaactgagtgtcccaaaggtttattaataacagtagtagttatgtgtacaggtaatgtatcatgatccagtatcacagtattgtgctgtttatatacatttttagtttgcatagatgaggtgtgtgtgtgcgctgcttcttgatctaggcaaacctttataaagttgcagtacctaatctgttattcccacttctctgttatttttgtgtgtcttttttaatatataatatatatcaagattttcaaattatttagaagcagattttcctgtagaaaaactaatttttctgccttttaccaaaaataaactcttgggggaagaaaagtggattaacttttgaaatccttgaccttaatgtgttcagtggggcttaaacagtcattcnnnnnnnnnnnnnnnnnnnnnnnnnnnnnnnnnnnnnaactgctaaatcttattataaggaaaccataccgaaaacctttccaagcctcttttttccattcccatttttgtcctcataatcaaaacagcataacatgacatcatcaccagtaatagttgcattgatactgctggcaccagttaattctgggatacagtaagaattcatatggagaaagtccctttgtcttatgcccaaatttcaacaggaataattggcttgtataatctagcagtctgttgatttatcctttccacctcataaaaatgcatagttggcagtatattatttttcagggatatgctagaattacttccccatatttatccc

SEQ ID NO: 189387 - DNA, 878 bp, Homo Sapiens
  misc_feature (144)..(180): n is a, c, g, or t
ttggattatttagaagcagattttcctgtagaaaaactaatttttctgccttttaccaaaaataaactcttgggggaagaaaagtggattaacttttgaaatccttgaccttaatgtgttcagtggggcttaaacagtcattcnnnnnnnnnnnnnnnnnnnnnnnnnnnnnnnnnnnnnaactgctaaatcttattataaggaaaccataccgaaaacctttccaagcctcttttttccattcccatttttgtcctcataatcaaaacagcataacatgacatcatcaccagtaatagttgcattgatactgctggcaccagttaattctgggatacagtaagaattcatatggagaaagtccctttgtcttatgcccaaatttcaacaggaataattggcttgtataatctagcagtctgttgatttatccttccacctcataaaaaatgcataggtggcagtataattattttcagggatatgctagaattacttccacatatttatccctttttaaaaaagctaatctataaataccgtttttccaaaggtattttacaatatttcaacagcagaccttctgctcttcgagtagtttgatttggtttagtaaccagattgcattatgaaatgggccttttgtaaatgtaattgtttctgcaaaatacctagaaaagtgatgctgaggtaggatcagcagatatgggccatctgttttaaagtatgttgtattcagtttataaattgattgttattctacacatatttatgaaatcagaatgttaaaaattgggggaaaagccatttatttagcaagttttttagcttataaagttacctgcagtctgagctgttcttaactgatcctgggtttt

SEQ ID NO: 189388 - DNA, 2051 bp, Homo Sapiens
gagcaatgctttccttataatggccaactttgtacaaaattcaaggcttgtgtcaagaataacagtagaagaaggagaagaatccagcagatcctcaactgctgtacgacgacatccaacaatcacactggaccttcaagtgagaaggatccgtcctggagaaaatagagatcgggatagtattgcaaatagaactcgatccagagtagggctagcagaaaatacagtcactattgaaagcaatagtgggggctttcgccgaaccatttctcgtttagagcggtcaggtattcgaacctatgttagtaccataacagttcctcttcgtaggatttctgagaatgagcttgttgagccatcatcagtggctcttcggtcaattttaaggcagatcatgactgggtttggagaactgagttctctaatggaggccgattctgagtcagaacttcaaagaaatggccagcatttaccagacatgcactcagaactgagtaacttaggtacagataacaacaggagccagcacagggaaggttcctctcaagacaggcaggcccaaggagacagcactgaaatgcatggtgaaaacgagaccacccagcctcatactcgaaacagtgacagtaggggtggcaggcagttgcgaaatccaaacaatttagttgaaactggaacactacccattcttcgccttgctcacttttttttactaaatgaaagtgatgatgatgatcgaatacgtggtttaaccaaagagcagattgacaatctttccaccaggcactatgagcataacagtattgatagtgaactaggtaaaatctgtagtgtttgtattagtgactatgtaactggaaacaagctcaggcaattaccttgcatgcatgaatttcacattcattgtattgaccgatggctctcagagaattgcacttgtccgatctgtcggcagcctgttttagggtctaacatagcaaacaatgggtaaggtgatgggatctactcaaatactgttttttagtagaactgaatgttcaagcattgttttgctgagttatttgtgattagctaaccaggatgaaaaataacagattatatatagtttgaactatttttcgtgtgcttttttaaacttgttaaaaagaaatttatataaaatttaaaatacaaatgttaaattatccagaaatacagaatagttaatattgctagaaccaaataacctctaaaatgtttttattttggtaattttgtcatgctaagcacttttgtatctgcacaattcagtaggttaagaatcaatcttctttttcttaatagtacagcagactttagcttcaagtttcataggcttagtacttatatctagacatttgtgtctaaataagcttttcattaactttttattttaaggacagtatcttttcatgaaagagtatttggctgaatgtttgctatatatatgttacttgaaatgttaaatttaatatgcagcataccataggtgtatatataggtatataattttaaggttaaaatattcagtctacaagtttggttcttatttaagcttttgggctaatactgcatatggcacaatgtttaatattggcaagttcatctcagagaaaggggattcagatataattttaaagtagagataatttactgaagcgtctctgacaatctaacttattagacagcaagcaatatataatactgaaaaagtattcagaaatggaaaatttacatcatataggttatttaacttgtgttcagcctttttgtaacttttttgaaagtgcaaacaattctttggattattaaataaggtatacagtatgcatggtttctcaaatttagctttaaaatctaaaagtctataaagaatcagatgcataggcaatatgttaagttcacttggaggctaaaaatctccagtgaaaacaaaacgaaaacctttaagagaatgtagagtttatataaacacaaagtatgcattgaagatctgtttctaccaataaacattaaaacaaagactgtatgtg

SEQ ID NO: 189389 - DNA, 1401 bp, Homo Sapiens
tataatttgaaagaggtgagtatgtactctgacttcagctctcaggttttaaaaattatattagtgggaccagttatgacaagaataatcattatagtacttttcagattttataacctggagcagattattttaagttgattagtaggttctgttacagtttttcttttgttcgtgcacttatagtcttcatttaattcctcatagaatcccagtcacctttatatatcatattattggaagagattcatcttcataatctccagttttttcacagtgcctcacagagttaatcatgccttttggagctagaaggactttagaacttatctagttatgctcctttatattataagtaagggaatagaatcaataagacagtttctgcccaaagtcatgttaccagttggtgacagagctggaaatacgtagagatctctacccttaaatctctccactcacatgctgatatactttctactacaatatgctatagctttatggaactcagggtgatgatcagacgtgtcattagaacatgagtcctctgcttctgattcaggcatacttttgggattcttccatctttaaaggaaaaaggaagccattcatctatatttagtaacccagtaatatctcacttagtttagggttagatctttagttaattcaaccttatagatcatacttatgaaggtgataactgacacgtgttccctgaattttaatttgataggcaatacatctacccactccattattttttaaaacttcatttaatagtttaaacaagattggttttgttttcaatttttattcactcttcatagaatcacaattacctttatatatcatatgttattggaagagattcctcagtaatctccaatctctcatagtgcctcacagggttggtcaatggcttttggaactggaaggaccttagaacttatctgttatgctcctgatagccaatagcagatagaagcttgcaatcaagagggtaggacatgtgttcttcaatggatatcaaaggaagaggttgcaaaccaaagccatttggcaagctctgtagcctgggccatttaagacaggggcggtctcagccaaattgcacccatttaactatcccaaagagccacagtgcctacaacccaggccctaagttgatgaagaaaaagtcaaggaaggaggtgatacaattggaaatattcccatcaaatggttaatcttatttagaaaatgggcatattagaaaaagtccttccaagatgattttggataataaaagttgtatttgtggaaattggtattatctctgttttatgcacttacatttatcccttacattttgttttagtgaccctacatgacattaaatttaaagtaaacattgtttaa

SEQ ID NO: 189390 - DNA, 1754 bp, Homo Sapiens
ttggctgaccttgtcaacacagccatattgattgctttgaacaagagggagtatgaaatcccatccaacctgactcctgcagatgtctttttcagggaggtatcccaagtagataccatctgtgagtgcttactggagcatgaggagcaagtcttgagggatgcacctatggattccattgaatgggctgaagtggtgatcaatgtgaacaatattctcaaggatatgctgcaggctgctagtcattatcgccaaaatagaaactctttgtatagaagagaagaatcactagaaaaagaacctgaatatgttccatggacggcaacaagtggtcctggtggcatccgaacggtaataatacgccagcatgagattgtcctgaaggtggcttatccacaggcagacagcaacctccgaaacatcgtgaccgagcagctggtagccctgatcgattgcttcctggatggttatgtttctcagcttaagtctgtggataaatccagtaatcgggaaagatatgacaatctggagatggaatacctacagaaaagatcagatctcttatctcctcttctttcactaggccagtacctgtgggctgcttctctagcagagaaatactgtgactttgatatattggtacaaatgtgtgagcagactgacaaccagagccgactccagcgctacatgacccagtttgctgatcagaatttttcagactttctcttccgttggtatctggagaaaggaaagcgaggcaaattattatctcagcccatttctcagcatggacagttggcaaattttttgcaagctcatgaacatctcagctggttacatgaaattaatagccaagaattagaaaaggctcatgcaacacttctgggtttggcaaatatggaaactcgttactttgcaaagaagaaaacccttcttggcttgagtaaattggctgcattagcttcagacttttcagaggatatgctacaagaaaaaattgaagaaatggctgagcaggagcgctttctactgcatcaggagaccctacctgaacagctgctggcggagaaacagctaaatctcagtgcgatgccagtattgactgcaccacaactcattggtctatatatctgtgaagaaaatagaagagctaatgaatatgatttcaagaaagctttggacttgttggaatatattgatgaggaagaagatataaatataaatgatctaaaactggaaatcctttgcaaagctcttcagagagataactggtccagttctgatggcaaagatgatccaattgaagtatctaaagacagtatatttgtgaagatcttacagaaacttttaaaagatggcattcagctcagtgagtacttaccggaggtgaaagacctgctacaagcggatcagcttggaagcttaaagtccaatccttacttcgagtttgttttgaaagcaaattatgaatattatgttcagggaccaatataactttttctaaaaatggccattgtttatgaaatctgtataagtgtgtccttatacaaattttaggccataaacaagtgtaagtttgtacaatttcataacatgtatagctgagtttttatactttatatgtaggaagctaatataaaatagttatgtaactgtgattttggttttcagttatgtgacttgttttttccacctgaaatgtgtcagttgtttgttcctgtactcggtgtccttttctttttactctcacgtgg

SEQ ID NO: 189391 - DNA, 851 bp, Homo Sapiens
  misc_feature (784)..(804): n is a, c, g, or t
ttggcgttcgggcactgaggtgtagcagaggatgcgctggcggctgtgagtgcggcgacaagggcaaatgcagcgactcctcgctgttgggcaagagactctccgaagactcgagccgccaccagctgttgcagaagtgggcgagcatgtggagctccatgagcgaagacgcgtcggtggccgacatggagagggcgcagctggaggaggaggcggcggctgcggaggagaggccgctggtgttcctgtgctccggctgccggcggccgctgggcgactcgctgagctgggtggccagccaggaggacaccaactgcatcctgcttcgctgtgtttcctgtaatgtttctgtggataaggaacagaagctatccaaacgtgaaaaggaaaatggttgcgtccttgagactttgtgctgcgcggggtgctcactcaatcttggctacgtgtacagatgcacgcccaagaatcttgattacaagagagacttgttttgcctcagtgttgaagccattgaaagttatgttttagggtcctctgaaaagcaaattgtgtcagaagataaagagctttttaatcttgaaagcagagttgaaatagaaaagtctctaacacagatggaagatgtcttgaaagcattacaaatgaagctgtgggaggccgaatccaaattgtcctttgccacttgtaaaagctgaactctagtctgtgtcctccattctgcccccgcccttcctccccttatttgttaaatgaagcaacatagtgagacgtcgtctctacnnnnnnnnnnnnnnnnnnnnncccaactttttttgtaggaaagttgtgcgccaacttttttgtacaaa

SEQ ID NO: 189392 - DNA, 1525 bp, Homo Sapiens
  misc_feature (768)..(782): n is a, c, g, or t
ttggggaaaacttattataaatggaaagaaagttttatttccttttttgtttgatgggcagtatgccatattatacccaaagttcttttaaaaaatatttccatcaaccatttttatttaaaataaacatttgagggaagttaccaaggcagcttttttcctcaaaagtaacctgttcctctttggaatagcacattttaggggcatggttaatacctgagatttttactcagtaaatcctgatggactgtgtgtaaaatatctttaagtaggattgaaggcctctgtgggggaataaaatattaccaaagtctataaaaataaattttacatgttctcttttatgacagagagcagcactggttctgttatttttaaaatgaataattgatttcttgataggtgtttaatatttcttccctcactgctgattcttagatagaaaccattctttatatttgatagactgctttcagaaaacccttatcaacaagtgtacaatacttatctaaaactatacatttagaatggagcagtttaatactagatctcagaagttttgaaaaatagcaaagaagactggatttggaaagcatggtctacaattggttgttaaattctgaagctatgaagaataaatgtttcaactttggattatgaaaccccatttatgattttttaaatacacttgaaataaaaatgattaaactaaattttggtccagtgacattactttgcactgcataatccattatacgttgtacgacnnnnnnnnnnnnnnnaatttattactgagagttttgtgtgaagctacagcatatctaaccagagaatttctgattccttatactgtgattatattatattgaggcatttgtagtgcagctgaagactgaatttatgccttttgtaaacatgataggtataaatgtcttataaacattctggagtatgtatagctttaatgaatgaaatttaatggacctgattaaaatgaagggatttaatcgttgttaaagttaagttagtcaaataaattacctactggaatatagcccaagccagtaaaggtttaatatttgcattttcgtgcttttattttctccttccattcataagtatatacttgaaagtacatctgtagcctatgatttgagtctcttgaagttctaggaagaggcaaactacaaactactaggattctgatttcacatgtagtcattccagacccttctctttatgagttcacctgctagtacaatctccacaacttgaaccccccctggttgttctgtaattcctgcccaaagcatcacaagttgtacatcatcaaggctccctttgcactcccaagaagaactggtaattttaaacaaaagtatgtgtctttatttgtattggaaaatactgtccttaaattgtttcttgttgacactccccacaatggaaaaattaccgaattaaacctgttttatggatggcagcttggagcataccaagaagttggaggatttgaattccattc

SEQ ID NO: 189393 - DNA, 1394 bp, Homo Sapiens
ttgggtttggagcctggctgcacgggaggagcacgtgtgggaacgccaggggccggctttgagccccattcccccaacatgatgccgtgtgtggcagacgtgacatttggttttgctcccccagggttccatctgcgacaggggctacttgtgtccctggcctcgtcagctcgggctgaaggcggccctggtcctggccagaggggctttgtgaagcagaaatagatggcctggtgcaggggccaagctcggctagggcctcagccctgggagttgtaaagaaggccggcctctaccatgggcatctgcaccaagctgtgcccatgtcacggtgtgctcagcggttccccgcctgtggggcccaggctcacagaggtgtgaaagaggcaagcacaccgcaggggcctctgagcccagccagcctcgcttcaatgctgggaggctgacgtcttcctttttgtcttctgcccaggccagctgcgggccgtccagcggctgtgccacttctacagcgccgtcatgcccagcgaggcccagtgtgtcatctaccatgagctccagctctccctggtgcaaggtggccgacaaggtgctggaggggcagctcctggagaccatcagccagctctacctgtccctgggcaccgagcgggcctacaaatccgcactggactacaccaaacgaagtctggggattttcattgacctccagaagaaagagaaggaggcgcatgcctggctgcaagcagggaagatctattacatcttgcggcagagcgagctggtggacccctacatccaggtggcacagaacgtggccctgtacacaggcgaccccaacctggggctggagctgtttgaggcggctggagacatcttcttcgacggggcctgggagcgggagaaagctgtgtccttctaccgggaccgggccctgcccctggcagtgactacgggcaaccgcaaggcggagctgcggctgtgcaacaagctggtggcactgctggccacgctggaggagccccaggagggcttggagtttgcccacatggccctagcactcagcatcaccctgggggaccggctgaacgagcgcgtggcctaccaccggctggccgccctgcaacaccgactgggccatggcgagctggcagagcacttctacctcaaggccctgtcgctctgcaactcgccgctggagtttgacgaggagaccctctactacgtgaaggtgtacctggtgctcggtgacatcatcttctacgacctgaaggacccgtttgatgcagccgggtactaccagctggcgctggcggccgccgtggacctgggcaacaagaaacacagctgaagatctacacgcggctgggccaccatctaccacaacttcctcc

SEQ ID NO: 189394 - DNA, 1183 bp, Homo Sapiens
  misc_feature (1106)..(1116): n is a, c, g, or t
tggcttcctcccatttccgtgctattaatcacttgttagagcaacatgacatgcccagcatcccacttcccgaaaatgtctactccttctactctgagctcttgttgcctagacctcagaaaacaccaattcaccacagtagaaccgggagcagggatagctcagcttctctgaatagcacactttgctcaggtcttaacttgagggcctctccggtactaacatcctgcgatagcttgtcccatgagcacagaagagcctcagtagagtcaagtcctgctgcagctgccccaccccaagtttctatcatttcctctttaaacaaaaaatatgttatcctacacattagtgtcaatccaatggttgtctcttatctgtctaaatagcaaaatcatgaaaatcagctgttttatttgcataggacaactaacctgtctgtgtaactttgtttttattttaactcttactagaaaatctaatcttaaaacatttgaattctaaacatgtaaaatgtgacagcctgcaattttgtagacagtgaagtaatggctgctatttataaatggaacatctatcaaaataagtaactgtttataaaattcagtttttgtagggttttccaaggaaaaatcaccttggttgaatgtttctcactcattaaactttgcagaagtgattcatattcagtactgtttttaatcactttttaaaatataaggaccgaatgcaaggaaaccaaagtttattaataatttttatataactaaaataaaatagatgtggagggatctgtgatcatataaaaagggagggttactgaaagaattttagcaatatattgattcaggaaaaggagctgttttataaatgatcattcactgttcctatggttctatgtatctttcaaaccgatacctttactatttaaagagcgtaaatagtgaaagtaagatggtcatacttactgactttatctatttaaagtttgatggagataaactatatcttggctagtggctactgtgtctgtgaatgtaaccagtacttctttaagctctattcagtagggttccagccactgcttttttgttgtttctagccactgnnnnnnnnnnncttgtttccttataaaacaggtaataaccaatcattttgtgtttgtatttccattcctttttatttc

SEQ ID NO: 189395 - DNA, 878 bp, Homo Sapiens
ttggagcatggggaccaattcggatgcaatgacaaactgacttcccccaaagcagacactactccagtatgtcccagtagaacactcatttgcaatgtgttgagctccgttaagcacacacacactcacacaacaggctcacgaggctcaggcctggcgggtcagaaagcccactccctctcccaaggccactggatcccaggagaagcccagactggcgatactacaaaggtctccagggcctggcagaccccagagtcaggcctgctgttaaaaagtgagagtgctgctgttccattcctggggtcccaagcacttccctttaccccaggacccagggcagcctgcagggcagctggcggtggccttggccatttgcccccagcctccagctggctcctgagctctgcaccagggggtttggggaccacacaggcacctgccttcctagatttccctggctcacttttctgcaaacactggatctgccaggcctggggattggggggcaggaaagaggcccccatccagccccctccaggccagtgtgcacagtgcaccgaggggtcatccgcacagagcgaggtgcaagctcgatgtgtaacctggctgcggcacccgacatccccggtctcggggtgttgatttatttctgaataactttttgggtatagaaaccaattttttttaatatatgacatgtatatgtacacactcatgtgaaatatgtatactttggggggatctatttatgttccagtgggagtcactctcttctgtcgggaatcttatctgctgctttgtgtctttggtcagattcctgacaatttagtttcctgttgtaaagtgcttttcctggggtgaaactaacctattga

SEQ ID NO: 189396 - DNA, 810 bp, Homo Sapiens
agttccggttccggttctttgtgcggctgcatcggcggctccgggaagatggcggcccgggcgggtttccagtctgtggctccaagcggcggcgccggagcctcaggaggggcgggcgcggctgctgccttgggcccgggcggaactccggggcctcctgtgcgaatgggcccggctccgggtcaagggctgtaccgctccccgatgcccggagcggcctatccgagaccaggtatgttgccaggcagccgaatgacacctcagggaccttccatgggaccccctggctatggggggaacccttcagtccgacctggcctggcccagtcagggatggatcagtcccgcaagagacctgcccctcagcagatccagcaggtccagcagcaggcggtccaaaatcgaaaccacaatgcaaagaaaaagaagatggctgacaaaattctacctcaaaggattcgtgaactggtaccagaatcccaggcctatatggatctcttggcttttgaaaggaaactggaccagactatcatgaggaaacggctagatatccaagaggccttgaaacgtcccatcaagcaaaaacggaagctgcgaattttcatttctaacactttcaatccggctaagtcagatgccgaggatggggaagggacggtggcttcctgggagcttcgggtagaaggacggctcctggaggattcagccttgtccaaatatgatgccactaaacaaaagaggaagttctcttccttttttaagtccttggtgattgaactggacaagacctgtatgggccagacaaccatc

SEQ ID NO: 189397 - DNA, 988 bp, Homo Sapiens
gtagttcattctcctcacatccaaacagctacagcttccctccttttgtggagtccccaaaccaagtctcttttcaggagagcagacatgtgcctccacacagttctgaagttctgggggctccacattgtcagctgggttggggtctcccatgtgagggaggctgatggcactcgcaggtttttgcctcatctatgtacaaaggctcagaaaatttcttcggcatttgggaccctcgtgttctgtagctccaccagtcgctgcacagcctcaggcaagtcccactccccaaggcgacgattatctcgagtccgaatgttcactgttctcttactttgctctttctggccaaccacaaactgaaaattgtagtgggcaagctgggcccggcggattctccggctgagggtcagtccagagtctgcatccaggtcactgaccagtcctgcagcccgcaggctctgctgtgcctctttggcgtattcctcttgctcactccccacagggatgaccaccacctggaacggggacagccacagtggccatttccccccgcagctttctgccagcactcccaacagtctttccacagaaccgagcactgctcggtgaatgaggactggacgctccagggcacccgcctgccccttatactggaggtcaaatctcaggggcagttggaagtcaagctgaattgtcccacactgatgtggccggcccagggcatcgtggaggtgcacgtcaatcttaggtccatagaaggcaccatctccagagttgaggtcccagggttctccaaattccttcagggcctgtttaaggacctgttcggcctggtcccaaaggcaagggtcccccaggaagccagatggccgggtggacagtgccaggcggaaggagaagccaagaacggcatagacggaacggaggaaatcaagacagctttggatctctgcttccagctgatctgttgtacagaagatgccaa

SEQ ID NO: 189398 - DNA, 1871 bp, Homo Sapiens
ttggggcaggctggcaggtggacaggcgggcaaggacagctccgcgagccccctacaactcgtttccttccgttcaccttcgcagggcggcgactggcggcgcgatggacctgaccgggctcctgctggacgaagaaggcaccttctccctcgccggcttccaggacttcacgttcctcccaggacaccagaagctgagtgcccggatccgaaggaggctctactatggctgggactgggaagccgactgtagcctggaggagctctccagcccggtggcagacattgctgtcgaactgctccagaaggcagcccccagccctattcgccgactccagaagaaatatgtagctcatgtgtcccgggaggcatgcatctccccatgtgctatgatgctggctctggtgtacattgaacggctccggcaccgaaacccagactacttgcagcatgtgtcatcctctgacttgttcctgatctccatgatggtggccagtaagtacctctatgatgaaggggaggaggaggaggtcttcaacgacgaatggggagctgctgggggtgtggccgtgcccactctcaatgccttggagaggggcttcctgagtgccatggattggcatctctacactgaccctcgggagatctttgaggtgctgagctggttggagagctgtgtggctgagcagcagggacggtggcgaggctggtacacctacacagacctgtgtgtgctgctggagcagccgacctggcagttggccctgggctccctctgccagcggctggtaaagctgtcttgcctgttagctgtggcatatgtgagcagtgtggccctggctgtggcatcggtggccgtaatacatcagtctttggggctgtcctgcacccctacacctgggccgcctgaccttggactgacctcccgttgcctcctggagccctgcataccttctgtgccacaatgcctgccgtctctcgctaatgtctccagctgcctggaaggcagcatggggctgcggtcactctggggcagtcttctggcctcactgactcctccaccattgcctcccccagacccccctgcccctcccactcttcttcataactgccacctttgccagaagctccagagagactccccaacctgccatgcctgcctccaccccaaccgtacagtccccactgcgctgtccagcctctggtaccatacctatggcctggctcccccctggccttggagcccggtgcccctttcacttcctcagcctcagcaatgttcccttttcagtgtcatggagctggctcgcctcaagtctttcgttttcccaggctaggtagggctgtgaggaatgcattaagagggtttgggagtttctgagaacctggaggagcaaagcttgattcagatcctgtctgcctcgctgggtccttggcaggtcccctgtcctcctgggtgggagcttatggggtggtggggcagaaggactgaaggtaattcactcctagatcgcagtggctggctgcttggccaggacagtgatgccgccagggagagcttccgcttggtgaccagggacatgtcccagatggacatagaagcccctctctgcctccctgggattttttagacttttacttttgatttccctaggatggaagagtataggtgggagataaagggaagtggggtgagaggagaaaggaaatgttggcatgggcctgtgtgatgtctctgaggcagaagagccggggactgatgggttcaggtgggagctgctgggtgaggcagggaacccttttcactcccattccttagctttagtctaatggagccaaggactgctgggaccttcaaccctgatcttttg

SEQ ID NO: 189399 - DNA, 971 bp, Homo Sapiens
  misc_feature (636)..(658): n is a, c, g, or t
  misc_feature (684)..(717): n is a, c, g, or t
ttgggtttatctctgagacagtccaaccttgagaatagctttaaaagggaaattaatgctgagatgataaagtccccttaagccaacaaaccctctgtagctatagaatgagtgcaggtttctattggtgtggactcagagcaatttacaagagctgttcatgcagccatccatttgtgcaaaatagggtaagaagattcaagaggatatttattacttcctcataccacatggcttttgatgattctggattctaaacaacccagaatggtcatttcaggcacaacgatactacattcgtgtgtgtctgcttttaaacttggctgggctatcagaccctattctcggctcaggttttgagaagccatcagcaaatgtgtacgtgcatgctgtagctgcagcctgcatcccttcgcctgcagcctactttggggaaataaagtgccttactgactgtagccattacagtatccaatgtcttttgacaggtgcctgtccttgaaaaacaaagtttctatttttatttttaattggtttagttcttaactgctggccaactcttacatccccagcaaatcatcgggccattggattttttccattatgttcatcacccttatatcatgtacctcagannnnnnnnnnnnnnnnnnnnnnnagttatatagtttcttgtcttggacnnnnnnnnnnnnnnnnnnnnnnnnnnnnnnnnnngctttaaaacaagtgtgatgccatatcaagtccatgttattctctcacagtgtactctataaaaggtgtgggtgtctgtttgtcagatgttaaaagtgctgataaatagcatgatcatgtatgccaaaaagtttttaggaagtatggcaaaaatgttgtattggctatgatggtgacatgatataatcagctgccttttaaaaggccttatctgttcagtgttatttgatataaaaaaataataacctgttttc

SEQ ID NO: 189400 - DNA, 742 bp, Homo Sapiens
gctatttaaggaaccaaaacatagtttgactgactgcaagaagtatcacagggaatgttagagtgttttattaatttctttgtcagacaagtgtttaggaaactctcactccaggcctaatgctgtgctaggctctgcaaatgctaagagggggaagttactgtccctgcttccaaggagatcatggtctagtgggaaacccgacacgttcaggtaccttcagatgggcactcagaagagtaagcccttagttaatgtttaaagatgtttaaagatgtctgagactcataggtcaaagtcagatttcagttccaccttattagacctgcactgctaaggagctgctttaggtaaggctgtgttcctagtcaccagggtgttcaaacacagtgctgggggcaatgtgggaatagccttcttttatttaggaagtaatgtgaagtcagtttcatgaatagatcttactttaagcattcattgaggtttttggcaagaatagagtacggtatatgaaggtgtttcctaatctccctgacaccaggaataatctagggctcattagagatgtcaaagatctgttctagtttcttaacctaaaacaagagtgttttagttccattttataggcggggagtctgagccaaacatgttatgtcactttccaagtctccatagcacagaagtcttctgtctccccatcctgactttcccagctcatagggactgtcaaaggcagcagctc

SEQ ID NO: 189401 - DNA, 925 bp, Homo Sapiens
ttggaggtatgattcctaagccctaaggagctcctcagcttgaaatggggctgcatccctataaacccatcataaagtcaaaaaatcctaaaacataagttggtgaccatctgtaatcatgatgtggtggtaaatcttggacgctaccttacaataactagacaaaggaaaatcatcctttgtcctgttctgtgtaaatatttaatgaatgatcaaaacttcagtttaaatattatgaaaaactttaaacataaagtagtagaaataagacagtaaatactgtatcctaatatccagtcaggatacagaaaccataccattaacttgaacagggataattttaatataaaaaactgttaactgataatggtattaacttttaagagggatgaaagagagctatgatgtcctaggactgagagtaccccaggaaagaatacccttgaaagggtctccccttccccatggtgaagtcaggcctaatggagagagtggctacagcctactcagtgattgggaaattccctgtcttgccctgggccagagctggtgtaccgctggtggatcaggtcttacaagcaaagaacctcacactcccaactggtaagccagaagcctcttgctagggtgtgagcaaaacttggacaggaactctcagtagatgtttgtgtttgtcaagattctccagacaaacttccttaaaaggattggcttgtgttgttattattaagtctaacaagtccaaaagctggagtgtgaggcaggaggctggaaacccaggaaagctgatggtgcaaggtccagtccaaaggtatctgttggaggattctcttgttctgggaagaggacggtctttttttctcttcagaccttcacctgactggatcaagcccactaacatcgaggaggacagtctgcattactc

SEQ ID NO: 189402 - DNA, 1180 bp, Homo Sapiens
  misc_feature (376)..(384): n is a, c, g, or t
taaatattaagtgaaaaaacattaaaatataaagtgattataccatgtaaaagtaaatatattacaataacaaaaactgaagtgaatttaaattgaaagacataaatagattcaaatattagggttttttctttgttgcttaagattataacaaaatacaaaagaaaaaatagactattattttagataaaataaaattatactcctaaacaataaatgctgaactatatgtgaactcgtaaaacagagatatttaaaacataacttctatatttcaagtgtatcctgtgaaggagatcagcctacatttgctggtcttcattttacaaaacattctgggcaatgtgtccatttataactgcccctcttaaacatnnnnnnnnncattttaaagcactaagtaagaaaaccaagcagcatgctaacaaaatctatctacttaatctgttttgcttctgcaaaaagccactaacagaaggtttaaaaaactaattctatatacacactttacataacatatatttatgctataaatattttaaagaatggcttttacataattctttatttcaatatatatctcattaatttcattgcaagttatgcaatatagtcttttggatctgttattgaaaattattcgctccatgatttagaaaatggttaatttcttggataaaacatagcatatttagaagtccgaaagccaagtaaatcccttatttcatttcggaattttgacagatcttggcgcagttcgtttagattttccacagttgcctgatctgtactttgcatcttctgtctcatggaagtcaagtaacgatgcactaggcagcacatcactttttgatagttttcatctctcttctgtttcaaattcctccattcctttaaactgttttgccgtttgaccttgccttttgatgtatgagagcaaatccacttactgaggctactaatcatatagcagatagtctttggtgagggaatgatgttgaaaggtggaggtaacgtacatttgtcatcaaagtagctaagccataattttgctcgagcaaacttccattctttgtcttcatgatttgctatcaactgaaagcttttatgaagcattgccaccagcagtttggtaagcacaatcacaaccacgacattgtatgtaccaacaatgacccaa

SEQ ID NO: 189403 - DNA, 925 bp, Homo Sapiens
  misc_feature (243)..(262): n is a, c, g, or t
  misc_feature (617)..(630): n is a, c, g, or t
ctttgtacaaaaaagttggcgcgcggaggcggtggaggaggtgctgggagcagccgggcagccgcttcccgcccccgagcaggagccggtgcgagcggagcagagccgaggtcgggccgcgagcggagccggctgagcgggcgccgagctcccgccatggcccggaacacgctgtcctcgcgcttccgccgggtggacatcgacgaatttgacgagaacaaatttgtggacgagcaggaggannnnnnnnnnnnnnnnnnnnagccaggcccggacccgagcgaggtggacgggctcctgcggcaaggggacatgcttcgggcattccatgcagccttgcggaactctcccgtcaacaccaagaatcaagctgtgaaggagcgagcccagggcgtggtgctgaaagtgctcacaaacttcaagagcagtgagattgagcaggctgtgcagtcactggacagaaacggcgttgacttgttaatgaagtacatttataaaggctttgagaagcccacagaaaatagcagcgcagtgttactccagtggcacgaaaaggccttagcagtaggaggactaggctccattataagagttcttacagcaagaaagactgtttnnnnnnnnnnnnnngactcatgttaccttgagaagaattctggatgcccagggctggtgaagaagggattgacaatggaccatcttcctaggaactcccaagtaaactatttcaggacatgtatctgctgaaatgtattttattttcaaggtggagggggaaaatcgtctgtttccctaaatcctgtttaggatctgatagtctatgcctttgtctcgaagtactgcaaaactgacattttgacggtctaccagcgtggcggctggtgttggtcaaatgccacctgtgtgcactgggggagggatagtt

SEQ ID NO: 189404 - DNA, 1313 bp, Homo Sapiens
ctttgtacaaaaaagttgggtatgcctcacattaacagaaagagccctggtgcgggagcggcaggcgcaccagctgctcgtggcccttgtgggtgacagcttgcttgagccattttggcccatgggtacaggctgtgcccgtggcttcctggcagcctttgacacggcatggatggtgaagagctggaaccagggcacccctcccctggagctgctggctgaaagggaaagtctctaccggctgttacctcagacaaccccggagaacatcaacaagaactttgagcagtacacgttggacccagggacacggtacccaaacctcaactctttttgtgtcaggccccatcaggtgaagcatttgtatatcactaaggagctggagcactaccctctcgagagactgggctcggtgaggagatctgtcaacctctccaggaaggagtcagatatccggcccagcaagctcctgacctggtgccagcagcagacagagggctaccagcatgtcaacgtcaccgacctgaccacatcctggcgcagtgggttggccctgtgtgccatcatccaccgcttccggcctgagctcatcaactttgactctttgaatgaagatgatgctgtggagaacaaccagctcgcatttgatgtggccgagcgagagtttgggatccctccagtgaccacgggcaaagagatggcatctgcccaggagcctgacaagctcagcatggtcatgtacctctccaagttctacgagctcttccggggcaccccactgaggcccgtggattcttggcgcaaaaactatggagaaaatgctgacctcagcttggccaaatcatccatttctaataactatctcaacctcacatttccaaggaagaggactccacgggtggatggtcaaaccggagagaatgacatgaacaaacggagacggaagggcttcaccaacctggacgagccttcaaacttttccagccgtagcttgggctccaatcaagagtgtgggagcagtaaggaaggtggaaatcagaacaaagtcaagtccatggcgaatcagctgctggccaagtttgaggagagcactcggaacccctcactcatgaagcagaatctatgcgaaagtcatttccccttaacctggaggcagcgacacgtgttacttctgtaagaaacgtgtgtacgtgatggaacggctgagcgccgagggccacttcttccaccgggagtgtttccgctgcagcatctgtgccaccaccttgcgcctggccgcctacacctttgactgcgatgagcaaattttactg

SEQ ID NO: 189405 - DNA, 1254 bp, Homo Sapiens
  misc_feature (837)..(863): n is a, c, g, or t
gggagggcggtggagggggtgccagcttgccatgcgtgcaggggtggcggctgcgggcaccccggccaagtgggaaagggtggcggggctcccaggggcacctggcccccaaagggcattcgagccccatagggcgccccagtcccaaatgacatgtggctcccaaaagccacctggagctgctccatctgtgcctggtaggacaagtagctctggaggtaggctgagtaggctgcgttcagtgccgccgcctgcatccgctcaccgtccaggtgttggctctgttcccgcagggctcgggtgtcctgttccttcctccacatggcctttcgggcctgaagcctgtggggcttgaaggtgttggccaccttcctggcgaagatctgggagtgttcgtccagccgcaccagcccggagagcaggctggccgtgtcggagctgagctgggccggggagctctccaggggcaggaaggggatgacacagtctggcgacccctgtcgcgtgaggttgctcatcatggcttggttcacctggtgcaggctcaggcgacagtcgaagttggaggtgagaagtaggatgatgaaagctgagtggtctatggcgtcctgcaggcagctcagctccccgcgccccggcacctggaaatcctcgcagaaggtggccccgtcgggcacgccaagggcctccagcttctcccgaacccgcagggcgatgtgttcgtctgccctggcgtggaggatcacaaagttatagaatttctgttccgatgatgattccagggaggaagggaacagggaggagggggtcaggtgagctgaacaaggagtagatgannnnnnnnnnnnnnnnnnnnnnnnnnntgtttctggggtggtgggagtaggtgggcacggcttggtatttggagaggtggtatcttctacagaaagttggagtggcgtctggtctttgacagagcaggggtttttgaccggctccagaataggcaaggggagagactgggggcctgcagacccctcggtgcactccactgggtagttggtgctggtttctggagctgcgggggtatcagggaggccagtggaggttgcatctggggccacttcgggaagcccaggaggtgggctgcttggcagctctggtgggctggcaatctcccccgatggcggccagctcatctcctcaggctcctggcagccaccggggacaggctcgggcaccaagctggcctgggggtcgtcacagagccaa

SEQ ID NO: 189406 - DNA, 1348 bp, Homo Sapiens
acaaaaaagttggcgttctgctcctcactccccagcggctggaggccggtaccggcgggcaggaggcgcccgaggatgtgctgctggccgctgctcctgctgtgggggctgctccccgggacggcggcggggggctcgggccgaacctatccgcaccggaccctcctggactcggagggcaagtactggctgggctggagccagcggggcagccagatcgccttccgcctccaggtgcgcactgcaggctacgtgggcttcggcttctcgcccaccggggccatggcgtccgccgacatcgtcgtgggcggggtggcccacgggcggccctacctccaggattattttacaaatgcaaatagagagttgaaaaaagatgctcagcaagattaccatctagaatatgccatggaaaatagcacacacacaataattgaatttaccagagagctgcatacatgtgacataaatgacaagagtataacggatagcactgtgagagtgatctgggcctaccaccatgaagatgcaggagaagctggtcccaagtaccatgactccaataggggcaccaagagtttgcggttattgaatcctgagaaaactagtgtgctatctacagccttaccatactttgatctggtaaatcaggacgtccccatcccaaacaaagatacaacatattggtgccaaatgtttaagattcctgtgttccaagaaaagcatcatgtaataaaggttgagccagtgatacagagaggccatgagagtctggtgcaccacatcctgctctatcagtgcagcaacaactttaacgacagcgttctggagtccggccacgagtgctatcaccccaacatgcccgatgcattcctcacctgtgaaactgtgatttttgcctgggctattggtggagagggcttttcttatccacctcatgttggattatcccttggcactccattagatccgcattatgtgctcctagaagtccattatgataatcccacttatgaggaaggcttaatagataattctggactgaggttattttacacaatggatataaggaaatatgatgctggggtgattgaggctggcctctgggtgagcctcttccataccatccctccagggatgcctgagttccagtctgagggtcactgcactttggagtgcctggaagaggctctggaagccgaaaagccaagtggattcatgtgtttgctgttcttctccatgctcacctgggctggcagaggcatcaggctgcgtcattttcgaaaagggaaggaaatgaaattacttgcctatgatgatgattttgacttcaatttccaggagtttc

SEQ ID NO: 189407 - DNA, 1187 bp, Homo Sapiens
ggggtctggctggatggggtggggcagggccccctgcctattctacattcaagtgtcgctccctcccgtggtcttgcagggtctctctggagccttctgaggctggctggtagtggtgagtgagaagtggcatctcctctgtatcctcccaacatctgtctgtccagaattggtcccctcctctctgtggaggatcccgccgtgccccagcacagtgagcccaggctacgttgccgtttgcctgtctttgttccttcctgctgcactccctgcgagttcagtctgtggccaaggagagaggcttcacagagatgcaggaaagcaagccgttctgggtccttctttctagttcctttgctgttgggtctgagcacgccaggtcctccaagtgcccccgtagacaaccttaggcaggatccccacctctctggcatgggtgtcattgggggcccaccagccagcggcccgggggctgctccctgtcagtagttttgacagcaaagtcaatccagtgactgtggctcaagatggatccagtgtgaaagggggaggtgtcaccacattgcaggggccttttcctcccggctctggtgggaggctctttggcttgttttggcgctggcagaggctgagacacggcgagcccatgcaccatccgtgatgcaccagcacagtccacgagcagtgggccccacgtgcatctagggcacaggaatgcagtgcactcggcgttgtaaggtccacagcgctggccctcctgtgggaagatccccagggccagacagcatgtgcatgctcttgacgaggtgtatgtgcctgagcctgctgctaccagccaaaggtggtggcccctgtggactgtcagaggcataacttatgataaataggaagaaaggggacactgggggaggagggggtgggatcagggaggacgtcagtagtattggtcccgagtctgccagctggtcacccagtgcttcttggtgggcagggtgctccctggaggtgggtagcgctcctcctcccggatccgcactgcgtggtacttgggcatgatctgataatagcgggtccgcttaaagaagtcacaccaggtgggccgggggcggggggctgccccctcagtagtcgtcggtcagcctctctgtctctgacggctggctcttcatctccgccttctgccccaa

SEQ ID NO: 189408 - DNA, 1289 bp, Homo Sapiens
ttggatccatcagtactaaacccccgctgaccaaggatcgaggagtagctgccagtgcgggaagtagcggagagaacaagaaagccaaacccgttccctgggtggaaaaatatcgcccaaaatgtgtggatgaagttgttttccaggaagaagtggttgcagtgctgaaaaaatctttagaaggagcagatcttcctaatctcttgttttacggaccacctggaactggaaaaacatccactattttggcagcagctagagaactctttgggcctgaacttttccgattaagagttcttgagttaaatgcatctgatgaacgtggaatacaagtagttcgagagaaagtgaaaaattttgctcaattaactgtgtcaggaagtcgctcagatgggaagccgtgtccgccttttaagattgtgattctggatgaagcagattctatgacctcagctgctcaggcagctttaagacgtaccatggagaaggagtcgaaaaccacccgattctgtcttatctgtaactatgtcagtcgaataattgaacccctgacctctagatgttcaaaattccgcttcaagcctctgtcagataaaattcaacagcagcgattactagacattgccaagaaggaaaatgtcaaaattagtgatgagggaatagcttatcttgttaaagtgtcagaaggagacttaagaaaagccattacatttcttcaaagcgctactcgattaacaggtggaaaggagatcacagagaaagtgattacagacattgccggggtaataccagctgagaaaattgatggagtatttgctgcctgtcagagtggctcttttgacaaactagaagctgtggtcaaggtaaagtcagcttactaactttggggaaaggaatattaagtcatcataccaaaagttttttttattataggatttaatagatgagggtcatgcagcaactcagctcgtcaatcaactccatgatgtggttgtagaaaataacttatctgataaacagaagtctattatcacagaaaaacttgccgtaagtaggtactttgcacatgtcaatggaacatttaactacctgaaggatgctaatttcttaaatttttctcgtaggaagttgacaaatgcctagcagatggtgctgatgaacatttgcaactcatcagcctttgtgcaactgtgatgcagcagttatctcagatttgttaacgtgaatatatctggatggggggttttgtaaataatgaagttgtaataaaaataaatgaccaaaagccc

SEQ ID NO: 189409 - DNA, 1058 bp, Homo Sapiens
gtttaactcctccttgtgcaaagtttttgttttctgtccagtaagaataattttagttgggagctgagactctgattctgtccttgaacatctccaactctttgggcgtgagcaccatctatatttacaggagtataatcatcgggattctttttggcagtctgatgcaatatagtgtggacaactttctgaactaggatttcactcccaaattcacctggaaagtgcttggtaacaagtttcattgcaacatcgtaaacattactattcaaagatgaatcactttcatactggaaccaatatactgtttctctgaccactcttccaccccattctaaagtaatagggaaagcttctggtagattgtcatactccttaccatcccaaaagtgtttgaatccacaaccacatttgccaccagtggacctagaattagttctgtctccatccaaatacacaatagacccatctcctctgacctttcgcacagatgtgccatggcaccaattacaagctgttaggttactcattccatagtctggtaccagaacatctttcactgaatcatatgagcaaaccaaattgttcaagggaaagctgtaatttttgtcagtcctcagctgtccatgagtactttttgccaggttatacaatttccctccaggagccaaccactctggaggaacatgaagttcagaaagggcaccacagagcaaacatttgtgaaggcgattatccattactgcttttttagcagctgctgtgacttcctcaggctgaactcctatcactccagtccttctgtagaaatactgatggacatcagcaaccaaactaggatggataccatgtttgtccataaagacttcttccatagcagcaacaagcctaagtaagtatttatcttgcaaacttctgtcacctccaataacacaaccaccatcctcttcaagttttatgtactttttaataaggtcctgaggcacaccccatgctttaggaagcaaattcataggcagtttgggcaaagcagccccttttatgcctaccaaggccaa

SEQ ID NO: 189410 - DNA, 1312 bp, Homo Sapiens
  misc_feature (112)..(123): n is a, c, g, or t
  misc_feature (143)..(151): n is a, c, g, or t
  misc_feature (281)..(542): n is a, c, g, or t
  misc_feature (583)..(614): n is a, c, g, or t
ttgggttttggtattcttgatggaaaaaaatgcagcggaaatgtcattatgaacagatgttaaataggaaattattacttgttaacttcttacagcagtagtaccttctttnnnnnnnnnnnngaatctgcggtatttttttnnnnnnnnngtttactgctgtagtgtgaaatattgtctggaaagggatggtttaaatattaccatgatgtagttgaaatataaaataggatttggaaccttattgtgataaatatttatatatgatgtatgtttgtctnnnnnnnnnnnnnnnnnnnnnnnnnnnnnnnnnnnnnnnnnnnnnnnnnnnnnnnnnnnnnnnnnnnnnnnnnnnnnnnnnnnnnnnnnnnnnnnnnnnnnnnnnnnnnnnnnnnnnnnnnnnnnnnnnnnnnnnnnnnnnnnnnnnnnnnnnnnnnnnnnnnnnnnnnnnnnnnnnnnnnnnnnnnnnnnnnnnnnnnnnnnnnnnnnnnnnnnnnnnnnnnnnnnnnnnnnnnnnnnnnnnnnnnnnnnnnnnnnnnnnntgcactgcagcctgagagagagagagccagaccttgtctcnnnnnnnnnnnnnnnnnnnnnnnnnnnnnnnntaaggaatccttttaaagcatgttgagaaagtattttttggtatgaatgggtgacgggccttttaatctttcaggaatacatataagcaggaatacttagcctgtattgggaaggtgcgtgaaactcaaagttgctaacatcatcttccttattttcagccagtgctgttactgcatttagcatggctctgacgaggcagtggagagttcctgacagcatagcatactgccttctgacagactgggttaagctaccaaaaatgacaaccagggattcaaaaaaaatttttggtcattaaatcgaatgtatattattactttttaattttctaagtatttatcacaggactttaacaccatatatttccctcccagtttttctccccttttggtttaatagttaaaacatttttcataattagtgctgtacatttgattgcaaacaaattggtgatacttctaaactataactataaatctctagaattctgtgaatttcaacattatttgaagtagttcttcagttatatttacatgtgttgtaaatatgtaaatatacttttagcttaggaagtcttccagaatacaaactactcccagttagatatcagtgagtttgaataactgaagaaatgttgacaatgttaagtgtttgattttatataacaagcttattaaatatatttttgtggaaacta

SEQ ID NO: 189411 - DNA, 710 bp, Homo Sapiens
tgatgtatccctttgaagtgtttcttctaaacattcagcctatcaaacatcagttgctgtagacatttgtgtccaagggaaaaataatccatgtcacatcttggtgagatgaaatattccatggtatcagtcctattaaagccagggctggccaggtaaactcttggcattcttcgtgccgcaattcctaaactcaatagaagaatcttgttaatggacatttcgttcatcctgagacgttgctttggcataactcagaggtagattcagcccaacaactggccctacaatgctcagccatgatgtgatatagttgacattcttattgattttctgagaattctttaatacaggagtcatgaattcattcgtcttgcagggatgaagtacaaaaaagggttgcccaagtattggatgttcctgttgcgtaatagtgtcccatggtccctgtagcagtcgcatcttatagcactcatgaactccttcccatatgtccttcagagttaaaggtctcccatctaaaaagcttgccctaaagtaaagtacaggcacttggtagctacaggaatataagacatgatactcatatttaatcacttcggacgctgctgcagtttcaatcacttcacaatcatccaagggtagctcgaaagcctcctccatgggaagacatgtctgtccatgggtagatgctcctagatgtgacccaa

SEQ ID NO: 189412 - DNA, 849 bp, Homo Sapiens
ttgggtctctgccacctggtctgccacagatccatgatgtgcagttctctggagcaggcgctggctgtgctggtcactaccttccacaagtactcctgccaagagggcgacaagttcaagctgagtaagggggaaatgaaggaacttctgcacaaggagctgcccagctttgtgggggagaaagtggatgaggaggggctgaagaagctgatgggcagcctggatgagaacagtgaccagcaggtggacttccaggagtatgctgttttcctggcactcatcactgtcatgtgcaatgacttcttccagggctgcccagaccgaccctgaagcagaactcttgacttcctgccatggatctcttgggcccaggactgttgatgcctttgagttttgtattcaataaactttttttgtctgttgataatattttaattgctcagtgatgttccataacccggctggctcagctggagtgctgggagatgagggcctcctggatcctgctcccttctgggctctgactctcctggaaatctctccaaggccagagctatgctttaggtctcaattttggaatttcaaacaccagcaaaaaattggaaatcgagataggttgctgacttttattttgtcaaataaagatattaaaaaaggcaaataccatccaccatcactatcatttcataaaaagataaaatttcaattccaataaaggaggaaaggtataatttcagaataaaggacagaccttacattcaatactgcaagtatgagttgtaccaggatctactcaagagatatgaatagtctaatcgaccccgcaaagcttaattaaaagattccttg

SEQ ID NO: 189413 - DNA, 1831 bp, Homo Sapiens
  misc_feature (261)..(294): n is a, c, g, or t
  misc_feature (1325)..(1337): n is a, c, g, or t
ctttgtacaaaaaagttggaggagcattaaaccatggggcatagacttgtttgatctaatgtcccccaatgcggtgcaagttaccatttcctcagcattgcatttaattataaaaataacaggaacattaaatctttatctttgctgtttcaccacaaagtcatagatcatctggctttttaggcaccttcactaaaggcaaaaatctgatttgtagtttttattagcatgtaccttgaaattatttgaccaagaagctcnnnnnnnnnnnnnnnnnnnnnnnnnnnnnnnnnncctcacttttcctttatagtgtcccttcctgttttaattcctaaagatcctgacttttatctgaggaagtctaggtagttttccttttggatctggccattggtgcgtgtttcattcagatcacctctggaatctctgtggttgtgaaggcaattccttatgagactcttgcctcctgtggcttacgtgatgaattgttaatatggcagtaattaattagtatctacttaaatttagtggtcagaaatgtatttgaagtgccttaaagatgatcatggttcagaatatcttcagagaaagcaaaatctttaatattgcagggagcctagcaatacaagtacacatttctgtggcttgatttcttgaatatgctgagacccaatttggactacatttggcagaaatgatggagtaaacagcaaggctttaaattaaattaatagttacaaggtaggttggctcttaggtgaatttagccatgtcaactaatagcttttatatggtatgtaacaaatctgaattatgttatgctgtgaattattcagtgcattataagaaatcttagttaatcatgcttttgggcttcattagtcaatgtgattggccttttattttctttccataacttatctgctattattagtttcttattccttattattaatctgttagctcattatcattagcttactaacttgaaagttagattaatatcaaaataagaatagcagcactatgaagagttaataaaatgcaatttcatgttagagctagaataaaagtaattgagcagtcatttgcaaatgcttcattataacatttatgtgcttaagatttctaaggttttaaaaagttacctttaatacaatccttagaaactcagaaatttcctgatattcattagattatggtgtttgcctaatttataccggttttcactgtatattttaatgaactttgattggttacttttccagacatacagatttaatttggaatatgaactttggttcttcatgagtgcattttgnnnnnnnnnnnnngtacacattcagaatctggccaatttaagtttgtattttaaaaatattttatgcatgttaagtatggtcgcagtaaatgaaattgtgtttaagactaaatttactaccgttttgaacagacattcccagatcattcttatattgtcagataacacttgtgtataatatcactttggaccatggacatgagctggaaaaatgatgtatttttgtagattgtatgtccagaatgactttagaaccgcatgatacggtggaaggagcactggactagtcgtcactaccctttttggattcagggctcctcacaattaaaatgagtgtaatgaaacaaggtgaaaatatagaagcatccctttgtatactgttttgctacttacagtgtacttggcattgctttatctcactggattctcatggtagatttctgagatcttaatctaagctccaaagttgtctacttttttgatcctagggtgctccttttgttttac

SEQ ID NO: 189414 - DNA, 1320 bp, Homo Sapiens
tcttggaatgtttactaagcagtcagaaggtgacttactccattccccagttccagcccctgagcatagagggtttagggttaggaggagtaccacagactgaagaggaagtagagttaagggcttggcaagttgcccactcctatccctggtctagctgcctcagaactaaacgaggcctggaactaacaagtcactcccttccagattagatgaggccagctggcctttggatgccccaggaagaggtggtggcagcagtggcatgagggatccctctgtaactccacatgccaggtcatctgcactggattagatgtccatttcaaattgtgcgtcatcgggtatctcttcctctgtctcctgctccttcagctcctccagcttggagagaggggctgttggaggagttgtgaccccgggaatctgagggaggcagcaggggggtgtccgggcaatgggtgagttcttgcactccagcaggaactttcggtcgtagatgatcctggtgcctctggttaggagaggccaccatcggccgtccaattctcttcttcggtctggttagctgaggtgatgggatttcccctttgagagcagggactgaaggaagcagactggcctgctgggcatcagtgcattcagttgaattttggataacttttatcatagggttccaagcaggatctggattgtgaagtccattaaacagagggcctcctggaacatcagcaagctgaggatgagagggtattatggtgcctccatacatggaaattggcagacctttagaaaaatcccaaaaccacttgccataggctgatgaaaaatgttagagggggctaccattccagaatcatctctctccattggctgatgttgggagaatgtgcttgggtctgataattgttgatgcattggatggttccccatcacagattgcgaccaacctgataagccttctgacacagcattgacaccaaatgaccagattccactgtgtccaacgggagcgacaaaactggtccccgccggggcttgtgcaacagaccctccttgccgaattcgggccagtctctctgttccaattgggggaggtatctttcgatcttgactggcactgactccttttggttggcccaacgttggtggggcagaagtggctgaaagaggtgaagatgatcccgaagaaacagatggaataggagagtcacatgagtttgaggcgcttgtccaaggatggggagaaaaatgttgtctgttgaaactaggagtcccaacaggagctggcccttgcaggaaaacccttgttcctgccaa

SEQ ID NO: 189415 - DNA, 455 bp, Homo Sapiens
aactgtattactctcactttgtatatgaggacgcagaaccacagagaggttaagacacctgcctaaggctgcacagacaggaggtggcacagccaggatatgaatcaggcagccaggctccagggttcatgctgtcaatcaccctgctctgctgcctgtcaggaagggaccttggccagtgcctgctcctcccttaacctcccgtctctaccccggcaggtggtaggcagctccctcctcttcgtgcacgaccacaccggcctggccaaggtctggatgatagacttcggcaagacggtggccttgcccgaccaccagacgctcagccacaggctgccctgggctgagggcaaccgtgaggacggctacctctggggcctggacaacatgatctgcctcctgcaggggctggcacagagctgagctgctcagccaccatcaagttaattggatgg

SEQ ID NO: 189416 - DNA, 1126 bp, Homo Sapiens
ttggcagaattacagctggaagctgccaaacgagggattctttcatctggtcggggcagaggaattcattcaagaggtcgaggtgcagttcatggccgaggcagggggcgagggcgagggcgaggtgtgcctggtcatgctgtggtggatcaccgtcccagggcattggagatttctgcatttacggagagcgatagagaagatcttcttcctcattttgcgcaatatggtgaaattgaagattgtcagattgatgattcctcacttcatgcagtaattacattcaagacaagagcagaagctgaagcagctgcagttcatggagctcgtttcaaagggcaagatctaaaactggcatggaataaaccagtaactaatatttcagctgttgaaacagaagaagttgagcctgatgaagaagaatttcaggaagagtctttggtggatgactcattacttcaagatgatgatgaagaagaagaggacaatgaatctcgttcttggagaagatgatttgactgatcattgatctacatatgctagaactctacctgtgtttcattagtattatctaatgtacttttacatatttgtaaaaacaatttttggtaaaatgtgatgaagatggatttcacaaatagacaaaaaagaagaaaactaccttctgatcttgtattttgaaagattgatgtttgcattttacttcagtaaacaattgctaaagacatcacactagaaacatatgcaatgtttttattacatacttctactggacatcacagaattctttgggttctttgtaatttaatgaataggtctgaaaacttatgaccaatacttgttataacttagaggactttgttttattccaaataaggaatgaatttgcatttaaaatcttaatgaatgttttcaaaactgaatagataacatagtactctaactaaagtctccaagttatgtattataatattacatagtagtatgcttaggctttactatgtattagccttttgttggactgtgtatgtattttaccatatgggttttaatgataatggtgtatgactgctttacatgagtccttatgcatccagatgttataataaagtggaatggtctcttt

SEQ ID NO: 189417 - DNA, 1540 bp, Homo Sapiens
  misc_feature (1056)..(1090): n is a, c, g, or t
ttggatacataatgtttttcctttcttaattttgtctttttgtttgggatcagcttcttgcactccttccctaactcaactgttgccgtctcatcttctctcatctgatcacttcatgttttgtttttgttactgcctggatgaggcacttctgtcaattttttcaggaccttagttccagcagcagaatggaaaaatccttgaagcccaggctgatgcttgaagtaactgtggagggagtgttcaaaatactactgacgcaggcaccttcttggcgctggagagtcaaaggcatctcccttcattagctgctctgagcatcaagaattagaagtctttcagtggaattgtacaagagtccctttgaagataataatcttggctcagtttgtataaactgtcaaattttcaaataataggtagggggctttcactaggaaaatcatgtgctcagaagaggaaatgactcgtagtcaggttcaggagttagtggagtatttggactttggtactgctgtcttccaaggtagctctaagttttgatgtgtgggcttctgagtttatattctgaaaggaaatacacttcttttgaacatccccactaggttcttttccattgtcaataaggagcatcagccagtgaatctgtttcaggtttccattctgcagaactcctccaaagcatgtgctagtggcaagacagtggttcttatgatgttttcccttaacttttccttgtatgttcttgggtggttcctaagggaaagggaagcacatgatcatgggaatgatagcccagaacaaaaagaaatcttgtcttaccacagtgttttataggagagattgggagaaatcatcctgttttctctgtgacctgatttcagaagagactgatccaaaaattataacggcagggaacctagtgcatttggcactgagatttaaatgcaaccagaattgtcctcaaggcccagccataaaagcattgtctctctcgaccttctggtatcttgttagagagcttttcactgtgaggaagtgtggaaaaatagctcnnnnnnnnnnnnnnnnnnnnnnnnnnnnnnnnnnnaatctgttaggttggggataggttttctgctagccaatattaaaagagacctgcaataaaaaaattaccctgatctgatagaaagcaagtgtttttgtatgtgtgggtgaatgtgtgttcatgcccgtatatgtctacacacagatgacaaattatatttgaaatcgttggaaaataaattcagatcaaaatgcctttcaggcccattacctagaaatctatcttaaaacctgggtatgttcctaaggtcatttctttgcttatgctaaattaattacaattatgaatggaggatattctactgtacttttttaaaaagaaactatttttgtgtttgaaagtgaaaccaacatccagatctatagcagagtccttattcttctcataaatctttttactttggctacaaatagatgatggtatgattctattatatattttatataaaat

SEQ ID NO: 189418 - DNA, 1340 bp, Homo Sapiens
  misc_feature (220)..(257): n is a, c, g, or t
ttggctctaatccctctgttccttctcccccatctttctaaaacccttctctgagagaggaataactatagcttcagggataatatagctttaaggaaacttttggcagatgtggacgtcgtaacatctgggcagtgttaacagaatcccggaggccgggacagaccaggagccactcgttctaggaatgttaaagtagaaggttttttccaattgatgnnnnnnnnnnnnnnnnnnnnnnnnnnnnnnnnnnnnnnaaaagggcacaaaataccataaaacagatcccatatttctgcttcccctcacttttataagttaattgatggctgacttctgaaagtcactttcctttgccctggtacttcaggccatatacatcttttcttgtctccataatcctccctttcaaggatggccagtcagctaactcaaagaggagctctctttctgctgttcttcctaactccggcagtgacaccaacatggtatgcaggttctggctactatccggatgaaagctacaatgaagtatatgcagaggaggtcccacaggctcctgccctggactaccgagtcccccgatggtgttatacattaaatatccaggatggagaagccacatgctactcaccgaagggaggaaattatcacagcagcctgggcacgcgttgtgagctctcctgtgaccggggctttcgattgattggaaggaggtcggtgcaatgcctgccaagccgtcgttggtctggaactgcctactgcaggcagatgagatgccacgcactaccattcatcactagtggcacttacacctgcacaaatggagtgcttcttgactctcgctgtgactacagctgttccagtggctaccacctggaaggtgatcgcagccgaatctgcatggaagatgggagatggagtggaggcgagcctgtatgtgtagacatagatccccccaagatccgctgtccccactcacgtgagaagatggcagagccagagaaattgactgctcgagtatactgggacccaccgttggtgaaagattctgctgatggtaccatcaccagggtgacacttcggggccctgagcctggctctcactttcccgaaggagagcatgtgattcgttacactgcctatgaccgagcctacaaccgggccagctgcaagttcattgtgaaagtacaagtgagacgctgcccaactctgaaacctccgcagcacggctacctcacctgcacctcagcgggggacaactatggtgccacctgtgaataccactgtgatgggcggttatgatcgccaggggacaccctccccgggtctgtcagtcc

SEQ ID NO: 189419 - DNA, 850 bp, Homo Sapiens
atgcttttttaccatatagaaacaactttgtacaaaaaagttggtgaccctccatgccaaccagcttccctactcctaccctggcccttttatactaggactccttaggaggagtgagacaggtgataatggatccttaacagatgaactatccacagaaggaagagggatccgtctcttaagtaattggttagttaacactgaattttggaggcaaaggagggttggcctgagttaggaaacaaaatgggatctttctgacacacttagggcagaagtgaatgcctgtcacggagggattgatcttcagggctgtttttgttcctgcctttagagttccatgaacaccatacctttgctactactatgtgcaggaacccttggtcacatgtgacatgtctgtgggaagctcccagagtttggtttggtccctggttttcagtcttgctgagactctgtctggatttgcctgcagagtttggataaaaaatggcaggttgggtaaccctccctgttcatcccatgttagctccaaagcatttcccaccctccatctaccccttccagaagcaaaaacaaaccatgactgaggcaggcatggagttgggcgttaggggcaggcagagggcctttgctacactgctgacagctatagggagccccaggtaatggcatgagatagctggtgttagggctatctcaggcaatatggccacacctgggtctttatgcatgaagataatgtaaaggtttttattaaaaaatatatatatgtataaataaatgatctagatattttcctctttttctgaaactactttcttaaaaaataaataaaatgtttatagca

SEQ ID NO: 189420 - DNA, 989 bp, Homo Sapiens
actttgtacaaaaaagttggccagctgcggggacgcacttgggactcctcgagaggggactcgcggccgcgatggcaaggcatcctgtgaattcatgcgctgcgagtggcggggctgcccagaggccgggggagcagacagggccggtgctccctctggaagcttgggtgaccggggccctggctcccacgggatggagggtgtggtcctgtggtcagagcccaagcagcactcaggagaggggagaaaggaggtgcacctggcagcccacatttttgttgctccccaaatccctccccacgtggggatgagaaccttcctgctgtgatgtgacaccttcggggacattgaccactcaaaactcagatcatctcgcccaccctggagagtgcagagctatctgtagacttaggaatacttgatgggcagcggtgcagaccccgggcacctgcgtgcagcctcctgttctcggcagcttctgtcgctggccctggggtccccacagctgcagctctcctgtgaggttgcacggcatcagaaccatcctgaccttcttagggacgtgcctggaaccacctcgtccacgtccacgtccacctgggggcctcgggaggctaggcccctcctcaaaggcccaccagcccggcgctcatgctgagccccaggcacgcagggccggccacctctctcctgaagccattggccgctcctccacccagtgcttctgcccatgcctgccccagcagcccctctgcacggtcaccatcgcctgggcctgcccacagcactggtgctcacctctacctcctgtcctcaggccgtgcggcacgacatggccagcacgcagaaggagccctcccgggacccaggaccccccgtggtggactccgcggcacatgcttcccaaggtggtcccacggagggtgttactgggcaccagtggactcgccccatggcccgttcctgggagatgagggccgtggccctgc

SEQ ID NO: 189421 - DNA, 946 bp, Homo Sapiens
  misc_feature (526)..(535): n is a, c, g, or t
  misc_feature (540)..(601): n is a, c, g, or t
ttgggtagactgttgggtaggctgcgtgctagcttcggcgcggatccctgggcgtccgtacgtcggagtccttcgtcctccagggtccctgttctttgcgccagcgggaaccactatctctgcactcctggggttttgttacatggctgctttcctcaaaatgagtgttagtgtcaatttcttcagacctttcaccaggtttttggtgccatttacccttcataggaagagaaataacttaacaattttgcagagatacatgtcttccaaaataccagctgttacttatcctaaaaatgagagtacacccccttctgaagagctagagttggataagtggaaaactaccatgaaatctagtgtgcaagaagaatgtgtttcaacaatctcaagcagtaaggatgaagatcctctagctgccaccagagagttcattgagatgtggagattgcttggcagagaagtaccagaacacatcactgaagaagagctcaaaacccttatggaatgtgtttctaacacagcnnnnnnnnnntattnnnnnnnnnnnnnnnnnnnnnnnnnnnnnnnnnnnnnnnnnnnnnnnnnnnnnnnnnnnnnngcagcagcaagggaagaagcaaaaaatatcaagctgctagaaaccactgaggaagataaacagaaaaactttctatttttacgactttgggataggaatatggacatagcaatgggctggaaagtgcccaggccatgcagtttggacaacctttggtttttgacatggcttacgaaaattatatgaaacgaaaagaattgcagaatactgtttcccagcttttagaaagtgaagatggaacagaagaaaatgttgatcctttccatatttatttctgcaatctaaaaatagataggtgctttgcacagagagttagttaaacggtatcaagaaaaatgggacaaa

SEQ ID NO: 189422 - DNA, 999 bp, Homo Sapiens
agcaatgctttccttttaatagccaactttgtacaaaaaagttggacaccgacctctgcatgtttgagtatgccaaggatttccttggatctggagaccccaaagaaacaaagatgctaatcaccaaacaggctgactgggccagaaatatcaaggagcccaaagccgccgtggagatgtacatctcagcaggagagcacgtcaaggccatcgagatctgtggtgaccatggctgggttgacatgttgatcgacatcgcccgcaaactggacaaggctgagcgcgagcccctgctgctgtgcgctacctacctcaagaagctggacagccctggctatgctgctgagacctacctgaagatgggtgacctcaagtccctggtgcagctgcacgtggagacccagcgctgggatgaggcctttgctttgggtgagaagcatcctgagtttaaggatgacatctacatgccgtatgctcagtggctagcagagaacgatcgctttgaggaagcccagaaagcgttccacaaggctgggcgacagagagaagcggtccaggtgctggagcagctcacaaacaatgccgtggcggagagcaggtttaatgatgctgcctattattactggatgctgtccatgcagtgcctcgatatagctcaagatcctgcccagaaggacacaatgcttggcaagttctaccacttccagcgtttggcagagctgtaccatggttaccatgccatccatcgccacacggaagatccgttcagtgtccatcgtcctgaaactcttttcaacatctccaggttcctgctgcacagcctgcccaaggacaccccctcgggcatctctaaagtgaaaatactcttcaccttggccaagcagagcaaggccctcggtgcctacaggctggcccggcacgcctatgacaagctgcgtggcctgtacatccctggcagattccaaaagtccattgagctgggtaccctgaccatccgcg

SEQ ID NO: 189423 - DNA, 822 bp, Homo Sapiens
  misc_feature (542)..(557): n is a, c, g, or t
gagcaatgctttccttataaaagccaactttgtacaaaaaagttggattatggcccccttccataccctgactggggagttgctttaggctggtgtatgattgttttctgcattatttggattccaattatggctatcataaaaataattcaggctaaaggaaacatctttcaacgccttataagttgctgcagaccagcttctaactggggtccatacctggaacaacatcgtggggaaagatataaagacatggtagatcctaaaaaagaggctgaccatgaaatacctactgttagtggcagcagaaaaccggaatgagatctcattgaaaaaaatatatgattgtataatgtgattttttttagaatagggggaaccttatttatttgtgtgttaactgaataggaaaatgtacatactatgttcatgatagtgtgatttttttcacatttaagcaggaatgcaatataaaaatgtgaatctcttaattctcagccatgtgcttattatatttctttttagattgtctatctgtatannnnnnnnnnnnnnnnctaagagtctctatttcacaattatatttttgtaaatagtatatgcatttttaatacattggaggctttattttgaactaatttcttagagaatagttatattttctattacacaagtttaaaaatattattaacttgtattttcttaatatacaatctatcttttcccacaaatatgagtggggaaataaaatcagcacattttgaaaagaaagtgttaaaactgaagggcctcacttattagaaacgtgataaatatatggac

SEQ ID NO: 189424 - DNA, 831 bp, Homo Sapiens
ttgggcctatctgggctgcgtcttctcgccgctgctcttcgtggcccaacgccccaatccttgcgtgtccttgcagtcccaccccacactcagccttgtgtccctcgatccagtctccgacttccatttcccaccctaaaccgcctacccggtgtctgttccccgcccggttgtcctcgccctgctgcgctgagtgtcccctgttagcctcgaccccatggcgctgcagacgctgcagagctcgtgggtgaccttccgcaagatcctgtctcacttccccgaggagctgagtctggctttcgtctacggctccggggtgtaccgccaggcagggcccagttcagaccagaagtcatatctgacggcagcttccagaacatgctggctcccatatccacagagcactttcctccaacacggctccctacccttccctgtgcttcccccagtgcttccagcaagtctgtttaattcacgtgtccttcaagactcagatttgtcatctctaggagaatttctccctcctgtgcccctgatctgatccctatgctgagtgcgaatgctatgctggactttgtgttcacagtagatgaccctgtcgcatggcattcaaagaacctgaagaaaaattggagtcactactctttcctaaaagttttagggcccaagattatcacgtccatccagaataactatggcgctggagtttactacatttcattgatcatgtgtaatggtaggcttatcaatatggagttattagcactaacgttctgattgaagatctcctcaactggaataacttatactttgctggacgactcccaaaac

SEQ ID NO: 189425 - DNA, 902 bp, Homo Sapiens
cccacagcggactcagggacatcacacgtctcaacacaacaggcggacacgtccagggctgctccccgccagccctcaggctcgggtgggccagggctctagaagacggtgcacttcttccccggcttcttcactgggggcgggcagagcaccgcgcggatcgcctcgtcaaacactgtcttcaggccccgctgagtcagggctgagcactccaggtatttcacagagccaatctcccgggccatggccaggccctgtgggtaggtgatgggtgccagtttcttgtcccgcagccgctcaatggtgtccttgtcgtcgcggaggtccagcttggtgcccaccaggaggatgggcgtgtgggggcagtggtgccgcacctccgggtaccacttggcacgaacattctcgaaggaggccgggctcaccagagagaagcagatcagaaagacgtcagtttgggggtaggagagtggccgcagccgatcgtagtcctcctgacccgctgtgtcccacagccccaagttgactggtttcccgtccaccatcacgttggcagagtagttgtcaaaaacggtggggatgtactctccggggaaggcgttggtcgtgtagctgatcagcaagcatgtcttccccacggcgctgcggacagggcaagccacgtggctcccgggcccggcctcggaccctctgcccagcaagggcagccccctctcccggagccagaggcgagttaggggcgtctggggtcgagagggggacccagcccaccagatccgtggcgacctaaggctggaggacgacctgggcaggccgggctccgggggctggggtggtgaataagggcgcagggcgccccacactggggccccaggcagaggccccgactccgagggtgccaa

SEQ ID NO: 189426 - DNA, 473 bp, Homo Sapiens
ttgtacaaaaaagttggttttcattgaggtattagatgagaagataatgtacaaactgcctcaactgtaatttaaggatgatagagtctgtatacagttttcagcccctttccctctatagtaagataatcagaataacataaaagaaaactccagttggagtaccggtaaatatttttgtgataagaatatatgaagcttccctccttcccccgtttttagtactaacatgtaaaatgttcaggcttttgtgaaataccttatattttttaagaaaaaggtttctatcatgtcctgtttgcttttgtgcaaattatttttgtttaatgtattttatatcttcgttgcattctaattttgcccttctttaaactgctggagtctcttctcactgcttgtacatttcatcaacttgtataaaaactcttcagactaaaagattgcccctaatgtaaataataaatatttatgaa

SEQ ID NO: 189427 - DNA, 897 bp, Homo Sapiens
ggaagaattaaatgaaatgaatattgatgggccagaaccttctagtagacctgcgaactcataaaaatggtatatattatgctaaaaatagtttagcagtagtgtagctcagtctctcccacccccaattaagtattgacaatacacaaattctaaaacatgaagctgtttaaagcattaataaactgtgaacatattgcactagataagtgaacactcctgtttctccaaatacatgagtgagttgcatttcccagcacaagcaggattaatccctgtggtacgcaaggagcaggctctgctgttccaagcgactcagtcctggtgaccacacgtactccaagctcagccccacgtagagttactggtcccgagattcatagaggagcttggcagccttgtgcatggccactagccacgccaccgcctgcctcctgcccacagtcacgtcctccaccactgtcagcttcagctgggtcacaccctccgtccccggcactgtatactgcaggaacatgcctgtggcccgtgcgttgcctcctggaggagagagacgaggtaagacggcccaaaggaggccctgagtgcccaggcggccaccagccccaaggcggtggccagcacatcctaaccttgtgctgctccaagagtagcctggcagtgagggctggtgctcaggagcacccagggaacaccatctcctcaggcctctgaggggagaccccaagctcacaggtggggtgggagagggaccaagacactcagccgggtgccccagggcccgggacaaacaacaagagccacatcaccacgagaggccttgctctcggctaattgaggcgctgctatgccctggggcctgtgggggttcctgccttcagagccaacttttttgta

SEQ ID NO: 189428 - DNA, 1221 bp, Homo Sapiens
ttggctccgaggtgtccgcgcgccgcgacgccaagaagctggtgcgctccccgagcggcctgcgcatggtgcccgaacaccgcgccttcggaagcccgttcggcctggaggagccgcagtgggtcccggacaaggagtgtcggagatgtatgcagtgtgacgccaagtttgactttctcaccagaaagcaccactgtcgccgctgcgggaagtgcttctgcgacaggtgctgcagccagaaggtgccgctgcggcgcatgtgctttgtggaccccgtgcggcagtgcgcggagtgcgccctggtgtccctcaaggaggcggagttctacgacaagcagctcaaagtgctcctgagcggagccaccttcctcgtcacgtttggaaactcagagaaacctgaaactatgacttgtcgtctttccaataaccagagatacttgtttctggatggagacagccactatgaaatcgaaattgtacacatttccaccgtgcagatcctcacagaaggcttccctcctggaggaggcaacgcacgggccacaggcatgttcctgcagtatacagtgccggggacggagggtgtgacccagctgaagctgacagtggtggaggacgtgactgtgggcaggaggcaggcggtggcgtggctagtggccatgcacaaggctgccaagctcctctatgaatctcgggaccagtaactctacgtggggctgagcttggagtacgtgtggtcaccaggactgagtcgcttggaacagcagagcctgctccttgcgtaccacagggattaatcctgcttgtgctgggaaatgcaactcactcatgtatttggagaaacaaacaggagtgttcacttatctagtgcaatatgttcacagtttattaatgctttaaacagcttcatgttttagaatttgtgtattgtcaatacttaattgggggtgggagagactgagctacactactgctaaactatttttagcataatatataccatttttatgagttcgcaagtctactagaaggttctggcccatcaatattcatttcatttaattcttccacagaaccaagtttgggcagtaggaactcaggcttctggtctgcagtggagcctgttcgcctctaatagccagtttacagcacttgccttagcctgtttcacagaacttgtccacttaccttgtcactaatttgggggctttctggggctgt

SEQ ID NO: 189429 - DNA, 2218 bp, Homo Sapiens
  misc_feature (1040)..(1061): n is a, c, g, or t
  misc_feature (1731)..(1740): n is a, c, g, or t
  misc_feature (1896)..(1908): n is a, c, g, or t
aaagaaaggatagattttaattgcttgatgcaagtgtggttttcctgaatctgttcattgacttgtctctgttcttacagaaaacatcggttgtgaagagaaagccaaaaagaatgccaacaagcctttgctggatgagattgtgcctgtgtaccgacgggactgtcatgaggaggtgtatgctggcagccatcaatatccagggagaggagtctatctcctcaagtttgacaactcctactctttgtggcggtcaaaatcagtctactacagagtctattatactagataaaaatgttgttacaaagtctggagtctagggttgggcagaagatgacatttaatttggaaatttctttttacttttgtggagcattagagtcacagtttaccttattgatattggtctgatggtttgtgaactcttgctgggaatcaaaatttccttgagactctttagcattcatactttggggttaaaggagattcctcagactcatccagcccttgggtgctgaccagcagagtcactagtggatgctgaagttacatgagctacatgttaaatatttaaagtctccaaaataaaacaccccaacgttgaccttacccggctgatggttagccccttgctgcctgctccatgtgtcttatgagagcccgtagttacagtgtcctctaatttgaaatccataagttaacaagtctatatcaggtgcagctggctttgattaaaggccatttttaaaacttaaaaactcaacacctcacagattataatagaaaaagaaatggcctcagtttgatctcgttcagaatgacccagattgtttctgctttgggtgcagctgtttagttcagagttatattacagagaattattttctgagataatcttaaactagaatgttcaaaactaattgataattgaagtatcaagatacgtagaacacctcagagatttttcttcaggaacttccacaaactttgaatccttgtatctttatttggtattcatactactagtagcaaaatacagnnnnnnnnnnnnnnnnnnnnnnggcttcatagagtatctcaaattgaaacttttctgcacaaagaataaaattaaggattttataaactcaaattggcacctactgaattaaaatacataaaatcatttaaatataattcagcatatgggaagtaacattgcactaatatggaaatcactgccagagacagtctattttcttttaatttgttactacttagtcacaaaccccacattattccagtttggaattacttattaaggagaattggaaatacatatgcccatgcttaaattttatagctttaatttgtgttatttctttattgacgggaagaggtacatctttttttccttactgaaaacaaatatggattaattggctcaaatttgtataagtgattggctagtgattcttgttttcagaagggagagtggtatagatagaaaatgacaaagatggcaatatacacttaatgttgttattgtatgttgttactgaagtacttagatttttaaaatttcaaatcctaaatcacttcttgtaggagggttttcattaactgcagtatatacagttcactacatatgggttgtttgagttttttgtgtgctgtatttctttctgttttttaatacctggttttgtacatatctaactctgttctcttttggttgttcagaaactggannnnnnnnnncttaagcagtgcttaatttgtgttttttaattttgattcagaagtagtcccagctcataggtgttcatactgttacatccagaacatttgtcaggctctctgtcagctttcatgtacatatggtatagaaaccatggagttaggcacttcctggannnnnnnnnnnnnatgagaaaaatactgtatttaaaatgtaaaataaacttttaaaaagcaggcactaatatatatttcttccagcctttgattacaaatttgtccttgcacatgttaagatgaattatctcctaaaaatatcattgttcttgggagcagtgtatgttactttacatagcagcggttcctgtcatgtgttcatgtcagaatatttttggttttaaactttcttattgcctttggctgttgattagtacagtacaagtgcgatttcaaaaagatcttgaaagtatatatttcatcaattaaaatgtttatctgt

SEQ ID NO: 189430 - DNA, 998 bp, Homo Sapiens
ttggggtcaaggagaaggtgttggaccaagtctacaagggcacccccttctcccagaggccctcagtgcatgccctagaccttgagtggcgctcaggcctggctggtcacctgaccctatcggacgaagacttgacctccgtgacccaaaaccactggaagagactcaacaccttgcaacactacaaggtcccagatggagcaacagtggggctcgtccctcagctgcaccgtggcagcaccatctcccagagcctggcccagagatgccccttgggagagaacatacccacgctggaggatggcgaggaggggggggtgtgcctctggcacctggtgaaagccaccgaggagccagaaggggccaaggtgcggtgcagcagcctgcgggagcgcgagccagcaagggccaaggccattccggaaatctacctcacccgtctgctgtccatgaagggcacgctgcagaagtttgtggacgacaccttccaggccattctcagcgtgaaccggcccatccccatcgccgtcaagtacctgtttgaccttctggatgagctagcagagaagcacggcatcgaggacccagggaccctgcacatctggaagaccaacagtctgctgctgcggttctgggtgaatgccttgaagaacccacagctcatctttgatgtacgggtgtcggacaatgtggacgccatccttgctgtcatcgcccagaccttcattgactcctgtaccacctcggagcataaagtgggccgggattccccagtgaacaaactgctctacgcccgggagatcccacgctacaagcagatggtggagaggtactatgcggacattcgccagagctctccggcgagctaccaggagatgaactctgctttggctgagctctccgggaactacacttctgctccccactgtctggaggctctgccagaactctacaaccacatccacagggtactatgatcagattatcagtgccctgga

SEQ ID NO: 189431 - DNA, 1510 bp, Homo Sapiens
  misc_feature (1200)..(1254): n is a, c, g, or t
ttgggtccgtgcagtcccacaaggacctcatcctgcagtgcctggacgacaaggacgagtccatccggctgcgggccctggacctgctctatgggatggtgtccaagaagaacctgatggagatcgtgaagaagctgatgacccacgtagacaaggcagagggtaccacctaccgtgacgagctgctcaccaagatcattgacatctgcagccagtccaactaccagtacatcaccaacttcgagtggtacatcagcatcctggtggagctgacccggctggagggcacacggcacggccacctcatcgccgcccaaatgctggacgtggccatccgcgtgaaggccatccgcaagttcgccgtgtcccagatgtctgcgctgcttgacagtgcacacctgctggccagcagcacccagcggaacgggatctgtgaggtgctgtacgctgccgcctggatctgcggggagttctcagagcatctgcaggaaccacaccacactttggaggccatgctgcggcccagagtcaccacgctgccaggccacatccaggccgtgtatgtgcagaacgtggtcaagctctacgcctccatcctgcagcagaaggagcaggccggggaggcagagggcgctcaggccgtcacccagctcatggtggaccggctgccccagtttgtgcagagcgcagacctggaggtgcaggagcgggcgtcctgcatcctgcagctggtcaagcacatccagaagcttcacgccaaggacgtgcctgtggcagaggaggtcagcgctctctttgctggggagctgaacccagtggcccccaaggcccagaagaaggttccagtccccgaaggcctggacctggacgcctggatcaatgagccactctcggacagcgagtcagaggacgagaggcccagggccgtcttccacgaggaggagcagcggcgtcccaagcaccggccgtcggaggcggacgaggaagagctggctcggcgccgagaggcccggaagcaggagcaggccaacaaccccttctacatcaagagctcgccatcgccacagaagcggtaccaggacaccccgggcgtggagcacattcccgtggtgcagattgacctctccgtccccttgaaggttccagggctgcctatgtcagatcagtatgtgaagctggaggaggagcggcggcaccggnnnnnnnnnnnnnnnnnnnnnnnnnnnnnnnnnnnnnnnnnnnnnnnnnnnnnnngcaagcgccgccacagctcgctgcccacggagagcgacgaggacatcgcccctgcccagcaggtggacatcgtcacagaggagatgcctgagaatgctctgcccagcgacgaggatgacaaagaccccaacgacccctacagggctctggatattgacctggataagcccttagccgacagcgagaaactgcctattcagaaacacagaaacaccgagacctcaaaatcttctgagaagacgtttctcatggtaga

SEQ ID NO: 189432 - DNA, 1466 bp, Homo Sapiens
ttgggagtcaggccagcaccctgcgaccagcttctccactgatgcacatcgaaggcttcctggcagctctcactacggccaaccaggacggcagggtcatcctgagccgccaaggcagcctcagtcagagcaccctgaagtttttgctcctgaatccagctgtgcactttgcccaagtggtgaaggaatgccgggcagtggtcattgcggggggtaccatgcagccggtgtctgacttccggcagcagctgctggcctgtgccggggtggaagctgagcgcgtggtggagttttcctgtggtgagaagctgtgcccagggtggggcaggctagaggtcaggttctggcccccgttttctgtgggtaatacctcatactgcgaccaggcacaggggcggaggagaccccggggtgggagcctcacccttcgtgcgctcgcccaggctctcctgctttgctccctgctgcctgctgcccagtgtgactggtgatggtgggcgggtgagcgctgtcagtcgctgttcctgtgctggatgatggggcagggaaatgccctctctgcagtgtcttgcagcacacctgcatctccagttttcggcccctccctggctcttaccaggtcacgtgatccctccagacaacatcctgcccctcgtcatctgcagcgggatctccaaccagccgctggaattcacgttccagaaaagagagctgcctcagatgatggacgaggtgggtcgcattctctgtaacctgtgcggtgtggttcctggaggggtggtctgtttcttcccctcctacgagtacctgcgccaggtccatgcccactgggagaagggtggcctgctgggccgtctggctgccaggaagaagatattccaggaacctaagagcgcacaccaggtggagcaggtgctgctggcatattccaggtgcatccaggcctgtggccaggagagaggccaggtgacaggggccctgctcctctctgtggttggaggaaagatgagtgaagggatcaacttctctgacaacctaggccggtgtgtggtgatggtgggcatgcccttccccaacatcaggtctgcagagctgcaggagaagatggcctacttggatcaaaccctccccagagcccccggccaggcacccccagggaaggctctggtggagaacctgtgcatgaaggccgtcaaccagtccataggcagggccatcaggcaccagaaggattttgccagcgtagtgctcctggaccagcgatatgcccggccccctgtcctggccaagctgccggcctggatccgagcccgtgtggaggtcaaagctacctttggccccgccattgctgctgtgcagaagtttcaccgggagaagtcggcctcttcctgatgggcaaccacaccactgcctggcgccgtgcccttcctttgtcctgcccgctggagacagtgtttgtcgtgggc

SEQ ID NO: 189433 - DNA, 728 bp, Homo Sapiens
tttgtacaaaaaagttgggtttggagcatggccttactgttatatgttcttatgtgtggatttctaccatttgatgatgataatgtaatggctttatacaataacattatgagaggaaaatatgatgttcccaagtggctctctcccattagcattctgcttcttcaacaaatgctgcaggtggacccaaagaaacggatttctatgaaaaatctattgaaccatccctggatcatgcaagattacaactatcctgttgagtggcaaagcaagaatccttggcagtatgatcacctcacggctacctatcttctgcttctagccaagaaggctcggggaaaaccacttcgtttaaggctttcttctttctcctgtggacaatccagtgctaccccattcacagacatcaagtcaaataattggagtctggaacatgtgaccgcaagtgataaaaattatgtggcgggattaatacactatgattggtgtgaaaatgatttatcaacaggtgctgctactccccgaacatcacagtttaccaagtactggacagaatcaaatggggtggaatctaaatcattaactccagccttatgcaaaacacctgcaaataaattaaagaacaaagaagatgtatatactcctaagtctgctgtaaagaatgaacagtactttatgtttcctgagccaaagactccatttaataagaaccagcataagagagaaat

SEQ ID NO: 189434 - DNA, 926 bp, Homo Sapiens
ttggcgaaaagattcttaggaacgccgtaccagccgcgtctctcaggacagcaggcccctgtccttctgtcgggcgccgctcagccgtgccctccgcccctcaggttctttttctaattccaaataaacttgcaagaggactatgaaagattatgatgaacttctcaaatattatgaattacatgaaactattgggacaggtggctttgcaaaggtcaaacttgcctgccatatccttactggagagatggtagctataaaaatcatggataaaaacacactagggagtgatttgccccggatcaaaacggagattgaggccttgaagaacctgagacatcagcatatatgtcaactctaccatgtgctagagacagccaacaaaatattcatggttcttgagtactgccctggaggagagctgtttgactatataatttcccaggatcgcctgtcagaagaggagacccgggttgtcttccgtcagatagtatctgctgttgcttatgtgcacagccagggctatgctcacagggacctcaagccagaaaatttgctgtttgatgaatatcataaattaaagctgattgactttggtctctgtgcaaaacccaagggtaacaaggattaccatctacagacatgctgtgggagtctggcttatgcagcacctgagttaatacaaggcaaatcatatcttggatcagaggcagatgtttggagcatgggcatactgttatatgttcttatgtgtggatttctaccatttgatgatgataatgtaatggctttatacaagaagattatgagaggaaaatatgatgttcccaagtggctctctcccagtagcattctgcttcttcaacaaatgctgcagtggacccaaagaaacggatttctatgaaaaatctattgaccatccctgg

SEQ ID NO: 189435 - DNA, 948 bp, Homo Sapiens
ttggcgaaaagattcttaggaacgccgtaccagccgcgtctctcaggacagcaggcccctgtccttctgtcgggcgccgctcagccgtgccctccgcccctcagagtgatttgccccggatcaaaacggagattgaggccttgaagaacctgagacatcagcatatatgtcaactctaccatgtgctagagacagccaacaaaatattcatggttcttgaggaaaatttgctgtttgatgaatatcataaattaaagctgattgactttggtctctgtgcaaaacccaaggcagggtaacaaggattaccatctacagacatgctgtgggagtctggcttatgcagcacctgagttaatacaaggcaaatcatatcttggatcagaggcagatgtttggagcatgggcatactgttatatgttcttatgtgtggatttctaccatttgatgatgataatgtaatggctttatacaagaagattatgagaggaaaatatgatgttcccaagtggctctctcccagtagcattctgcttcttcaacaaatgctgcaggtggacccaaagaaacggatttctatgaaaaatctattgaaccatccctggatcatgcaagattacaactatcctgttgagtggcaaagcaagaatccttttattcacctcgatgatgattgcgtaacagaactttctgtacatcacagaaacaacaggcaaacaatggaggatttaatttcactgtggcagtatgatcacctcacggctacctatcttctgcttctagccaagaagctcggggaaaaccagttcgtttaaagctttcttctttctcctgtggacaagccagtgctaccccattcacagacatcaagtcaaataattggagtctggaagatgtgaccgcaagtgataaaaattatgtggcgggattatagactatgattggtg

SEQ ID NO: 189436 - DNA, 921 bp, Homo Sapiens
ttggctctgtcctgggcactgtctctgttgcggataccaagggcgtgaagaggaaaacgttattcagggagaacggctccaagccaagggccatcgtggtggatcctgttcatggcttcatgtactggactgactggggaactcccgccaagatcaagaaagggggcctgaatggtgtggacatctactcgctggtgactgaaaacattcagtggcccaatggcatcaccctagatctcctcagtggccgcctctactgggttgactccaaacttcactccatctcaagcatcgatgtcaacgggggcaaccggaagaccatcttggaggatgaaaagaggctggcccaccccttctccttggccgtctttgaggacaaagtattttggacagatatcatcaacgaagccattttcagtgccaaccgcctcacaggttccgatgtcaacttgttggctgaaaacctactgtccccagaggatatggttctcttccacaacctcacccagccaagaggagtgaactggtgtgagaggaccaccctgagcaatggcggctgccagtatctgtgcctccctgccccgcagatcaacccccactcgcccaagtttacctgcgcctgcccggacggcatgctgctggccagggacatgaggagctgcctcacagaggctgaggctgcagtggccacccaggagacatccaccgtcaggctaaaggtcagctccacagccgtaaggacacagcacacaaccacccgacctgttcccgacacctcccggctgcctggggccacccctgggctcaccacggtggagatagtgacaatgtctcaccaagctctgggcgacgttgctggcagaggaaatgagagaagcccagtagcgtgagggctctgtccattgtcctccccatcgtgct

SEQ ID NO: 189437 - DNA, 507 bp, Homo Sapiens
ttggctcaaggccacctgggcctgttccgctggccctggggcacccatcgtctagggggacagagggactttggcctggttattggggaagctcctcctaccgcagttccaagctgcgcccaacagtcctgggtggatggggccccgggagcctggtggtgactccaactgtccccggccccccagatctgccacagcaaaagtggggaaatcaacccagtgaaggtgagcaacctggtgcgggcctacgtccagcgctaccgctacttccgcaagcacggtcgcaagccaggggaccccccagggcccccacggccgcccaaggagccagggcccccagacaagggtggcccgggcctgcccctgccccctctctgagagccctggccagctcttcgcccctcacctctttgaaactctggacgtatttatggctccacctccccacctccctcccccgtcagtgggatgactgggggagggttgctgcagggaagaggagagccc

SEQ ID NO: 189438 - DNA, 833 bp, Homo Sapiens
ctttgtacaaaaaagttggatcatctacctccggcggttcaagtgcctgcggacgctcagcctctctaggaaccctatctctgaggcagaggattacaagatgttcatctgtgcctaccttcctgacctcatgtacctggactaccggcgcattgatgaccacacagcaagtgtctccctctcagtctcccagccctaaaaagcttgcggaggctaagcaccagtacagcatcgacgagctgaagcaccaggagaacctgatgcaggcccagctggaggacgagcaggcgcagcgggaggagctagagaagcacaagactgcgtttgtggaacacctgaatggctccttcctgtttgacagcatgtacgctgaggactcagagggcaacaatctgtcctacctgcctggtgtcggtgagctccttgagacctacaaggacaagtttgtcatcatctgcgtgaatatttttgagtatggcctgaaacagcaggagaagcggaaaacagagcttgacaccttcagtgaatgtgtccgtgaggccatccaggaaaaccaggagcagggcaaacgcaagattgccaaattcgaggagaagcacttgtcgagtttaagtgccattcgagaggagttggaactgcccaacattgagaagatgatcctagaatgcagtgctgacatcagtgagttgttcgatgcgctcatgacgctggagatgcagctggtggagcagctggaggagactataaacatgtttgaaaggaacattgttgacatggtaggactgtttatcgaaaatgtcccaagcctgatggctcagtgccgggacctggga

SEQ ID NO: 189439 - DNA, 883 bp, Homo Sapiens
  misc_feature (633)..(642): n is a, c, g, or t
ttgggctttttataggctgcattcgcgattctatgagctggcccccaacctcgtcccaatggactacaggaagagccccatcgtccacgtgcccatgagcctcatcatccagatgccagagctccgggagaatcccttcaaagaaaggatcgtggcggcgttttccgaggatggtgaggggaacctcactttcaacgactttgtggacatgttttccgtgctctgcgagtcggctccccgagagctcaaggcaaactatgccttcaagatctatgacttcaacactgacaacttcatctgcaaggaggacctggagctgacgctggcccggctcactaagtcagagctggatgaggaggaggtggtgcttgtgtgcgacaaggtcattgaggaggctgacttggacggtgacggcaagctgggctttgctgacttcgaggacatgattgccaaggcccctgacttcctcagcactttccacatccggatctgaggacactgccgaggctgtaggggcctagaagtccaccatcctgccctgcagtcacatgggtgtggcctccaagctccccaggaaagcagtggcagcctctggggtttacaccacaaatatatcctgtggccctttcagcnnnnnnnnnnccttaaccaggaagggggcctgtgaaggttaggacccttcccacagctccgctgtggtccagccccgggacccatggcctctctccaggccctccgcaccccgcccatgccccagtcctttcctactccagaaatgctctcccacccctcccaagagggaaaagcagataaccaacaggagttgtggggtctgacgtgtccaagtgctgggcagacactctggtcacccaggacagagcgg

SEQ ID NO: 189440 - DNA, 540 bp, Homo Sapiens
ttggggaaaagcggggcccagggtgaggagcccgagctgttgaccaagctccacccggccttccagacccctaactcgccagggtcgggcgggttccccacgggcaggttggcctagcctgggtcctccgcgggtggctccacgtgaggcctgagccttcagcccacgggcctcagggcctgccgcctcctgcttccctcgctgcggaggcagggaagcccctgtaactccggaagcctgctctcgcttgctgagcccgctgggaccgccgagggtgggaataagccccggttggctcgtgggaataagccgtgtcctctgccgcggctgcgatgtggccaggctggggctgctggtcgggggaagacagtgaactgcgttccctggcctgcttcctgcagagtttgtgcatggggagtgtgaggacatggagggtgggaggctgggcgttcagctgccagggccttccaatgccaccgttgtcacagacaatgcctgtccaaacgtcccggtgggatcagcactgcagcccgcccacaa

SEQ ID NO: 189441 - DNA, 929 bp, Homo Sapiens
ttggcgccaatattcaacagcgttcttaaactgaacaagcatatcaaagagaatcataaaaacattcccttggccctgaattatatccacaatgggaagaaatccagggccttaagccccctatctcctgtggccatagagcagacatctcttaagatgatgcaggcagtaggaggtgcacctgcacgtcccactggagaatatatctgtaatcaatgtggtgctaagtacacatccctagacagctttcagactcacctaaaaactcatctcgacactgtgcttccaaaattgacctgtcctcagtgcaacaaggaattccccaaccaagaatccttgctgaagcatgttaccattcactttatgatcacttcaacgtattacatctgtgagagttgtgacaagcaattcacatcagtggatgaccttcagaaacacctgctggacatgcacacctttgtcttctttcgctgcaccctctgccaggaagtttttgactcaaaagtctccattcagctccacttggctgtgaagcacagtaacgaaaagaaagtctataggtgcacatcttgcaactgggacttccgcaacgaaactgacttgcagctccatgtgaaacacaaccacctggaaaaccaagggaaagtgcataagtgcattttctgcggtgagtcctttggcaccgaggtggagctgcaatgccacatcaccactcacagtaagaagtacaactgcaagttctgtagcaaagccttccatgcgatcattttgttagaaaaacacttgcgagaaaaacactgtgtattcgaaaccaagacacccaactgtggaacaatggagcttccgagcaagtgcagaaagaggaagtggagctgcagactttgctgaccaacagccaggagtcccacaacagtcacgatgggagcgaa

SEQ ID NO: 189442 - DNA, 939 bp, Homo Sapiens
  misc_feature (205)..(294): n is a, c, g, or t
ttggatcgggaagcaggagcatcttcttggcagccaggctgggccatcttctcctggacacctgctgtgtaccaggaacttcgtcacctccttgaatgctggcggttcatttcatgatcagtgttaagcattttcctccatgggaaggaagcatgggatatagaaaagcgaagggctgtcctttacaaattctggttctgcaacnnnnnnnnnnnnnnnnnnnnnnnnnnnnnnnnnnnnnnnnnnnnnnnnnnnnnnnnnnnnnnnnnnnnnnnnnnnnnnnnnnnnnnnnnnatctaccttcaggattgctgacagacagaatttgaaataaaatatgcaagttagctaatacaaaaagtagatgatccaaaaatggtagccactcacccttcacaaactgaagtccatggaccacggaagtcgagaattaatgtacacctgtatcatgtgtaggaaaccagaaatgtgttccttatttcttgttcccaaacaggattaactgtgaagactaatttataaatgtgaacctaagaaaactccacctctgaaggaaatcatttgaattttgtttttgtacgtaaagttaaccttccaattgtctgagctgtcgtcactgacttcatgacagtctggccctccagacaagagcagcgctggcatcgggcaggtgattcctgacacctgctgcctgcaggcattcactgaccaggcctttcctggaggaaacacccagggccgggcggctgctgtttccacacgtggactcggatctgctgtgacaccgtcagcccgacagtctctccatatgcagcctttcctctgtacttttctccatggttgaataaaacagggtgactgggagttacttataattcatgagattttaaaatggctttggagattttgcttttaaaccagtagattcaaaacttaaac

SEQ ID NO: 189443 - DNA, 941 bp, Homo Sapiens
ttggcttcatatgaagcagcatattttactgctggagatttttgtagatgttacaagttccgtggaatgtttggaactgcgagatactgatttggacactttccatttttcagaactatccactggtgaaacaaattcattgattaaaaagtttacatttagaaatgtgaaaatcaccgatgaaagtttgtttcaggttatgaaacttttgaatcagatttctggattgttagaattagagtttgatgactgtacccttaatggagttggtaattttagagcatctgataatgacagagttatagatccaggtaaagtggaaacgttaacaatccggaggctgcatattccaaggttttacttattttatgatctgagcactttatattcacttacagaaagagttaaaagaatcacagtagaaaacagtaaagtttttctggttccttgtttactttcacaacatttaaaatcattagaatacttggatctcagtgaaaatttgatggttgaagaatacttgaaaaattcagcctgtgaggatgcctggccctctctacaaactttaattttaaggcaaaatcatttggcatcattggaaaaaaccggagagactttgctcactctgaaaaacttgactaacattgatatcagtaagaatagttttcattctatgcctgaaacttgtcagtggccagaaaagatgaaatatttgaacttatccagcacacgaatacacagcgtaacaggctgcattcccaagacactggaaattttagatgttagcaacaacaatctcaatttattttctttgaatttgccgcaactcaaagaactttatatttccagaaataagttgatgactctaccagatgcctccctcttacccatgttactagtattgaaaatcagtaaggaatgcaattacctacgttttctaa

SEQ ID NO: 189444 - DNA, 693 bp, Homo Sapiens
tgtacaagaaagttgcatttttttactttatgtatgtttatagagcaggagtttttattgtaaagaggccgattgtacagagcaaagattgttctgacacggggggctgggtggtgggacccagaggccagagctgggtgaaggatgaggggtggcatcgccccatccaggcagtgggcagggcagggaggactaaacggctgcctcccagttcccttccctgcccctcattactgggtaagagggagccaggctatttccatggatccaggagaatatagcaggagaccctcaccaccccacaccatgccccaaggatacgggaggtgccccagtctggcttttgcagtcggccagctcccagcctcctcgaggagcagcctggccacacctttttcccctggagcctggaacagctggctttgggttaggaggctggaagcacccccttaccctgtccaggcacctcaagggacagcccgtggttccctggtcaaaccccttagggcacagtgacccattttggcttctgcctctggggctgggtagcacaggagtgggtgggcactgaggggccagcactgagccaggtcttaaagagggagtccgagtgttgggggcagtggtctctggtgggggcatagccccagagatggggctcctgtgagtccagcctaggggttgaggggccaa

SEQ ID NO: 189445 - DNA, 343 bp, Homo Sapiens
cccctccctgtgtgccccgctcccatgtgtccacagttcctccggctctctgaccgaacggatccagctgcagtttatagtctggtcacacgcacatggggcttccgtgccccgaacctggtggtgtcagtgctggggggatcggggggccccgtcctccagacctggctgcaagacctgctgcgtcgtgggctggtgcgggctgcccagagcacaggagcctggattgtcactgggggtctgcacacgggcatcggccggcatgttggtgtggctgtacgggaccatcagatggccagcactgggggcacaaagtggtggccatgggtgtggccccctgggg

SEQ ID NO: 189446 - DNA, 611 bp, Homo Sapiens
ctttgtacaaaaaagttggggcaaacaaactgtgaaacttaaagattgattttatcatcaagttatgacgaacttggggaagaggaaggaaccaggcaaaacaaagaggataaacacacagccatactcctgggccagagggcccagaaacaagaacaacattgaaaaagtccaggaaccagttcctgtgcccaaaggtacgaatgtgtcttttcgaattcccttgataaagaagcctcagacaaggaagaaaatagaaatgaaattggacacataaataggacacccagcaaaggccagaagagaagcccttctaggagaagggacatctgtgcttccagctgagatcagcccatgtctctggtcgctctcttgcctgtggatcctgtcttctttcatgtttactacgaggcatgacattcatggcaaaacagggatgccgtttccaagagcagctataaaacaatctgttttcctaaagacagccactctgagaaggagatgaaggaacacggcagggttcatcaattcatagactgtttccaaaaataatttttaaacttttccactaggcatctgtgtctttaaccactgcacagtgcagtgcctgt

SEQ ID NO: 189447 - DNA, 369 bp, Homo Sapiens
actttgtacaaaaaagttggctcaacatgccgacctaactataattgacaacatagaagaaatgaattttcttaggcggtataaatgcagttctgatcactggattggactgaagatggcaaaaaatcgaacaggacaatgggtagatggagctacatttaccaaatcgtttggcatgagagggagtgaaggatgtgcctacctcagcgatgatggtgcagcaacagctagatgttacaccgaaagaaaatggatttgcaggaaaagaatacactaagttaatgtctaagataatggggaaaatagaaaataacattattaagtgtaaaaccagcaaagtacttttttaattaaacaaagttcgagttt

SEQ ID NO: 189448 - DNA, 680 bp, Homo Sapiens
ttggctgtgctgtaaaaacaagagtaacatttttatattaaagttaaataaagttacaactttgaagagagtttctgcaagacatgacacaaagctgctagcagaaaatcaaaacgctgattaaaagaagcacggtatgatgaccaaacataaaaagtgttttataattgttggtgttttaataacaactaatattattactctgatagttaaactaactcgagattctcagagtttatgcccctatgattggattggtttccaaaacaaatgctattatttctctaaagaagaaggagattggaattcaagtaaatacaactgttccactcaacatgccgacctaactataattgacaacatagaagaaatgaattttcttaggcggtataaatgcagttctgatcactggattggactgaagatggcaaaaaatcgaacaggacaatgggtagatggagctacatttaccaaatcgtttggcatgagagggagtgaaggatgtgcctacctcagcgatgatggtgcagcaacagctagatgttacaccgaaagaaaatggatttgcaggaaaagaatacactaagttaatgtctaagataatggggaaaatagaaaataacattattaagtgtgaaaccagcaaagtacttttttaattaaacaaagttcgagtgttt

SEQ ID NO: 189449 - DNA, 816 bp, Homo Sapiens
cagcatccaatttaatttctttcgattctggccttgggaagacttgagagcctgtggggtcagggttcccttaatgtccttgtttgcataaatgaaactggttttaagaggtagggtctccctttaatctaactaaggctctctaagcccctgttggtccctgaagagagaccttgtaaaataagggaaactaaggggtggacttaaaacaagttttcatttgggaacaatttctggattagcaaagctgaatttaattttttaataggataatgaattttatgttttaagtgccaaaaacattaggaggaaaaaggacccatttcttacctttcccaaacctgccatagacacaataaaactctcttaagactctttaccctaaaaggaaccagctataaaactgtcttatacaggaaaatgtcttaaatggaaaatggtccatcagagacaaaggtaggaacccgagaaatgtctatacattcagaaaaactttaaaagctccttaataagacgggggtgtacttctaggggatggaggagaggcaagagcaaacaccaatgaccaattcacatcaatggaaagaacacagagagaaagcccccaaccccaaacaggttacgggattgtcccatcccgttatgtttcatatgatggagagatttcaaaggctaggttctctggcccagacagaacaaagtttgtaatggaaacagagacccctggtggctactgtgtgaactgccacaataacttacaaagagactggtctatgaccaggagaggctacccatgccagagactagaaaaacata

SEQ ID NO: 189450 - DNA, 650 bp, Homo Sapiens
  misc_feature (260)..(273): n is a, c, g, or t
actgagcccagccaagacttcagtgttgactgctttggaggcacaaacccatgcaagcgttagttccaaagttcagtgtgtacccttaaatgaacaatgaagcaggtaaaattacccttgaaaaaaatcccttggaccacccataaatgacagtgactttttcaatatggactcatcatagccagttttccttttgaagttggaactgatcacccttttgtcatctgtaccagatcagtagttggcttgtgttacatttnnnnnnnnnnnnnncgtgttttaaaccagtgcatataaattgtatgttaaatgtaagtaactttaagttgacttatctcttcacagtaatcaagcctcacgtaattcatgctttttaaattcagccagccccccctctctgaaattttattatgtaaataatttgtgttccctgatcactcgtttaagttcttagttgtatgtcatctcttctctagcaggaattggcaaacttttttgtaaaggggtagaaagtgaagattttaggctttgcaggccatatagcctctgctgcaaatgctcagccctgctgttgtaatgtaaaagctgccacagacactacatgaacacgaatgagtgtggttggtgttccaataaaactttatttacac

SEQ ID NO: 189451 - DNA, 1206 bp, Homo Sapiens
  misc_feature (634)..(775): n is a, c, g, or t
  misc_feature (901)..(984): n is a, c, g, or t
ttggccttcacatgttgatgttcgcacacaagccatgtaccagatgatggatcaaggctttgtaggacttattttttcctgtttcatagaagataagaacacaaagactggccgggtactctacacttgcttccaatccatacaggcccaaaagagttcagagtcccttcatggtccacgagacttctggagctccagccagcacatctccattgagggccagaaggaagaggaaaggtatgagagaatcgaaatcccaatccatattgtacctcatgtcactatcgggaaagtgtgccttgaatcagcagtagagctgcccaagatcctgtgccaggaggagcaggatgcgtataggaggatccacagccttacacatctggactcagtaaccaagatccataatggctcagtgtttaccaagaatctgtgcagtcagatgtcggcagtcagcgggcctctcctacagtggttggaggacagactggagcaaaaccaacagcatttgcaggaattacaacaagaaaaggaagagcttatgcaagaactttcttctctagaataaatcaggagacaaaatggggaaagatgaaaatatccagtgtaaagttacttaagctaaatcaatttcaannnnnnnnnnnnnnnnnnnnnnnnnnnnnnnnnnnnnnnnnnnnnnnnnnnnnnnnnnnnnnnnnnnnnnnnnnnnnnnnnnnnnnnnnnnnnnnnnnnnnnnnnnnnnnnnnnnnnnnnnnnnnnnnnnnnnnnnnnnnnnaatatgctcagctgattttgaaaaagtgaaaaagcaattcaatggaggaagaatagcctttctgacaaattatgctagagcaattagacacccatggcgaggagaaaaaagaacctctacttaaannnnnnnnnnnnnnnnnnnnnnnnnnnnnnnnnnnnnnnnnnnnnnnnnnnnnnnnnnnnnnnnnnnnnnnnnnnnnnnnnnnnacaggagaaaaatcttcaggatcttgggctaggtgacaagttcttggactttgccccgaaagcacatccataaaagacaaaatctgatatattggacttcttcaaaatttaaaaacttgtgatttaagaagaggaaaagataagctacagattgagatgaatttgcaaaccatatatctgatcaatttggaatatataaagtgtactaaaaactcaactgaa

SEQ ID NO: 189452 - DNA, 261 bp, Homo Sapiens
ttgggtgatacataaaactagataactttgaaaaaagccacaggagaaaaatcttcaggatcttgggctaggtgacaagttcttggactttgccccgaaagcacatccataaaagacaaaatctgatatattggacttcttcaaaatttaaaaacttgtgatttaagaagaggaaaagataagctacagattgagatgaatttgcaaaccatatatctgatcaatttggaatatataaagtgtactaaaaactcaactgaa

SEQ ID NO: 189453 - DNA, 937 bp, Homo Sapiens
aatttgtacaaaaaagttggatggaactttatttacactcctctatcatgcaaaaaaattttgactttttagtactaagcttaatttttaaaaacaaaatctgtagtgttgacaaataaatagttgctcttctacactaggggtttcacctgcaggtttgacacgcagttgctcgcttttcctgccctgtcaagcttctctgttctggcgtgagttgtgaaagagttgaagacagcttcccatgccggtacacagccagtagcctaaatctccagtacttgagctgaccattgaactagggcaagtcttaaatgtgtacatgtagttgaatttcagtccttacgggtaaacagattgagcatggctctctattccctcagcctaagaaacactcatgggaatgcatttggcaacccaaggaaccatttgcttaaacctggaacatctcacctttttaaatcctaaaaaacactggcagttatattttaaattagtttttatttttatgatggttttatcaaaagacttttattattagattgggacccccttcaaacctaaaaatcaagttatttccttttataatacttttcttccccatggaacaaatgggatcaatttgtgagttttttcctttaatgataactaaaatccctctaatttctcatttatgcttttgtcttttttatgaaatatttcttttaaaagccccagtctcacctacgaaatatgaagagcaaaagctgattttgcttacttgctaaactgttgggaaagctctgtagagcatggttccagtgaggccaagattgaaatttgatactaaaaaggccacctagctttttgcagataacaaacaagaaagctattcccagactcagatgatgccagctgtctcccacgtgtgtattatggttcaccaggggaactgggcaaa

SEQ ID NO: 189454 - DNA, 479 bp, Homo Sapiens
  misc_feature (310)..(318): n is a, c, g, or t
ttgggtgtcatcgaccgacctctcaggcccctacatctgggttccagcccgagagagactctgattcctgccctggcttggcctggactcgccctgcctccatcacctgggcccttggtctggactgaattgcccaagcccttggctccccccggcctccctcccaccccttcttatttatttcctttctaactggatccagcctgttggaggggggacactcctctgcatgtatccccgcaccccagaactgggctcctgaacgccaggaacctggggtctgggggggagctgggctccttgttcctannnnnnnnnccttaggatccccgcccccacctgcccccaatgcacacacagacccaccgggggccacctgccctcccccatcctctcccacacacattccagaagtcagggccccctcgaggagcacccgctgcagggatgcagggccacaggcctccgctctctcctaa

SEQ ID NO: 189455 - DNA, 926 bp, Homo Sapiens
gaaagtggacgtgttatggcatttcattcaaatccatgaggagaaaaaactacgggaggaaatcttacaacaccattgctgccaccacctgcagggccagcttctcactaggatggaaaagaagcgtttctgaggaacaattcacattagtacaaaaaaatgatacagccatttccaaagagcagagtaatgatcacaatggcagtttcgaggaatccagggtcagtcctcacacgggcctcacccagcctctcccgagtggcgacggcgctgagagccagaaagggggcaacgcgaagacgagtttctagcgacccttgggaaaagcctacgctacacatttcagaggagattaaaacattccatatgccaattaactttaacctaaaaaaatagagtgggagggaaccttgacattcggagaaattcaagtgtggcggtaacgctgaggagtgaggctgtttgtccaggaacgctgagctgggctcagacggtcatcagtgcagacgcagcggacgctgctgaggatggctcagtggtggggaggcgctccctcccgaggaggcctgtacgtctgtgtcctggcggctcgagctgggtcctccgggccagttcatgctcgccctctcccgcaggcagggccggccgccctgcaccgcccctggatccggccaagcggccgcctggcgctatttgccctctgtgactctccgccagcccctccgccgccgcctcttccccttcggcttccctggctctggggggggcttctcagtcttggtgcttctgaccgatgccgcccctaagtcatgctcacagcagtaggaccgcccgtccggggtgcagctgaaggctgtcccgtcctggtgctccttacagaacgaattggggcagagccaacttttttgtacaaagttgtttattag

SEQ ID NO: 189456 - DNA, 1027 bp, Homo Sapiens
ttggccctgtgccagggacaggaaagataggagaaagaaagtttatcagaattttttaaacctgtctcagaaataacaacatattttaatcagagatttatgttgctatgaggacagattcatcaaaaatgactgacgtggagtctggggtcgccaattttgcatcttcagcaagggcaggccgccggaatgccttaccagacatccagagttcagctgccacagacggaacctcagatttgcccctcaaactggaggctctctccgtgaaggaagatgcaaaagagaaagatgaaaaaacaacacaagaccaattggaaaagcctcaaaatgaagaaaaatgaaggctcataatctatcaagagtgctgaatttctgcatgttgaaagacttagtggttctgttttcttgagacatttaatctggtggtaactgtggtaacattgcagccctaagcagcatgtgtatattagataattgtgttgtgatgctactcactttgattgcaatgatgatgtccaaggtaagctattaaaaggcaggttacttccaaatcgcactgaaggaaaaggttaagaataatacatgatcacagaaatgcataccactgtctgtaaacccaacaaaattcactgttctcttttggatttatttagcctgatgtatttttaattcaatttttatggtgatgggcaaatcattcttggtaaatgtaaatcaaacatgattgatttaaaacttcatggaatttgtagaaaattatggacatttttggtgagaaagaacaatagtcaaaactcacatggatagagtgtgtttgttttttgccaaaaatgccccagactttttcccaaacctcaaaaacgtcttggaaaaattgtaaaagtttgataacagaaacatctttaggatatttttgtctgacatattttgcttctagtatgtgcctactgtgattttttttcatgtggaaaatgcaaaatttgtaacaaaatggttatatggaacatgcctattaaatgaattt

SEQ ID NO: 189457 - DNA, 840 bp, Homo Sapiens
caatttggggaggaagcagttccagaaggcgcaggcctggcgcgcagcccccgccgcacctccagcggccgcaggtccagactaacgtactgctgagcccccgccgtgtacgagagccattgtagagccttggggtctcggggctcattgggatcccctgtgcgggcaaagttggcccagtatcgcatcagtcgctgggcgaagattttctcctctgccgtgtagtttcgagaggggtgccagggggatcccaaagatgaactcgatctcgtagccgtggggcacccccatccacaggggccaggagagcgtggaagcacggtgttcaaagacgtaggcgtagacccgggcaccctgggcagccagtcgcccagccagctgggccacggggcacacgacattgtggtcgcccaccacatcgctcagggcctccctcaggcgtgccgggtcctcgggatgcagccagtctgtgtaatgcaggaccacagcctcggctgccaggtcacttacctggggaaccccgacccgcaccccggccaggaactcggcccggctgatgagagactcgttgtctttgctgaagcctggggccccgtaaaccagaaaatacgagccctcatccttcaccacacccaccagcacctgcaggccgtggaagtctcccgcgttgatgagggcctctggggtgtcactgaggaagtctccatctaccacaggcacgaaggagaaccggaagacgctttcttgaggcagcacgtgccattcgtggttcaccaggacctgcgctggtcgtgtccgaaggcaggctaccagctctgtgccaacttttttgtacaaagt

SEQ ID NO: 189458 - DNA, 948 bp, Homo Sapiens
ggaaccgcggttgtttaaaagcctgagggaacctggaggggggctcccactccctaccttctttcctccgagtttgtgactccgagatggacaaagtgtgtgctgtttttggaggctcccgaggcattggcagaactgtggcccagttaatggcccggaaaggctaccgactggcggtcattgccagaaacctggaaggggccaaagccgccgccggtgacctcggcggaaatcatttggcatttagctgtgatgttgctaaagaacatgatgttcaaaatacatttgaagagatggagaaacatttaggtcgagtaaatttcttggtaaatgcagctggtattaacagggatggtcttttagtaagaacaaaaactgaagatatggtatctcagcttcatactaacctcttgggttccatgctgacctgtaaagctgccatgaggactatgattcaacaacagggagggtctattgttaatgtaggaagcattgttggcttaaaaggcaactctggccagtccgtttacagtgccagtaaaggaggattagttggattttcacgtgctcttgctaaagaggtagcaagaaagaaaattagagtgaatgtagttgcaccaggatttgtacacacagatatgacgaaagacttgaaagaagaacatttaaagaaaaatattcctcttgggaggtttggagaaactattgaggtggcacatgcggttgtgtttcttttataatcaccgtatattacagggcatgttctggtagtggatgggggattacaactcattttgtaatttgcagattattcagttataggggtgattagcatcaagggcacactttggctactgattagacaattatacctacatgggtaacatgtgctaatcaaacctgctgatgctacaaatgttaatttctgtctttataaaaatatgtctc

SEQ ID NO: 189459 - DNA, 1223 bp, Homo Sapiens
  misc_feature (273)..(317): n is a, c, g, or t
  misc_feature (966)..(1027): n is a, c, g, or t
ttggaccacaccactgggaactgcatcaatggtgacgactgcatgttttcccacgaccctctgaccgaagagacgagggagctcttggataagatgttggccgatgatgcagaagcaggtgccgaggatgagaaggaggtggaggaactgaagaagcagggcatcaaccccctgcccaaaccgccccctggtgtgggcctcctgcccacccctcctcggccccctggcccgcaggctccaacctctcccaacggcaggcccatgcagggtggnnnnnnnnnnnnnnnnnnnnnnnnnnnnnnnnnnnnnnnnnnnnntcagatgcccatgccggtgcatgagccactgtccccgcagcagctgcagcagcaggacatgtacaacaagaagatcccctccttgtttgagatcgtggtgcggcccacgggacagctggctgagaagctgggtgtgaggttccctggacccggtggacccccagggccaatgggccctgggcccaacatgggacccccagggccaatgggcggtccaatgcatcctgacatgcaccccgacatgcacccggacatgcaccctgacatgcacgcagacatgcacgcagacatgccgatgggccctggcatgaatcctggcccacccatgggccctggcggccctccaatgatgccctacggccctggagactccccacattctggaatgatgccccctatcccgccagcccagaacttctatgaaaacttctaccagcagcaggagggcatggagatggagcccggactcctgggggatgcagaggactacgggcactacgaagagctgccaggggagcctggggagcacctcttccctgagcaccctctggagcccgacagcttctctgagggagggcccccaggccggccgaagccaggcgccggtgtccctgacttcctgccctcagcccagagggccctgtacctnnnnnnnnnnnnnnnnnnnnnnnnnnnnnnnnnnnnnnnnnnnnnnnnnnnnnnnnnnnnnnagcaggaccgggagaatgaggaaggtgacaccggaaactggtactcaagtgatgaggatgagggtggaagcagtgtcacctccatcctgaagaccttgaggcagcagacgtccagccgacctccggcttcagttggggagctgagcagcagtgggctgggggacccccgcctccagaaaggacaccccacaggaag

SEQ ID NO: 189460 - DNA, 1000 bp, Homo Sapiens
ctttgtacaaaaaagttggcccccacccaccccatggggggagcatgatgggcaggtgagggcaggatggagaccaagggagtcagtgagcagaggccctgggagtgtccggttggggttggactgaggacagaggggcccacacttccttgcccctttgtgtcccaggcctggtgcccagactccttgcatggcttgtgtggtcctcagactccgcacagcgagcgtaggtctctgggtttcagatgaagtgcccaggctccaggaagttgagggacccacaggagaggtgggcagagctggagttctcatccagggctgcttgtccccagagcccaggtttatactacctccctggggcgggggctggccgcagggtaggggagaggctctgcagtgtggagtggagcctcatcgaggggcgctgggttaggggagcacctgtttcagactgggcatgaagaagggagcacagcagctactagaccccattagcacctcattagcccacaagccagccaggggccccaggaagatggggcaccccccagcaccctccagattgagagcaaggtagaggaaggagtcccagcctctgggcagaccagaggcccagagggagagagtagcagaaggcttttgatttttctcttgcctgaggcttgaatctgacaaacccttggtgggcactgctcccttaggttcttccccacctcaatctacctgcctagagtagcagctcccagacccagttctgggactgaaggttaacccttcacctgctgtcccttcttaacacccaggcccccagagccagctgggcctgtccagcagccacctgtgggtatttatgagtttcatatgaagtactgtgcccccttccttcctcatcccgaccctgcccgagcttcctgaaagtcctcactgttttgcttatcgcttcaggccacctccaaaccccacctaaggttttataatggataatatatatttttttggg

SEQ ID NO: 189461 - DNA, 1015 bp, Homo Sapiens
  misc_feature (489)..(584): n is a, c, g, or t
  misc_feature (732)..(793): n is a, c, g, or t
  misc_feature (798)..(889): n is a, c, g, or t
ttgtttcccagagctggttttagattcttcgttctgcaactgaacggttatgaaacttggagaaacaaagaaaatatgcttttcatcgctcccggggctcgattttttccatgtgaaagcatggtaaaatactctttctgaagcctgtttttgctctaacaccccccgatttgattagtgctttagctctctgcctttgttttcctatttatataaaagaattttattcctttggccttccaggatcaattagtcaatggatccattagtgaagaactttcaaccttgaagtgctaagtagttctgttattgcttgtagagcaagctgatcttggctgcatgtgatgtaaaactgctgcgacttctaaaatcgttgctgagtctttaagagaacaagatacttattgaatccaaaaggccactctgtctcagcactctggcctgtggggttgaagagaggcaggtgtttgggaaggggatgtttgggannnnnnnnnnnnnnnnnnnnnnnnnnnnnnnnnnnnnnnnnnnnnnnnnnnnnnnnnnnnnnnnnnnnnnnnnnnnnnnnnnnnnnnnnnnnnnnnaagaggggtttgggaaggaggtgttgggaaggcggtgttgggaaggaggtgtctgggaaggaggtgtttgggaaagaggtgtttgggaaggaggtgttggggaaggaggtgttgggaaggaggtgtttgggaaggaggtgtttgggannnnnnnnnnnnnnnnnnnnnnnnnnnnnnnnnnnnnnnnnnnnnnnnnnnnnnnnnnnnnncgttnnnnnnnnnnnnnnnnnnnnnnnnnnnnnnnnnnnnnnnnnnnnnnnnnnnnnnnnnnnnnnnnnnnnnnnnnnnnnnnnnnnnnnnnnnnngtttgggaaggaggtgttgggaaggaggtgttgggaaggaggtgtctgggaaggaggtgtttgggaaagaggtgtttgggaaggaggtgttggggaaggaggtgttgccaacttttttgtacaaag

SEQ ID NO: 189462 - DNA, 934 bp, Homo Sapiens
  misc_feature (90)..(153): n is a, c, g, or t
ttggcatacagttgccaatactcactgcaagaaggcaagattcccaagggagatgtgatagctgatcaggcttcccagacacctccttcnnnnnnnnnnnnnnnnnnnnnnnnnnnnnnnnnnnnnnnnnnnnnnnnnnnnnnnnnnnnnnnncacttccttcccaacacctccttcccaaacccctccttccccaacatccttcccaacacctccttcccaaacacctccttcccaaacacctccttcccaaacacctccttcccaacacctccttccccaacacctccttcccaaacacctctttcccaaacacctccttcccagacacctccttcccaacaccgccttcccaacacctccttcccaaacccctttcccaaacacctccttccccaacacctccttcccaacacctgcttcccccttccccaacacctccttccccaacacctccttcccaaacatccccttcccaaacacctgcctctcttcaaccccacaggccagagtgctgagacagagtggccttttggattcaataagtatcttgttctcttaaagactcagcaacgattttagaagtcgcagcagttttacatcacatgcagccaagatcagcttgctctgcaagcaataacagaactacttagcacttcaaggttgaaagttcttcactaatggatccattgactaattgatcctggaaggcaaaggaataaaattcttttatataaaataggaaacaaaggcagagagctaaagcactaatcaaatcggggggtgttagagcaaaaacagggcttcagaaagagtatttaaccacgcttcacatggaaaaaatcgagccccgggagagatgaaaaggcatattttctttgtttctccaaagtttcataaccgtttcatttgcagaaaccaagaatctaaaacc

SEQ ID NO: 189463 - DNA, 1015 bp, Homo Sapiens
actttgtacaaaaaagttggcaacagtacagttttcaaattctaccacctcagtgctggctacccttgcagctcttgctgaggcatcagtccccctctccaactcacacagagccacagccaatacagaggaaattatagaaggaaattccgttgactcatcaatccagcaagtaatggggagtggaggccagagggtcatcaccatagtgactgatggagtccctctgggtaatatccaaacttcaatccctactggaggcattggccagccatttattgtaactgtgcaagatggacagcaagttctaactgtacctgctggtaaggttgcagaggagactgtaattaaagaggaagaagaagagaagttgccactaacaaagaaaccaaggataggagagaagacaaacagtgtggaggaaagcaaggaaggcaatgaaagagagctactacagcaacaactccaggaggccaatcgaagagcccaggaataccgacaccagctcctaaagaaagagcaggaagcagaacagtaccgtcttaagctggaggccatagcccgacagcagcccaatggagttgatttcaccatggttgaagaggtggctgaggtagatgctgtagtagtcacagagggggagttggaagagagagagacaaaagtgactgggtcagcagggaccacagagcctcacactagagtttccatggcaactgtttcatcttaatatgcaagggccacaatttgcactgtgttcatattaatcctcttttaaaaaaggaaatatacagaagacaaacattgtataaaaactaagagtgtctttaagaagaaaactatagcagggtacaatgcttgggctcaggaagtttctctgtgcaactagaaaattcaaagccatatttaagggaacattttttcagaggggccaaagaataaaggaccaaatttcttagctcatatcattgctttaacatagaagtaaaggatactgccatgttgttggttgatt

SEQ ID NO: 189464 - DNA, 628 bp, Homo Sapiens
gatataaattatttttattgtgtgaaaatgtcaaaattcagaattaagaataaaagtataacatataacaaaataggcatttaattgttaaaatacacctggatttacaaaacattttttaaaatgtttttaaaatgcttaaggaataaaaattaatttttgagagagctatataaaatgtgaattctatattatatttaatttcaaaatcatttatttttattaaatgaagccagtagctacactatagtaaacagatagaaaacacaaattttaaaaacacgtatactcccaaacgagataaatattaaaaagatagcaaaagtatgagtttagttttaaaattaagtaaatgttacaaaaagctatgcaattttccctctaaaatccttttcaaagtttacattgtcttttcgtattgcttttcatcacatttcagccacctctcaaatttaggttgttacgaattttagatctgaaatcaaatgcttttacctcactcagtgtggttgctaagtcccatgtacaaactccaagaatatatacagtgctgactagagtacaggtgacctgattattaaagttcagtgagttaaaaaattttgaataaaatctgatgttctgccaa

SEQ ID NO: 189465 - DNA, 1633 bp, Homo Sapiens
  misc_feature (535)..(595): n is a, c, g, or t
tacaaaaaagttggctcttggtgaaacacatcataatgatttctataggaagccactgcctcccctggctgtgccacagcgacctaacagtgatgctcatgatgtgatctcataaacaagacgtatggaggagttctcttaatatcagcaaggtgaactgggacattcttctttctcagaagaagaaacatcttgtaaattgatgactggggcaagataaccataataattttagtgagaagattaatactcaaggacctgacttgataattacttatttgtgtttttcatggttaaaaaaataaaagaagcacaatgaccagtacatgaaatcagcatttggaccaaattagcaagatttactgttgactctggtttatacatccccactcatgagcatacttctgaaggaaaactttacaaaaagagccaatggactcagcactttctttactatttgttcaatagcctatatttctagatattaaatattttttgtaagatatatgcacatagaagggggacttctaggaannnnnnnnnnnnnnnnnnnnnnnnnnnnnnnnnnnnnnnnnnnnnnnnnnnnnnnnnnnnnctgtgatattgattatacaccttttttatagatgatttgtttaaattatatctggaaaatagagttgatttactttcagacatgaactatacaaacaggatatatttatatggcttgaggtatgttttgtaatagcgttgttctttaagtgtacatcgtaatttgacctaatttaaaaataatatattttcgaagtagtagattctcagatctttattctaacaattacatgatttgaaaacagtactcaatgagactggaaataccttttgtacctaaatgttttttaaattaatcaaaatacattctgtgagatactattaaaagtctcagtaaagtcctattttaaaggttagacactttcagagatcaaggtgctccctatactcccttgttccatcagaagctgcagtgactcttttaggtgattctaattctttcatgccttgaaattaaactatgaaattaaaggcagaaaaactggaaaacctactgcaggtccagagacttctgttttacaactgggaaacagcttgtgtactaaagtaatgagaataaaaatgttggcccaaaattacttttataaataaataattccaaaataatttcttaatttaaaatgatagcacttctcttgcacttaagaatggcatccataagattctgtatttggcatttagactaacttctagatgtatatttttaataatagattcataatgttacatttaattgaaaacaaacctttatatccaatgaaaatagtataaacagaatgatttttataccaccttgttaagattggtgcttttggtaacttgtactgacacaacagacatgtgctagtatctgataacattaagtacattttatgtcgtttaatataattatttactttaaaaattgtacttcagaacatcagattttattcacattttttaactcactgaactttaataatcaggtcacttgtactctagtcagcactgtatatattcttggagtttgtacatgggacttagcaaccacactgagtga

SEQ ID NO: 189466 - DNA, 1011 bp, Homo Sapiens
ctctcctaaaaaggcattttaggaacatttcaaccgtgtcactcaaatggtggatcaacaaaaatttttacaattaataaagagatggtaatgaccctgtgatcgcatgcatctggggttagggagaaaaaaaattgatcaggtactggattcttcagaacataagagatgagaaagggagctgtgggtggtgggctgagagggagaaaacagagtgggacaaatcctgcattttctaatggttgctcctctttgcctaatggcggtccagtgttgaactctgtagtaaatctgtgggggttttgctggggggtctgaaggccgtctgaaagcctgggggtggggagtggaagctggaagggtttgaaggaggagggtagggattccaactggctctgtgcagcgggatctgtgtgctgaagggggcgctgtggtgggtctgtgatggagcagcgctggggccgtccatctctgtgagggcctgaagggattttagccagtgtggaggattgtcatcttgaagagagtctaaactgtttcctgaagacgctggaatacctgtgatgatggctgggtctgtccagctgccagggctgtcccaactcaggctgtcggtggtggcagtgttggacgttggtgcactgtggttggcgttggagggggaagaagaattgggcagtccaccaaagttgatgttaatgttgggtagaagtgcccttagcccgtcctgccattccttcatatttaaactctctacagaactgctgttgtctgctacagggatccctcccagacctgtgttgtgctgtggcgggagattcaagtccaagaaattactatttgaggtggggtttgctgtgtggttcaagtgcatgatgctattgcgtggaaaggccatccaaggatagcgggctgcctggcctggaaaactgaatgaattataaaccgctcggtgctgctgaaattgagggaacctctggggcaagactgaaccaacttttttgtacaaaa

SEQ ID NO: 189467 - DNA, 1121 bp, Homo Sapiens
ctttgtacaaaaaagttgggggaggacgggttgccgactcgcctacctagcggtctcttgattgtcgatattttgttggcataggtttatgtagagacgtatacatatatatagacacactgtctttaaatctaggcctgtatccggtgtccgaggcgaactcagtaagatgatgttaagaggaaacctgaagcaagtgcgcattgagaaaaacccggcccgccttcgcgccctggagtccgcggtgggcgagagcgagccggcggccgcggcagccatggcgctcgctcttgccggggagccggcaccgcccgcgcccgcgcctccagaggaccacccggacgaggagatggggttcactatcgacatcaagagtttcctcaagccgggcgagaagacgtacacgcagcgctgccgcctcttcgtgggaaatctgcccaccgacatcacggaggaggacttcaagaggctcttcgaacgctatggcgagcccagcgaagtcttcatcaaccgggaccgtggcttcggcttcatccgcttggaatccagaaccctggctgaaattgcaaaagcagagctggacggcaccattctcaagagcagacctctacggattcgcttcgctacacatggagcagccttgactgtcaagaacctttctccagttgtttccaatgagctgctagagcaagcattttctcagtttggtccagtagagaaagctgttgtggttgtggatgatcgcggtagagctacaggaaaaggttttgtagagtttgcagcaaaacctcctgcacgaaaggctctggaaagatgtggtgatggggcattcttgctaacaacgacccctcgtccagtcattgtggaacccatggagcagtttgatgatgaagatggcttgccagagaagctgatgcagaaaactcaacaatatcataaggaaagagaacaacccaccacgttttgctcaacctggggacatttgaattttgagtatgcatctcgatggaaggctcttgatgaaaatggaaaagccagcaagcgtgagcaggttgatagaaacatcagagaagcccaaagagaaacctggaggcagaaaatgggaagcagctaggcatgaa

SEQ ID NO: 189468 - DNA, 609 bp, Homo Sapiens
  misc_feature (456)..(464): n is a, c, g, or t
  misc_feature (487)..(527): n is a, c, g, or t
ctttgtacaaaaaagttggctgatggctttcgaaattttcagactttctaagaagatcactaataatattgtttattttcttccaagaaatgctgatattgaccaggtggcatccttagctgggcctggagggcaagtggaaatagaacagaacttccttaacaacaaattgaagacaatcactgcatattttggtgacctaattcgaagaccagcctctgaaacctaactatgcagcagtgcgaggacaaaagatcatggagtggtcaaaatattcagatgagacatttggcatgtcttcctttattcactgatattttctacccatggtcttatatcaccgtatgaaatggaaacttacaggacttaaatatcagtgaaatattttgagatctttgaataattcctttagaggaattatacaaaattaatatatatgagtcctttgtaatttannnnnnnnngagacaggatctcacttttaccnnnnnnnnnnnnnnnnnnnnnnnnnnnnnnnnnnnnnnnnnggttcacccttctgagttcaagcaatccttctgtctcagtctcctcagtagctggggctttaggtgggcactgccacaccgt

SEQ ID NO: 189469 - DNA, 542 bp, Homo Sapiens
ttgggacatatttgcctagcagtgctataagaaaagctaggcagagacaggaacaggggagcactggccaccagatccagaaccttaacattcttttcccggtaacaggcttcatccctccacccctcatcttcggggctggcatcgactccacctgcctgttctggagcacgttctgtggggagcaaggcgcctgcgtcctctacgacaatgtggtctaccgatacctgtatgtcagcatcgccatcgcgctcaaatccttcgccttcatcctgtacaccaccacgtggcagtgcctgaggaaaaactataaacgctacatcaaaaaccacgagggcgggctgagcaccagtgagttctttgcctctactctgaccctagacaacctggggagggaccctgtgcccgcaaaccagacacataggacaaagtttatctataacctggaagaccatgagtggtgtgaaaacatggagtccgttttatagtgactaaaggagggctgaactctgtattagtaatccaagggtcatttttttctt

SEQ ID NO: 189470 - DNA, 612 bp, Homo Sapiens
cccctataatgccaactttgtacaaaaaagttggcacacacacaaaaaatgcacaaacaatgcaatcaacagaaaagctgtaaatgtgtgtacagttggcatggtagtatacaaaaagattgtagtggatctaatttttaagaaattttgcctttaagttattttacctgtttttgtttcttgttttgaaagatgcgcattctaacctggaggtcaatgttatgtatttatttatttatttatttggttcccttcctattccaagcttccatagctgctgccctagttttctttcctcctttcctcctctgacttggggaccttttgggggagggctgcgacgcttgctctgtttgtggggtgacgggactcaggcgggacagtgctgcagctccctggcttctgtggggcccctcacctacttacccaggtgggtcccggctctgtgggtgatggggaggggcattgctgactgtgtatataggataattatgaaaagcagttctggatggtgtgccttccagatcctctctggggctgtgttttgagcagcaggtagcctgctggttttatctgagtgaaatactgtacaggggaataaaagagatctta

SEQ ID NO: 189471 - DNA, 972 bp, Homo Sapiens
ttgggttatgtcaacacatttcttcaagtgtggtttctcaacttggagcttcggcaggcactctacttatgtccaagcacttgtagtgactacatgctgggagacggcatccaagaagaaaaagattatgagcctcaaacaatttgtgagcatctccagtacttgtttgccttgttgcaaaacagtaataggcgatacattgatccatcaggatttgttaaagccttgggcctggacactggacaacagcaggatgctcaagaattttcaaagctctttatgtctctattggaagatactttgtctaaacaaaagaatccagatgtgcgcaatattgttcaacagcagttctgtggagaatatgcctatgtaactgtttgcaaccagtgtggcagagagtctaagcttttgtcaaaattttatgagctggagttaaatatccaaggccacaaacagttaacagattgtatctcggaatttttgaaggaagaaaaattagaaggagacaatcgctatttttgcgagaactgtcaaagcaaacagaatgcaacaagaaagattcgacttcttagccttccttgcactctgaacttgcagctaatgcgttttgtctttgacaggcaaactggacataagaaaaagctgaatacctacattggcttctcagaaattttggatatggagccttatgtggaacataaaggtgggtcctacgtgtatgaactcagcgcagtcctcatacacagaggagtgagtgcttattctggccactacatcgcccacgtgaaagatccacagtctggtgaatggtataagtttaatgatgaagacatagaaaagatggaggggaagaaattacaactagggattgaggaagatctagcagaaccttctaagtctcagacacgtaaacccaagtgtggcaaaggaactcaattgctctcgaaatgcatatatgttgggtttatagac

SEQ ID NO: 189472 - DNA, 937 bp, Homo Sapiens
ttggattttgaaaaagctctgtcccttgacatggtagttctcccgtgccttgtacttgttctctctccatatgcacagtgtgacaagatgctcacctttaatgaagaaggtgtagcttttcgttttaagctgtaattgtctttgtcttgatttggctatttttataactgaaatcctgagcaacagagataatttgggtggtaatgatcatcttttgtatatgttcttgatgttaagaaatattttttgctgccattcagctttgtggaatttatgtttacttttcaatattttcatatttcttaaccagattttaaagaaatttgttgttagttacgtgaaatcaaaggtcaggtcagtaagcccattatcctcaaacttgaagtttcgttggatgttcaaaatgctaatttttgcagagatataaggataaattagttttagtttgtgttcttaagggtttgcaaaataatttggctcccaaactcttgttggggtgtagtgtttgctaggagcccaggatacctgccctggacttaaattgtgattgaagtggagaggtactctaggaatttaaaaagacacaaaattatttttttccagactagtgtgccatggatttctgataagaattaacattcttgaacaaaggtatcagaaagggtaactcgagttgaaggtttgtgaatagaaggggaaatgtgatagaagattattcagaacaaaataagtagacaaaataacaaaagacaggaaaataagtctctttgtatccttattaatcatttgaaattatgctataatattttttaaaactcacctgtttggttctgggtgaagcagttcctgaagagtgttttgtcagaatatattgttaggtgaatagagggttctgtggccaagtaagtttgggaaatagtgggttagaccaagttga

SEQ ID NO: 189473 - DNA, 593 bp, Homo Sapiens
ttgtacaaaaaagttggcctcatcctgcagcgctgcctggaagaggagtatttgaggccttgccacccctctgaggcagccctggagcccaccctggcagagctaaaggaacagaagaaggccatggagcaggagctgcaggcatctgtggggccttcttgtgtctctcccaaccacaggcagcggcccttggggtcctccacacagggcctcagacccccgcttcccctctgcggggttgcacctctccagtgctgcctgcctgcacctcctctggagccctaccttcgacctcgaggccagtcggctacccaccgctggggactgcatcttcagtgcagccccagggaagggccagcttccacacccacgtccagtgcagcaccccaagccccagcctgaagggctggtcaccgagtaagctctggcttctgccacagcgcacctgtctgccgctgccgcctcacctgctttggcccagccagcttctgatctggtcttggcgagctctcgccaggaccccaaggctgttggtctgtctggcccttgccccaccccctagccagatccctggtgtctggagctgagtggcc

SEQ ID NO: 189474 - DNA, 912 bp, Homo Sapiens
ttggcctgagcagtgagagagggagcccgtcctcggggggtaaccctctctctggggtggccagcagctccccgaacctcccgcacagagacgccgccgtggcggggagctcgcccaggctgcccagcctgctgcccccgcgcccaccgcctgccctgagcctggacatcgcctccgactccctgaggacagcaaacaaggtcgactcggatcttgcagactacaagctccgcgcgcagccgctcctggtgcgggcccacagcagcctgggccccggccggccgcggagccccctggcctgcgacgactgttcccttcgctcggccaaatcctccttcagcctcctggcgcccatccgcagcaaggacgtccgcagcaggagttacctggagggcagcctcctggccagcggggccctgttgggggcggatgagctggcccgctacttcccagaccggaacgtggcactcttcgtggccacctggaacatgcagggccagaaggagctcccgcccagcctggacgagttcctgctcccagccgaggccgactatgcccaggacctgtatgtcatcggggtccaggagggctgttctgacaggcgggagtgggagactcgtctgcaggagacgctgggcccgcactatgtgctgctgtcctcggcggcccacggcgtgctctacatgtcgctcttcatccgcagggacctcatctggttctgctcagagtggagtgctccacggtgaccacacgcatcgtgtctcagatcaagaccagggggccttgggcatcagcttcaccttttttggcacttccttcctcttcatcacgtcccacttcacctcaggtgacgggaaagtggcggagcggctgctggactacaccaggactgtacaagcccctgttcctgcc

SEQ ID NO: 189475 - DNA, 954 bp, Homo Sapiens
gtacaaaaaagttggcatgttcaattctcagagaagatggccaaagggcagggagcacacccagcgcttgtaggcccgggggccctctgccctttggccatgttcaattctcagagaagattcagcgcttcacacccttctccctcggctttgagttcttacctggagagacttactactacatctcggtgcccactccagagagttctggccagtgcttgaggctccaggtgtctgtctgctgcaaggagaggaagtctgagtcagcccatcctgttgggagccctggagagagtggcacatcagggtggcgagggggggacactcccagccccctctgtctcttgctattactgctgcttctgattcttcgtcttctgcgaattctgtgagccaagcagaccttccctctcatcccaaggagccagagtcctcccaagatcccctggaggaggagggatccctgctgcctgcactgggggtgccaattcagaccgacaagatggagcattgatgggggagatcagagggtctgaggtgactcttgcaggagcctgtcccctcatcacaggctaaagaagagcagtagacagccctggacactctgaagcagaggcaagacaaacacaggcgctttgcaggctgctctgagggtctcagcccatcccccaggaggactgggatttggtatgatcaaatcctcaagccagctgggggcccaggctgaagacctggggacaggtcgattgctggaccagggcaaagaagaagccctgccatctgtgccctgtgggccttttccctggggcagcaccttgccctccccaggggatcactcacttgtcttctatgaagacggactcttcatgaggttgaatttcatgccagtttgtatttttataagtatctagaccaaaccttcaataaaccactcatctttttgttgccctcccc

SEQ ID NO: 189476 - DNA, 856 bp, Homo Sapiens
ttggcggaggccgtggagcgcactgacgagctggtccgggagtacctgctcttccgcgggttcacgcacacactgcggcagctggacgccgagatcaaggcggacaaggagaaggggttccgggtggataagattgtggaccagctgcagcagttaatgcaggtgtatgacttggctgcccttcgggattattggagctacttggagcgtcggctcttcagccgcttggaggatatatacagacccacaatccacaagctgaaaaccagcctgtttcgattttatcttgtctacacaatccagacaaacagaaatgacaaggctcaggagttctttgcaaagcaggccacggaactccagaaccaggctgagtggaaggattggtttgtcctgcccttcctgccatccccggacaccaaccccacctttgctacctacttttctcgacagtgggctgacaccttcattgtgtccctgcacaacttcctgagcgtcctgtttcagtgcatgccagtccctgtgatcctgaactttgatgcggagtgtcagaggactaaccaggttcaagaagaaaatgaagttctgcgtcagaagctttttgcattgcaagctgaaatccaccgactgaagaaagaggagcaacagccagaagaggaagaggccttggtccaacacaaattgcctccttatgtctccaacatggaccgcctgggggactcggaacttgccatggtgtgcagccaaaggaatgcctccctctcccagtcacttcgtgtgggcttcctgtcctcgctgctgcctcagagtaagaagagctcctcaaggttgtcgcctgctcagggccctcctcaacctc

SEQ ID NO: 189477 - DNA, 1321 bp, Homo Sapiens
aaaataaaagtcaaatgaacttggtatttataattattaaataaaatacaggaatatagatttatatttatagagctttcttttcttctaaactaaccaaatctgttctgccgttttatgattttaaaaaagtaaaatagtgtttgtgtgccctagaataagtagagagtgagattaataatcgcaggaccgagttgccctacttccgctccttccttggcctaaacaaagtccctatttgtcccttggggctctggagagcaagaaacccctctcctcctactttaatctttgaaaaatggcaattacatttatttcccttattttttaaaaaatgaaatggatttaaaaattgggaaccatactcagccttcttggccaagagctaatcccaaggaactatatggctctagaagagagtccctagttttccctgacagaagagtctctggggtttcccttcaagctaagaagggcaggacaggtcaaaattgcccactgtggtcccatctaagctatgcttctgggaatccagaccaagccctttaccctttcagaaaacagcctctctttccacccaggtgtcaaggcttcagagcagggcattttggtaacctggccatggtccctgcagctcctcttggctaaaggtcccggggaatgctaacagggatatgtgtcctgtggtagagggtagggtgaagagtgtgctccatacctggggaaggaagcacagactccaatttggagccgatggtctagtcagtggttttccaactttttttcagcagcaaaccccttaatgcaaataaaatcttaccctgaaccccaatatgtaagacagctacaaggggagctgttctgtttgagggcaaattgcccagcctgctcagctccccacccccttcatctccccaaggactcctgaggcaacccctaggaaacttcagggctctgccaagcagtttgaaaaccactggcctagtttgtcctgagcaagtcagagaccccccaccccaactgcttgccacaagctggctctgagtttctggtgtcagcatactcacaacaagaccaagtggcacatgcagcctaccacctcccctagaaataccatgaaaaagtgcagccctctctcaaaagcagaagtctggactcaacacctgaggccaatttggtcccacgttctggcgagcacaactacgttgccacattctaggaccaagtgaaaatctccaagaagagtcaaccatggtctagctaagctgatcagtgctcaggaccacaggcagggttctagagcacggtgtcagaaagccaa

SEQ ID NO: 189478 - DNA, 883 bp, Homo Sapiens
ttggcgcttcctttcacgctgtcgctgcccgtaggtggttgtggccactgtgcccggagggaggcggcggtggccagtaatgcctgggaaactcctctggggggacattatggagctggaagcacccttggaggagtccgagagccagaagaaggagaggcaaaagagtgacagaaggaagtcaaggcaccattatgactcggatgagaaatcagaaacaagagaaaatggtgttacagatgacctggatgctcccaaggccaaaaaaatctaaaatgaaagagaagctaaatggagacactgaagaaggatttaatagactttcagatgaattctccaaatctcataagtcaagaagaaaagatctaccaaatggagatatagatgaatatgaaaaaaaatcaaagcgagtatcatctttagatacttctactcataaatcaagtgataataaactagaggagaccttaacacgtgaacagaaagaaggagccttctccaattttcctatttctgaagagactataaagcttctgaaaggtcgaggggtaacatatctctttcctattcaagttaagacctttggtcctgtatatgaaggaaaagatttaatagctcaagcacggacaggaacaggaaagacattctcttttgccatccccttaattgaaagactccaaagaaatcaagaaacaattaaaaaaagccgctcaccaaaggtacttgttttggctccaacaagggaactggcaaaccaagtagccaaagacttcaaagatataactaggaaactcagcgtggcgtgtttttatggtggaacatcatatcaaagccaaattaatcatattcgaaatggtattgacatcttggttggaacacctgg

SEQ ID NO: 189479 - DNA, 864 bp, Homo Sapiens
ggaggaaaaggtcccggaaagccttcatggtgctgaacgtgtcctccagggacagctgctgggcgtcctcacacaggtagtcggccagctcccgttgcttctgctcgatggcctcaaacagctcgtccagtgcccggaaggccgagatgctggcctggaggcgctcggtgtactgctcctggacctcggccacggaggcagacaccttccgctcggtctccagaagcttcttcaggttggagctggcctctgagcggatgatctccaggttgatccctgctgcttgcgagggctgttccaggtcccggggcagctgcaggaggtcggggtggctcttttccgcttcctccagcacgtggtgcagcagcgtcacgcggttctgctgggacttggtctccgtgagcttcagcaatgtgctgatcttgaagccgtcggcgtcaccggtgtggctgccgtagttgaggaagttcccaattctcaggatcagctggcagaagatgggcagctggcggctggtgagcaggctttcgcaggcagccagcaccagctgggccttgggccgcaccatgtccagcacggcggccgcgccctcacacagcagcatgcactcgattcgcagctggtagcagggaatggccagcaggaggaggtagaagtggtcggcgctggccagcttggctcgctcctctgtgaatgcccgcaggttttcaatctcgtgcttctcgggaaggagcttaaggagttgtttgagaacctccacatcaaacttggtggtatctccagcccggatcatagcagcgacctcctcgttggagcacttaaattgcttcaggaagatgttgaggttcaggctcttcttgccaa

SEQ ID NO: 189480 - DNA, 1063 bp, Homo Sapiens
gggggaggatctcccgacttaaacttctcctcgctctgtggctgtgggctgctgggagtgggcatctggctctccgtgtcccaaggcaactttgccaccttctcccccagcttcccttcgttgtctgcagccaacctggtcattgccataggcaccattgtcatggtgacgggcttcctcggctgcctgggggccatcaaggaaaacaagtgcctcctcctcagctttttcatcgtcctgttggtcatcctcctagcagagctgatcttactcatcctcttctttgtctacatggacaaggtgaacgagaacgccaagaaggacctgaaggaaggcctgctgctgtaccacaccgagaacaacgtggggctgaagaacgcctggaacatcatccaggctgagatgcgatgctgtggtgtcactgactacacagactggtacccagtgctgggggagaacacggttcccgaccgctgctgcatggagaactcccagggctgcgggcgcaacgccaccacgcctttgtggagaacgggctgctatgaaaaggtgaagatgtggttcgatgacaataagcacgtgctgggcacggtggggatgtgcatcctcatcatgcagatcctgggcatggccttctccatgaccctcttccagcacatccaccggactggtaagaagtacgacgcatgagcgggctggccgggagtgcccaccccgccctgctgccctgtggagggaagaggattgagctttgtgtcacctgcctgcgctctccagatatgacccctgcacccaccccccacagcctgccctaccccacctaccctgcctcagcctcggacttctcagtgggtggagtgccagggaggaggaggcacacggagacctggggctcggggcccctggattcctgcatctgcatatgcgtatttgccaaagacgacagggtgggctggggtgcgctccggaggaacccccggcactgatgggcttctgcccctgcccttcctcacactgacactttgtccccacatgggggtggggaagcagaatggccgccccg

SEQ ID NO: 189481 - DNA, 1042 bp, Homo Sapiens
ttgggcccgtggcagccggggacactccagcccctcgccgggctgtgctggaaaccatcagaacttacctcaccatcactgacactcagttggtgaacagtctcctggaaaaagccagtgagaaggtgctcgaccctgccagctctgactttaccagattgtctgtcctggacctggtcgtggccttggctccgtgtgctgacgaagctgccatcagtaagctatactccaccatccggccctacctagagagcaaggcccacggggtgcagaagaaggcctaccgagtgctggaggaggtgtgtgccagtcctcagggccccggggccctcttcgtgcagagccacctggaggacctgaagaagacactgctggactcgctgcggagcacctcctcacccgccaagaggccccgtttgaagtgcctcctacacatcgtgaggaagctctcagctgaacacaaggagttcatcactgccctcatcccagaggtgatcctgtgcaccaaggaggtgtcggtgggcgcacggaagaacgcttttgcactgctcgtggagatgggccatgctttcctaaggtttggctcgaaccaggaagaggccctgcagtgctacctcgtcctgatctaccctggcctggtgggcgcggtgaccatggtcagctgcagcatcctggccctgacccacctccttttcgagtttaaaggtctgatggggaccagtacagtggagcagctgctggagaatgtgtgcctgcttctggcctcccgcacccgtgacgtggtcaagtctgcactgggcttcatcaaggtggcagtgactgtcatggacgtggcgcacctggccaaacatgtgcagctggtgatggaagccattgggaagctttcagatgacatgcggcggcacttccgcatgaagcttcgaacctgttcaccaagttcatccgcaagtttggatttgagctggtgaaaaggctgttgcccgaggagtaccacagagtcctggtcaacatccggaaagctgaggcccgggccaagagcacc

SEQ ID NO: 189482 - DNA, 889 bp, Homo Sapiens
gataaataaataaataaatagtgtataattgtgcagtcccctagcctggcttacccctcaacaaggggtcactagtcactgtcgatctcagttcctctgcatgtcatcctcccagaaacagaggctggctgccagtaggggtctacccgaccctggggattgaaaaaccagggctgagagtgcccatacagttcaggtggccagggcaggcaagcgagtggaggtctgggcccagcccacaggtgagacaaggtcctgcctgtctccccatcctctgacacatggctcagtataatgaagccacatgcggcctgggggcatttacctccaagttgtgtgacacctcccctctcccatgccttgctcttgctggctcttcctgggccagctgccagaggtatgcaggcaccaggatgcctggaggagggacagtgggggcccaagtccagctggggctgatgtcccctccagggtgcgactgggtgagggtgggcagattgccccgtacagtcagagctggaaggggtactgtcggaggtagtcggccatgcgccggggcagtggcaggcagtccacgtcggccaccagacggttgatgacaaggcggcacaggtgttgcaggctgcgggcactgcttctgcgtacaaagggctgcaccagttttaggtgtacagcagtggctggtggaggagcaggcagtgctgggtcactaggcgcatcctccttaggcataggcagggccggggtgggagcaggatcggggctgtcgcttcgggtatcagcagtgcaggagggggatcattcccaatactcctgttacgggttgaactgtgtccctgaacaaaaagatctctggtacccgtgaatgagatcttatttggaaatccaa

SEQ ID NO: 189483 - DNA, 1361 bp, Homo Sapiens
ttggaaatgagatgctgcaggcaaagctgcacagccaggaggaggacttccgtttgcagaacagcacactaatggccgagttcagcaagctctgcagccagatggaacagctggagcaagagaaccagcaactgaaggagggggctgcaggagcaggggttgcccaagctgggcccctcgtggatggggagctgctgaggctacaggctgaaaacacagccttgcagaagaacgtggcagccctgcaggaacgctatgggaaagaagccgggaagttctcagctgtcagtgagggccagggggatcccccagggggcccggcccccaccgtcctggcccccatgccgttggcagaggtggagctgaaatgggaaatggagaaagaggagaagagattgctctgggaacagctgcaaggcttagagagctcaaagcaggccgaaacatccaggctgcaggaggaacttgctaagctctccgagaaactgaaaaagaaacaagaaagtttttgccgtctgcagacagaaaaggagactctgtttaatgacagcaggaacaagattgaggaattacaacaacggaaggaagctgatcacaaagcccagttggctcgaacccagaagctgcagcaggaacttgaggctgccaatcagagcttggcagagctgagagatcagcggcagggggagcgcctggaacatgcagcagctttgcgggccctacaagatcaggtatccatccagagtgcagatgcacaggaacaagtggaagggcttttggctgagaacaatgccttgaggactagcctggctgccctggagcagatccaaacagcaaagacccaagaactgaatatgctccgggaacagaccactgggctggcagctgagttgcagcagcagcaggctgagtacgaggaccttatgggacagaaagatgacctcaactcccagctccaggagtcattacgggccaatagtcgactgctggaacaacttcaagaaatagggcaggagaaggagcagttgacccaggaattacaggaggctcggaagagtgcggagaagcggaaggccatgctggatgagctagcaatggaaacgctgcaagagaagtcccagcacaaggaagagctgggagcagttcgtctacggcatgagaaggaggtgctgggggtgcgtgcccgctatgagcgtgagctccgagagctgcatgaagacaagaagcgtcacgaggaggagctccgtgggcagatccgggaggagaacgcccggacacgggagctggagactctccagcagacagtggaagaacttcaagctcacgtacattccatggatggagccaagggctggtttgaa

SEQ ID NO: 189484 - DNA, 910 bp, Homo Sapiens
ttggtgttccagaaggccatcgcccagagtggcaccgccatttccagctggtctgtcaactaccagccgctcaagtacacgcggctgctggcagccaaggtgggctgtgaccgagaggacagtgctgaagctgtggagtgtctgcgccggaagccctcccgggagctggtggaccaggacgtgcagcctgcccgctaccacatcgcctttgggcccgtggtggatggcgacgtggtccccgatgaccctgagatcctcatgcagcagggagaattcctcaactacgacatgctcatcggcgtcaaccagggagagggcctcaagttcgtggaggactctgcagagagcgaggacggtgtgtctgccagcgcctttgacttcactgtctccaactttgtggacaacctgtatggctacccggaaggcaaggatgtgcttcgggagaccatcaagtttatgtacacagactgggccgaccgggacaatggcgaaatgcgccgcaaaaccctgctggcgctctttactgaccaccaatgggtggcaccagctgtggccactgccaagctgcacgccgactaccagtctcccgtctacttttacaccttctaccaccactgccaggcggagggccggcctgagtgggcagatgcggcgcacggggatgaactgccctatgtctttggcgtgcccatggtgggtgccaccgacctcttcccctgtaacttctccaagaatgacgtcatgctcagtgccgtggtcatgacctactggaccaacttcgccaagactggggaccccaaccagccggtgccgcaggataccaagttcatccacaccaagcccaatcgcttcgaggagtggtgtggagcaattcacagcaaggagaagcagtatctgcacatagcctgaa

SEQ ID NO: 189485 - DNA, 856 bp, Homo Sapiens
ggtaatacatatataaataataatggctgactggttgatggtgcttgatggatgaatgagaaaaacccaggttatcaaataatctcggtagttgaactgttagcttcttcacttgacaatgttgcacatcagaaatgattctaggttttttttacccagaatgatccctgccattcacaactcatgctccacgccccatggtttctattgtgccctaaaagatcagcctagactaatacataaatagaaaataactctggccttgaaatgaggggcagacaagtacttcatgctcagtacttataaatcacaaagaaatgctgaaattaatggtctgtctccttttactacaaaggagatgccatgagttaaagtcatgaaacaaagaaagtcaaaaagatatgggtagcagcacctttccatacccgcctggattttcaaggagcttttcactccttatgcctttcaaacaaaagttcatcagtttgaagaaaaagaaatggctctaaagttaaagagtccccagagaaaactaacagtacatgaaataggccctatgtgggcaaaaggacaagctgcagaaccagttaagacagaagaggcagcccaaggtcttactaaattacagttttagcatagtgtagcacaacatgggcagccctttttccatccaagcaacaattcagcaccatccacgtctggttcaaaagattactgaagtctgggctttcatctttggtaccacctcatgagttattcttggtttgcagtaggttcaaagaaacagaaaagctggtacctttgccttgtctgtgagtacaaacgctgggactctgattgctgcaaccattgccaa

SEQ ID NO: 189486 - DNA, 890 bp, Homo Sapiens
gtaactgatttcagggcaaacatttctgacatcttcctccagctcagtctgccatgccttggcaatccagtttcctgtcatatgcgagccatccaagttgatgccaagtaagatttgcccagctcaaagtgaaagtgtttgcgtcttggtatccggaatcctcagccccagtagcaaagctttagtcattcaccttcatccaatagacgtttgtgaacgtcctgctgtccattttgtcaataaacaggcagccctgcaggtggtccatctcgtgctggatgatgcgggctgcccacccgctcgcctgccacaccacctgttctccattggggtccagccctgagatctgcaccgcctggaagcggggcacgcaggccaggaagccggcgacgctctcgcagccctcgggaaaggtgaccaggcggctgtcaagcactcgcaggctggggttcacgaacacgcgcagggggaagggctccatttggcggagcgcgcgctggcggggcgggcactcccgacacagcgcctcggggagctccagcgccagcacctgccgcggcacccccagctgcggcgcgcttaggcccacgcagcgccgccgccgcatcacctggaccagccgttgcgtcagccgctgcagctcgggcccgcctagctgcgcccgctccaccggggccgccacgccgcgcagcaccgggtccccgacttggcacacgtgcgagaacggcggttcgggaggacccagcaccagacgcctcaggtggcgccaataggagcgccgcagcgccgggccctcgacgccgtccggggcggccgtggagctgcaagcccggacaccgacggctgccgccccgccccacggcacggccgcccacagtggccaaagccaa

SEQ ID NO: 189487 - DNA, 904 bp, Homo Sapiens
ttggatcggtggaatgtgaggggaggtggaggagatggcggcgacggcccgggaagatggcgccagcggtcaagagcgaggtcagcggggctgcgagcactatgacagaggatgtctcctaaaggcaccttgctgtgacaagctttatacttgccgcttgtgtcatgataacaatgaagatcatcaactagatcgctttaaagtgaaggaagtgcagtgcataaactgtgaaaaaattcaacatgcccaacagacttgtgaagaatgtagcacattgtttggagaatattattgcgatatatgccatttgtttgacaaagataagaagcagtatcactgtgaaaactgtggaatttgtaggattggtccaaaggaagattttttccattgtttgaaatgtaacttatgcctagctatgaatcttcaaggaagacacaagtgtattgaaaatgtgtcccgacagaattgtccaatatgtttggaggacattcacacatcccgtgttgttgctcatgtcttgccatgtggacatcttttacatagaacgtgttatgaagaaatgttgaaagaaggctacagatgtccattatgtatgcactctgctttagatatgaccaggtattggagacagctggatgatgaagtagcacagactcctatgccatcagaatatcagaacatgactgtggatattctctgcaatgactgtaatggacgatccactgttcagtttcatatattagcatgaaatgtaagatttgtgaatcctataatactgctcaagctggaggacgtagaatttcactggatcagcaatgacgagcctacacagtactggagaacttggcattttctgatatagaaaaaggctttccttggtatcgtgttatcatgtgtcgtcatc

SEQ ID NO: 189488 - DNA, 551 bp, Homo Sapiens
ttgtagaatacacaccaaaaagttcttttgattccaggagattgaattctctcatcattcacctctctgtggacagacaagctagacatctatttgtatttagtaggtgataatgaccccttggcaagtgttacatctagttaccatcccgtgtgagacactcaagtgagtggggtatggggagaagcatggaagcaggaccttcctagggagaagcaaatcacagctgtaaggagggtagagaccagaggttttccagcccatccccatccttctgaggtcattgtcctgtgtcttcaggcagcaactctcagatatttgctgtgttcttcattcgttaccttctaggctacagttgccacagtgtggtatatgtttaggggttttcttctggccttggagactttcaggagcatctgtggtttgctgaggagttaggttcaccttgttttgagctgtgaagtgttgtccacaaatatctggctggttgtacagggttgacttgcagtgagaggcagttattacctatgagccaacttttttgtacaaag

SEQ ID NO: 189489 - DNA, 898 bp, Homo Sapiens
ttggatctaaaataggtcagcaatgtcatatctaatataatcagttcattttctttgtagtaaaactctgagaaatagcagtaaggaaataaaacaaaattatttttctttaatattcccagaaaagtatactcagtgaaggaaaatagcatcttctctgtcataatcttaagattttattcttcttaaacattttaaattgagatagtaaaaatgctagtatgttatggtaagtaacattttcttccttcgctaatttttgttaatgggcagagaaaacgactgtgtaaagaaactgtatattcattccttttagcctaagaaagctgtcaagataaaacctcacccacctgtagctcctcgaccttctagtggttccactgcaccatctcgccaccgattgttaagggtcctccccaacattggtcaatcttgttcacctgcttttgggaatgcatatccgcccgaaatctccaggaatggaatttcaagtttggcaactcaactctctgctgagagatacatatcttctatcactggtgaatttcttaaggaagataatagctgggagaataacacactgtctcacttcagtagcaacgtcaaactacctcctcagataccccatttggagttgggaaatgaccaggagcttgctgactctgttctccatcttggatcatccctgcctaggcaaacaaaacattttttaggaaacttgccatctagtaatgggaacattgtcttaccttcagaagaatgtgtaaccgaacaatcacttctacctaaagtgggctcactggcttcatttgcagaaggaaatgctgatgaacagagcagcggcttagaacgtgcgtgcaagtgaatctggagttgctactcactatgctgacaaagg

SEQ ID NO: 189490 - DNA, 949 bp, Homo Sapiens
ttggctctttttgatctgtattgggctaaccagagccaaatacttttgaagagtttcccagggactagtcatggtaatagcatataattgatctgaatgagatggagagaagaatgaaggggtggtggttctgggtttgatttgagttcacctgtgggcagtgggcagtgggcagtgtcttggtgaaagggaacggatactactttttgcctcaccgtaaagtactcactagtaaatatttccttctctctttactcccactttttacgtttgcaggtgccaaagtaatgtccacttttccctttcatgctgcatattaactggttaattatactgcagaaaccttttcacctccactagtctgatacagtacatctgtacttccatataccttgcactgattttgtctgagtgccctgggagaagtagaaaatgattgaaagtgacttccgtatctcagcccatgactcagcaaggcagaatggccacccctgccaaagtttgcttctcttttcaacagtgcctcaccctccctctaggattaaagtgcttctgcccttccacgaactcctcctccatttcctttttgggatttgtcaccatccttctattctctggtcttctatttttggtgttgttcaagtgaaggaagagatgttccctctaatttctctctagcccattataacctgctatcttggggcaacttttgatgtatgacatgtcacccttcccaacttggtctcctccaacatgctgtcttcatgtggagccctcaccacaatccctgactccggtcatttgtgcctttctcttgtcatctctgtacactacttatattcactgtgggttgggggagctaatttaagcatgttcagtggcagctcccctccagtttcagagtcactgttaaaatttatcaaaaagcaaacttcactaaggggttttc

SEQ ID NO: 189491 - DNA, 1340 bp, Homo Sapiens
  misc_feature (607)..(633): n is a, c, g, or t
tgaaccactgtgcatggccaaaagagtaaacttgaaatctgaggcgaatgacttgattgtgacatcaggtgacctagtaatcagctgtgtattctagctggtgcctctaccagcttcccatgtgaccttgaacatgtcattgaatgctcgctaggcctctgtttctttatctgtgaaatgggcttgatattcctcctctaccccaaccgatagtgcagaatgaaaagtaactgaaagtccttcctccagggcaccatagtgtctgggtgaaaagtagaatataaactcggtagacttctggtcccttcattggtcatggaatggaccagtgcttgcttcattgagcaacagttctgttgttcagaattcctggatttcacctcacttctgctctccctgcaggtgaatgtgatgttcatgcttgccattcttctgacattcttccacccctttctggtatatcgggaatgccgtacttggaaagaaagtccctctgcaattgcatagttcagaagccctcacttttcagccccgaggatggttttgttcatcttccaccacctttgaggacctcgtgtcccaaaagactttgcctatcccagcaaannnnnnnnnnnnnnnnnnnnnnnnnnnaaataaagacacacaaggacgtctgcgcagcaagaaaagaatctcagttgccaagcagattgatatcacacagactcaaagcaaaggcatgtggaacttctttatttcaaaacagaagtgtctccttgcacttagccttggcagacccttgactccaggggagatgacctgggggaggaagtgtgtcaactatttctttaggcctgtttggctccgaagcctatatgtgcctggatcctctgccacgggttaaattttcaggtgaagagtgaggttgtcatggcctcagctatgcttcctggctctccctcaagagtgcagccttggctagagaactcacagctctgggaaaaagaggagcagacagggttccctgggcccagtctcagcccagccactgatgctggatgaccttggcctgaccctggtctggtctcagaatcacttttcccatctgtaaaattgagatgaattttggtgttgaaagttcttcctggagcagatgtcctagaaggttttaggaatagtgacagagtcaggccaccccaagggccatgggagccagctgacctgcttgaccgaaggatttctgacagactatctttggggatgttttccagaagggatataagttatttactttgggcatttaaaagaaaatttctctcgggaataattttatagaaaaataaagcttctgtgtctaa

SEQ ID NO: 189492 - DNA, 970 bp, Homo Sapiens
taaggcctatggaaagagccaagattttcccacattccttacattcatatgtcttcttcttctatgggaattgttaagatctgagacaccaaggaaggcttcccacattcctttatgactgtgtacattggccactatgaatgagtacatgttcagtaagtgtgaggaagtagtggctttaccacattcttttccaagtatcagccccaattcacacacattcagtaaggcatgaggaattactaaaggtttgcccacattccttatatggtttctccacactatgacttcttagatgtcgaataagatatgtggaccgagtaaaggctttcccacattcctgacattcaaagggccgttcaccagtgtgagttctcatgtgtactgtaaggcctgatgagatactgaaggcttgcccacacttttgacatttatatggcctctcccctgtatgtattcttttatgttgactaaggtgcgaggagtatctaaaggctttcccacattcctcacattcaaaaggcctttctgcactgtgacttctcaaatgtcgaataagaaatgaggatcgaatgaaggctttcccacactgttgacagtcatagggttttacaccaggatgagtctgcatgtgacttttaaaggaagaggaattaataaaggcttttccacattccttacattgataaggcttctcaccagtgtgagttctcatatgtacagtaagatgtgaagagttagcaaaagctttcccacattccttacattcataaggcttttctccagtgtgagttcgcctgtgttttataagacctgatgaatcagtgaaggctttcccacatttgttgcactcatacggtttttctccagtgtgaacccttatgtgaatgttgagttttgagaaacaagtaaattctttgccacattcattacaaacatagtgttttcctcccaacttttttgtacaaag

SEQ ID NO: 189493 - DNA, 1064 bp, Homo Sapiens
ttgggttgactaaggtgcgaggagtatctaaaggctttcccacataaaagaatacatacaggggagaggccatataaatgtcaaaagtgtgggcaagccttcagtatctcatcaggccttacagtacacatgagaactcacactggtgaacggccctttgaatgtcaggaatgtgggaaagcctttactcggtccacatatcttattcgacatctaagaagtcatagtgtggagaaaccatataaggaatgtgggcaaacctttagtaattcctcatgccttactgaatgtgtgtgaattggggctgatacttggaaagaatgtggtaaagccactacttcctcacacttactgaacatgtactcattcatagtggcaatgtacacagtcataaggaatgtgggaagccttccttggtgtctcagatcttaacaattccaatagaagagaagacatatgaatgtaaggaatgtgggaaaatcttggctccttccataggccttactattcatgtgtctgtgcatcctaggaaacaaactgaacgtaggaaacctgtcgatgcttacatcttactgagtctgtttgaactcatgctggagagaaatgctatgaatgtgaggaaggtggaaaagctttcattattttcctcgggccttactgagcttgtgagcacattggatataaatgcacgtcctctggctgtaaggaatgtgttgaaacctttcactctgccttataccttaatattcagctgtgatctcacaagtgtgaaaaatcttatgaatgtaaaatgtgtggagattcttctttgtttttagcttccactttgggaacatgtcaaagcacacattgagaagtcccatgagtgaaagagatgttggaaagcccttgaacttggtcgttaggaaacatccacactgaagaggaacctgactgtatggaaggtcaaaaaggctgtattaatttacatgcaaaaagtcacactacaggaatgccatatcacaatgcttttggtaaatatacatgttttaaagaggttatatatcattaataaaaaatatcta

SEQ ID NO: 189494 - DNA, 922 bp, Homo Sapiens
ccccagatgcctctctgagaagttcattatttgatagggttggatcaaatgtaaaggtccaggtgttcaaagatcttagatacctaaagagagaaaggggcaaatggaggctcttctgagagtcaaaatgttgatgagaaacaaactgaaagtagcacacataggcagaaaaatagacaagttatgattcagaaaacaattgtatgcaattttggcataaatctctgagagtcactgtgggccatgagttgaaaaggaacatgcaagagagcaaggaaaacacaaagcctcattcagatgtgctggtgagaatatgacagaaaatctgttgaagttgtgtaccatgaagtctgtcttttgtcaaagttctatgcagtcccaggatagcgtgatagcagtggttaaacacaaccagctagttatagctttcattgtatggaaagacctctctggtctggaactctgcctttgaaattatccacgtagttcagaaggcaaatacttgttaaagggatcccaaaaggtaggagacaagtagtttttgttatgcattagggcagactttcaagcacaagacacaaaattgagcagcaaatgtttgggtagtcccatctcccttcggtttatatgtgggtagtaaaataaataaaattttccttctttgtctctttcttgaaataaaatatcaggtatccaaggagagctgaggattctcaatttgctagattgctttaaaggggtcagatttagaaaattaaggaataaatgaagaacaattttactggagtaggtgtggtcaataggcccttttccattttgtgccattgcttttagcacaaggatgtcaaaaatatcacatagaatgtcatctctgatggactgacagagacctcctgttgtgctgtgttaggacatgagccaa

SEQ ID NO: 189495 - DNA, 926 bp, Homo Sapiens
ttggcattattgcagttactgtgggaaaacattcaggtacagtgccaaccttgtcaagcatcagcggcttcacactgaagagaagccctacaaatgtgatgagtgtgggaaagccttcagccagagctgcgagttcatcaatcaccgaaggatgcactcaggagagattccctaccggtgtgacgagtgtgggaagacattcacccggaggcccaacctcatgaagcaccagaggattcacactggggagaaaccctacaagtgtggggagtgtgggaagcactttagcgcctactcttccctgatttatcaccagagaatccacaccggagagaaaccctataaatgtaatgactgcgggaaagccttcagtgatggctcaatccttatccgacatcgtcggactcacaccggagagaagccatttgagtgcaaggaatgtggcaaaggctttacacaaagttctaaccttatccaacatcagagaattcacactggagagaaaccctataaatgtaatgaatgtgagaaagctttcattcaaaaaaccaaactcgtggaacatcagagaagccacactggagagaagccctatgaatgcaatgactgtggcaaagttttcagccaaagcacacacctcatccagcaccagagaatccacacaggagagaagccctacaagtgcagcgagtgtgggaaggccttccacaacagttccagactcatccaccaccagaggctgcaccacggagagaaaccctacagatgcagcgattgcaagaaagccttcagccagagcacgtacttgattcagcaccggaggatccacaccggggagaagccctacaagtgcagcgagtgtgggaagccttccggcacagtttccaacatgtgtcagcatcagcggattcacctccaggaggact

SEQ ID NO: 189496 - DNA, 550 bp, Homo Sapiens
  misc_feature (123)..(157): n is a, c, g, or t
tcctcgcgctgcccatcgtgggctgaggcggccgcagaaccggcgggaggcgcggcggccgggcgagccgagggcgcagccagccgggcggaccgcggacagcggtcggggcgccgcgccatnnnnnnnnnnnnnnnnnnnnnnnnnnnnnnnnnnncgccgccactgctgctgtttctgggggccgcgctggtcctggcctctggggccgtgccggcgcgtgaggcgggcagcgcggttgaggccgaagagctggtgaagggcagcccggcgtgggagccgcctgccaacgacacgcgggaagaagccggcccaccagcggctggggaagatgaggcgtcgtggacggcgcccggtggcgagctggccgggccagaagaggtgctgcaggagtcggctgcggtgaccggcaccgcctggctggaagctgacagcccaggcctgggaggagtgaccgcagaggcgggcagcggcgatgcccaggcccttccagctactctccaggctccccacgaggtcctcgggcagtcaatcatgccccctgccattc

SEQ ID NO: 189497 - DNA, 902 bp, Homo Sapiens
tcaaagcgttcagcgcgcggagctcccgcgccccggctaccccagagcagcctccgcacgaagccggtggtcagggcctccctcagctccgggttaggccggaatcctcgcaggcgctgggctgccaccttgcggaatttgggtgcgtcccggaccatgtgacgcgcccgtgcagggtgcgcaacagccgctcacagctctcgtccagcggccccgcgacttcctcgccctccagtaggcgaaccatgggtgccacgtgcggcagcgccacctcgccggggtcgcagggtccagcgccctcatccagagcccgcatcagcggcttcagctcctgctcaaaggccagcgcagcctccgtgtggctccttcggagctggcgccacgtgtgctccaaccgggacacctgggagaagagatctgagcacgcctcctctccagtcttcccagtcacccgcactccagcttcctccagtccctgctccccacgaacctggggcatgagcagggcgcccatgactgcagccagcccgggcaggtcccccgccgcccctggccgcagcgccagcgccagctctaccagtcccctcagtgcggctgcgcgctcctccagcggccccgagcagcccagcaccgccagcgccccggccagcgccagtgtctgatgcctgcagaggtggagggcaagggtctgggggaagtggggaggtttgtaatgcaggggtgaggggggacaggaggtggcattgccccatctcccttcttccctggggaaccatgagtggggagctgtttggagatcttgggaagtggggggaattggcctcccccaaccaagattacaagctgctggctcacctctccagcagttccaacctcaagtggtgtccatggggaagagccaa

SEQ ID NO: 189498 - DNA, 710 bp, Homo Sapiens
ccagtgactatttatgagaacaaaagacaaggcatggctgactctccaggttacagctggagaagaggggaaaggtgtttggttgtacaagcagctcagggcagctggtgctgcggcgtgcatgtgcggcccgagagcgtggcttcgggtctaccagatgccttcaaggaaaaggccagaacctgcactgcacggcacagtcactgtgtgtggtgggacccagtgtcggctgagaggcctggaggggtcttgcctcccttgtagtcacttggtgtcataacaaggagggcactcatttggcctgggccggcccctggccccactatccacaggccaggcccggccaatgaccttgcctaggcaggaagtcccccaggctgtcccctcgctgcctagggccatgggcaagctgcacaggctccggggcctgagccagagcccccgcctcctgctgccacagcccaagggagcggctgagtcagccttagaggccattctgtggccgagagctggaggccagtggctgcggggggtcggggaggggtcctttccccaccccggtggcccctctgagtccgtgtggccagggctctggctgggaaaagagaatttgagcctagcgtactttgcagcagccctcaaataactcagcctcctcaagggggcatctgatagatgcccgtgaacatgtcttctccggcctggcccaa

SEQ ID NO: 189499 - DNA, 1397 bp, Homo Sapiens
  misc_feature (107)..(165): n is a, c, g, or t
ctttgtacaaaaaagttggcttctggcaacctttcgccctccttctcacggccctggcccggggctccagggtctcaggtcgtactcagcccctcgcgagctgggannnnnnnnnnnnnnnnnnnnnnnnnnnnnnnnnnnnnnnnnnnnnnnnnnnnnnnnnnngcggggaccctgggagcctcttcggggctcttgggaggggacatttcctaatctcaggccggggttaaagttctggtcctggagagatgctggaagctgcggccgcagccgcaacccgtcccggaggtgtcctgtctcctgtcgccgccgccgccgccaccaccgctgccactgccgccctgccggggccatgttcgctctgggcttgcccttcttggtgctcttggtggcctcggtcgagagccatctgggggttctggggcccaaaaacgtatcgcaaaaagacgccgagtttgaacgcacctacgtggaccaggtcaacagcgagctggtcaacatctacaccttcaaccatactgtgacccgcaacaggacagagggcgtgcgtgtgtctgtgaacgtcctgaacaagcagaagggggcgccgttgctgtttgtggtccgccagaaggaggctgtggtgtccttccaggtgcccctaatcctgcgagggatgtttcagcgcaagtacctctaccaaaaagtggaacgaaccctgtgtcagccccccaccaagaatgagtcggagattcagttcttctacgtggatgtgtccaccctgtcaccagtcaacaccacataccagctccgggtcagccgcatggacgattttgtgctcaggactggggagcagttcagcttcaataccacagcagcacagccccagtacttcaagtatgagttccctgaaggcgtggactcggtaattgtcaaggtgacctccaacaaggccttcccctgctcagtcatctccattcaggatgtgctgtgtcctgtctatgacctggacaacaacgtagccttcatcggcatgtaccagacgatgaccaagaaggcggccatcaccgtacagcgcaaagacttccccagcaacagcttttatgtggtggtggtggtgaagaccgaagaccaagcctgcgggggctccctgcctttctaccccttcgcagaagatgaaccggtcgatcaagggcaccgccagaaaaccctgtcagtgctggtgtctcaagcagtcacgtctgaggcatacgtcagtgggatgctcttttgcctgggtatatttctctccttttacctgctgaccgtcctcctggcctgctgggagaactggaggcagaagaagaagaccctgctggtggccattgaccgagcctgcccagaaagcgcttctctccttggtcaccctcgagtcc

SEQ ID NO: 189500 - DNA, 902 bp, Homo Sapiens
  misc_feature (74)..(86): n is a, c, g, or t
  misc_feature (95)..(110): n is a, c, g, or t
ttggttttttttaagaatggcctgatcatggctatctcagccacattgttggcaatttaatttatttacttccnnnnnnnnnnnnnaagaaaggnnnnnnnnnnnnnnnntcaaacttgaaacttttcttttgatgttcctattgtgggggttctggatagggtgggacagggatgggggtgtgttttatattttttccttttcagcacaacctttggctttaatataggaagagccaagggagtcctcggctgaacttacaatatctgccccaaacctctgtaaccccaactgaaatgaggagcttcctctcttcctgtgaaggatatgacagtccagcatcgatgcctgtgccctctggaaaaatttcctcctagcccttccagggccttatcataaaactctggatttagagtattcattttgaaggcaactcccccttccccaagtttccttggagctgtatagctgggttctaagcttcaccatgcaaatcaaaaattttatctctaagtacaggctgtgccgtgtctcacccacacccccctggggacttcagttccatttcaggttacctggggtataccttgatccctaaagtgactggcagagtaaaagaaggggagagataataggtgtgattattttaatatggaggtgggagtgtggttggagatagaaaggctcctccccaccatgtaatggcttcctctcagaattttattccaggctagcttgctgcaagtctgggtagttggatcatggctccactggggattggggtggaaagcttgaggggagtagggttccagctctgggacattgtgctcaagaatttgaaaaacgctgctatacttactctggttactacatttcttccactcccctttcccctacctgcc

SEQ ID NO: 189501 - DNA, 919 bp, Homo Sapiens
ttgggcttttgcctttactacaaacagttttccctcttgattatattcttataacaattattattatgtactttatttttacttcaatggcaggaattcgaaatattggcatatggttcttttggattagattatataaaatcagaagaggtagaaccaggccccaagcactcctttttctctgcatgatacttctgcttattgtccttcacactagctacatgatttatagtcttgctccccaatatgttatgtatggaagccaaaattacttaatagagactaatataacttctgataatcataaaggcaattcaaccctttctgtgccaaagagatgtgatgcagatgctcctgaagatcagtgtactgttacccggacatacctattccttcacaagttctggttcttcagtgctgcttactattttggtaactgggcctttcttggggtatttttgattggattaattgtatcctgttgtaaagggaagaaatcggttattgaaggagtagatgaagattcagacataagtgatgatgagccctctgtctattctgcttgacagccttctgtcttaaaggttttataatgctgactgaatatctgttatgcatttttaaagtattaaactaacattaggatttgctaactagctttcatcaaaaatgggagcatggctataagacaactatattttattatatgttttctgaagtaacattgtatcatagattaacattttaaattaccataatcatgctatgtaaatataagactactggctttgtgagggaatgtttgtgcaaaattttttcctctaatgtataatagtgttaaattgattaaaaatcttccaaaattaatattcccttttgtcactttttgaaaacataataaatcatctgtatctgtgaa

SEQ ID NO: 189502 - DNA, 1191 bp, Homo Sapiens
ttggattaaaacagactttattatctcttaaaaagccatgagacttaacagaagttaaaagcgtgtttttttaattcaggaagaggatcacctagcccgggtagaagaggcaatcacccgtatgcttgtgtgtgccctgaaaactgcagagaatccacaaaataccagagcctggttaaaccccactgaggtaggcggcttctggtcttcatcatggcagttagtttcctgtggtaaaccagccctgactagaacatatgttttccagtgtaactaaatgtatgtaaccattttaaaaggtttttcttttcccttaggttgaggaaacgtcccatgcagtcaactgttgctacttaaatgcagctgtttctgcattttttgatcgctgcagaacatctgaggtagtagaaatccaagcactgagaacagatggagagcacatgaaaaaggaagaattaaatgtgtgcaaccacatggaggtgggccaaacaggtagccagaacttgaccacaggaacagacaaaccggaggcagcaagtccctttggccctgatctggtccccgtagcacagaggtccgaagaaccgccttcagaaagaggaggcatatttggaagtgatgggaaagactttgtggacaaggatggagaacactttggaaaattgcattgtgccaagagacaacaaataatgagcaacagtgaaaatgcaattgaggaacagattgcctcaaatactactacgactccttcaaacattcatttctacggatgacttgctggactgcttggtgaatccacaagtaaccaggatagtggcacaacttttgatacaaggaagaagtttatgattcaagtggaagatgacttttaaaataatattttttaaatatatatttttaagtagtatgactaaaataaagatgaaccagcaaaaggtcagtttgcacatttgtaaatgtatttatccttaccgaattacatgtcagtctgttgccaccttctttcatgcacattcctctttggccaaactggctgctctttgtttgtaagcttttgttcctctctcatcccatacttttagcctgtgtcaaatgtaagtcccaagtatttccagcagaaagtaatgtcttcctcagcctcaaccagggacccacccggctgcttacttttgcaaataaaattttaactag

SEQ ID NO: 189503 - DNA, 1504 bp, Homo Sapiens
  misc_feature (1311)..(1342): n is a, c, g, or t
gttcgttgcaacaaattgatgagcaatgcttttcttataaaagaggcaactttgtacaaaaaagttggctcagcctcccagagtgctgggattacaggtgtgaggcaccgcgcccagccttgtgttccccatttctaataccatgtatactgggtttataaatctttaatctaggatgaagctgtggcacaccagctggtaaagagctaaaggtatctaggtggaaaatgtcatgatatagccgtgtcttttctctttgcctcagccttaatacagatattggcagctgctgcagctgagcgagatgtggtttatttcacctttggggactcagaattgatgagagacatttacagcatgcacattttccttactgaaaggaaactcactgttggagatgtgtataagctgttgctacgatactacaatgaagaatgcagaaactgttccacccctggaccagacatcaagctttatccattcatataccatgctgtcgagtcctgtgcagagaccgctgaccattcagggcaaaggacagggacctgaggagccgagcgaatagcatctcctcccacctcccaccagagacgtcctgtttgagctgtcaggtgtaatatatgaattgacttaagttaatataaatgtgtacataatccacatttgtagtcaaggacgcaatctcttccacacatgtgcagttgtcagttggtacatctaaactccctccatcctgactcacgtggacttagatatgttttgtttctattttcttctatttcagtttttcattctttgatgtttatttcttttgtccatcagatctcttgtgaaatcccatggaacgttgtgctcagcctgtcgggtctctttcttcctgcccatatattataccagttgcttctgcagccccgcagatgccagcgatgccaggaaacaagttgaaatccaggaatctctttaactgattttgctaaaaatctccctgtgagccttccactcaactcttaatatgcttgcattgtttaagtttttaaattctgaaaattaataattagggtttttttcatatgtgttgcataatgcaaacctcctaggttaaaatagtttctttatttaagatagaataatttccagaaattgtacttttgaggtatcatttttatctgtaatggtttgtctgtcttttttcctctgatcagtatttttttataccagttttggagactgcctgagatgaaaggaaatgtggaataaaaggaggttttcctgatgtggtgtaaagaaaacagattcaagagaattgaaaannnnnnnnnnnnnnnnnnnnnnnnnnnnnnnnaaattaggactaatgtttcttttgtggtgcttgaggcatattcatataaccaaagtttgagaactgggaacttcatgctgatttgtacatattgaagtttttctggtattcaaaggttatatagtgaatgaattttcattaataaacactttgtcagaaact

SEQ ID NO: 189504 - DNA, 834 bp, Homo Sapiens
gggtggagacccattcaggaactgggaggcgaagaaggcatcctcctgccagtgctcaaatgcgtgctcagctgctggggtcctccggaagtgaagatccttttcatctcattcagactcctccagagccccttgcggtccagcaaccccttgattttcatctctgcaaaagcagagccagcctgtagataaaagttggcattcttggctgtggagtatttgatattgagctccaagtcttccactgtcttttcatccaggcagtgaggccaacctgggttgtaagccttccactggtacatctcctgccgggcctgaagctcctcctggcgctgttgctggagcacagggtggtggtctgcccaggacaccttggctgtaccctcctgcagcaccagggtccccgccccctccagccactggtagcaggggaagaggaggtggccgccccgcggcggtgtcagctggaaccagcggcagaaccaggcatccggggccaggggccccagcaggggcagcactgggggcgccttgtgcacgcgcagcagcagcactcggcctacgtcctccgggagcgtcacctggaagtcctcctcagcgcccgcagtgaactccttgccgagattgtccaggggcagtggggggctctctccccgggtccccacgatgctgacagacactttgtcccatgtgccagccccgaaggcttctccggtggacaccctgaccctgaactcggccatgctgccagcctaagtccagctctctacggcgcacagggctgcagagcggggctcccccctgggacacgcctggttattgcccctggtccaa

SEQ ID NO: 189505 - DNA, 1159 bp, Homo Sapiens
ttggcatagtcctgcccatgaaacagcctccttcccactaccaatcccacagagcaacagctaccttaggggtagtgactaccttgggcccggaggctggttcaggatcccaagaggcataaggctggctgacagggaagggtctcccagggcctcctccccactccccacccctcacatcccctggcagttttgcagagatgaaaatcaaggggttgctggaccgcaaggggctctggaggagtctgaatgagatgaaaaggatcttcaacttccggaggaccccagcagctgagcacgcatttgagcactggcaggaggatgccttcttcgcctcccagttcctgaatggtctcaaccctgtcctgatccgccgctgtcactacctcccaaagaacttccccgtcactgatgccatggtggcctcagtgttgggtcctgggaccagcttgcaggctgagctagagaagggctccctgttcttggtggatcacggcatcctctctggcatccagaccaatgtcattaatgggaagcctcagttctctgcggccccaatgaccctgctataccagagcccaggctgcgggccgctgctgcctctcgccatccagctcagccagacccccggcccaaacagccccatcttcctgcccactgatgacaagtgggactggttgctggccaagacctgggtgcgcaatgccgagttctccttccatgaggccctcacgcacctgctgcactcacatctgctgcctgaggtcttcaccctggctaccctgcgtcagctgccccactgccaccctctcttcaagctgctgatcccgcacacccgatacaccctgcacatcaacacactcgcccgggagctgcttatcgtgccagggcaggtggtggacaggtccacaggcatcggcattgaaggcttctctgagttgatacagaggaacatgaagcagctgaactattctctcctgtgtctgcctgaggatatccggacccgaggagttgaagacatcccaggctactactaccgtgatgatgggatgcagatttggggtgcagtggaacgctttgtctctgaaatcatcggtatctactacccaagtgatgagtctgtccaagatgacagagagctccaggcctgggtcagaga

SEQ ID NO: 189506 - DNA, 1569 bp, Homo Sapiens
  misc_feature (1211)..(1229): n is a, c, g, or t
ttggctaaaataaaatgcattatctccccagaccagagacagtggccaaaataaaaaatcatggggctggaaatttcccaaatcaaaccagcctcctggtgcttgaaggtttcattcactattacctgcacaggatgtaaagaaaagtcacagtaggcactctttaccagggaaataaggcagtatttgaatcacaagatatattttttatctgcaaccatggatccaatgatctgtagagctttttcactcattaactgtcaggatatgaaggactgacagtctgtaaagatatttatatttttgtatagttgttttcatagatttctcaaaggctgaagttttcaacctagaagatgagatttgtattgagtatagaaatgatgtttcctatctagtttgtaaataatcatggtgcacttgaggggtctcttggaaactcctagggggtcaagaatcactattctgaaactgtatagactgggatttagctgctgcattttgcctttcttaaataattatattttggaatgtaacccctgttctgtcttcattgacaggatttgcttgtgttgttaaaacactaacacaagagcttccagtgcctgggccgtgcctaggtgatgctatttcttctatatctcctgtcttctttatcccaaatcccactcagcatatcttcagacctaggttgtaagaccaactttggattggatctagccagtgaattattatttccatggttggttccctttctgttaactctggtaatcaacagattgaaaacggtggaagaacttcttctgaaaattgcagtgggagcaaattcttgttggttttgtgctgcttgcctttctagatctgctcatcagcacttaaccttccctcctctaaaggttactaaagaagcctgaagtaggtaaagagtgctcctcagcttcttatccttccactctttacccagcagatttcattcaatgccttagccaaggagtccagcacctgtctcccctgctaataattgtccttagagatgctagtactttaatccaggtatagcagtttcccgttattttcttgcttgtcgttcccctacatttcctcctgatttcccaagactctctttgtggcttttgagggtcagccaaggagcaggcaagtgagtgaacaatcctcaggaaaagaaggaccattttagcttaacacttccnnnnnnnnnnnnnnnnnnnaagaagaatataggtaaacaggtaatgattcttgattggagataccatttgactcttgatgagagttgtacgaagatggaaatgagggatgattccaggcgttttagggggaaggctgcagataccattctaacccccaagatactgtgttctcaagacctcttacaactaggtgttgtcagggataatttgaggagggcttagtcttcagaacaatcctgcagtcttgacagaaatctagatctccaaaaactcctaccctttaaccttaccctagggggaactgatctatgaatataacatgtgtgattatgaaacgtgaagttgagtgagaggagtt

SEQ ID NO: 189507 - DNA, 1183 bp, Homo Sapiens
gccaactttgtacaaaaaagttgggttctgaggactgggtttgggtgcagacgttgttgcttgggcgcttctccgctgcgtgtaggtgaagggggcttcctgaccgagacatggatttaggtgctattacaaaatactcagcattacacgccaagcccaatggactgatccttcaatacgggactgctggatttcgaacgaaggcagaacatcttgatcatgtcatgtttcgcatgggattattagctgtcctgaggtcaaaacagacaaaatccactataggagtcatggtaacagcgtcccacaatcctgaggaagacaatggtgtaaaattggttgatcctttgggtgaaatgttggcaccatcctgggaggaacatgccacctgtttagcaaatgctgaggaacaagatatgcagagagtgcttattgacatcagcgagaaagaagctgtgaatctgcaacaagatgcctttgtagttattggtagagataccaggcccagcagtgagaaactttcacaatctgtaatagatggtgtgactgttctaggaggtcaattccatgattatggcttgttaacaacaccccagctgcactacatggtgtattgtcgaaacacgggtggccgatatggaaaggcaactatagaaggttactaccagaaactctctaaggcttttgtggaactcaccaaacaggcttcttgcagtggagatgaatacagatcacttaaggttgactgtgcaaatggcataggggccctgaagctaagggaaatggaacactacttctcacagggcctgtcagttcagctgtttaatgatgggtccaagggcaaactcaatcatttatgtggagctgactttgtgaaaagtcatcagaaacctccacagggaatggaaattaagtccaatgaaagatgctgttcttttgatggagatgcagacagaattgtttattactaccatgatgcagatggccactttcatctcatagatggagacaagatagcaacgttaattagcagtttccttaaagagctcctggtggagattggagaaagtttgaatatttggtgttgtacaaactgcatatgcaaatggaagttcaaacacggtatcttgaagaagttatgaaggtacctgtctattgcactaagactggtgtaaaacatttgcac

SEQ ID NO: 189508 - DNA, 345 bp, Homo Sapiens
cctataaaaaccaactttgtacaaaaaagttggctattttcatcctcgatttgaaaatatctgtaactcctatagatcctataggcagagagttttcctttctgactttttccctttgctttcgtgtgaccacatgttttctgtaccagtcactggggaaagaagtgagtttatctcgtttgttttaaaagttttgcttgtctatttagcattcctttttgggtctcaagatttatggaacaataaatgtcatttaatgctgtgtgcttattttgaattcctcatctggttttagaatcggggtaaaaatacttagatgcttatcagacttgaaaatatattgtt

SEQ ID NO: 189509 - DNA, 972 bp, Homo Sapiens
gcccgtgggcctgcactacctcagggggccggcgggcagcggcggccagggctgctcggccagctctcgttccagctgcttgaagcgcttcttggaggaacgcttgggccggaggcggcgcaggcaggcggggaggcactggtttagcacgctctccagcatgaaggcccccacgaagttgagggtgaccagacccagcagcagcagcttgaagccggtgtcagtgatgttcctcagcgccagcggcccctgcaggaggccggggaccaggacaaggcccaccaggacggagctcaggagcgccagggccaccaggaagggcacattggtgtagagcggccggcggaagggcgcccccttggacacggctgcagccaggatgaggtactggaagctggacagagagaagaccacggtgttctcgtagttgggcaggttgtttggtgcggccactgtcctgttcagaggcacgaaccatggctgggccagggtcaggaagtagccccctagctgcacgccggtcaccaggaccatctgcagcagcaggctgctgagcacgggcacgctgagcagcgcccccggtggccgcacccgtcccaggaccagcgctggccccgtgcggctcatgagcactgccactgtggtggtgatgaccaggtcgatggccaggaactgcaggtcacccaggttggtgttgatcgtgtagaggatcaggacggagatgaactgggtcaggctgtacagagccatgtacttgaagacgctgaacgaagtgtcaagggaacagcgcccctccctgatgaccatgggcacgcactcaatactggccatgctcgaggtgaagggtgagaccactgaggcttctgcctgggacagcgagatgccgacatcagccgccttcagggccccacagtcattggcaccgtctccgcacatgcccacgcagtactgaagcttctgtagctcgcccaa

SEQ ID NO: 189510 - DNA, 947 bp, Homo Sapiens
aaaaataagctttataaataaaagagtgataatgttctataacatttagaatgaaataccattgattttctcagtatctgcttcgatgcataaggcatttcttgaactaactaaaggttgaatttttaaaaatcaaaggtgatggaaaacataataggaataagtgagtaacaagtaccagaagaaaacccatctttactattttattacattccttttgggaccagaagattaaactacacaaggagctctagcaggtaggaatctggaggtgcaactgccttacctcttctaaatagactgatgatgagtatattcctctcattaaactccaacggtcactttgctgccagtccagcactgtcaacttacgatcaaggtgagcccaggcaattcttcgagtaccaaaaacgatagatatgatactattaactgccttaagtctttctctttctatgtctggtttgaggagctttctcaggaaccggttttccggtgactttcttttttcccgtccagtctttggacaaagtatggagttacaaacttgaactgtacttttatacttaaacaagggcacattcattaaactctctaaattctgaaatggcccaaagttttctctgtgctctacgatattgatggaccttcttccacgaagcaatcggaaagcttcaagttctttagtagatgctgtattcaacacatgcaagatggaagcctgctgttctgaagagaagagcttgtcaagtgcattttcgggctcctttgcattttcatcacaaaaagtaacattgggagtaattttcttaggtgtagtggattttttccgacagcagaaattatgtaaggcccagtacagggatgacctcgacggggtcagaaagcatctccacctctctcccgccgtgaagaggacagacccgctcatctccaagttgaaccaa

SEQ ID NO: 189511 - DNA, 551 bp, Homo Sapiens
ggtagctaggttttatattgttcttaaatttattttactctattttatttttccatcacttctttgtcccagattcatgaaatttgctgatgtccattttatgtctacttttgaactcttctctttgtgtttgttttgttcttattacaaactccaagacatttcttagaattgtctacagatttcgtgtagctacttattggtagcttcttaatttcatacttgtccagaccattagacattattacatgctctgtcttgggcctatcattaacattagcttagggattctgatttcaaagacataaagaattggcaaaactcttcttacagaacttaaaacaagttttaaagttacatttctatacatctaatacataataccttcttagccattaatgtaattcctctggataaagataatatattcaaaaaatattgggacaaaaaaatgcacttgtttcttgctcatatatatatagatgtatattttttttaatttctgtttgtttattttggttacattgaatacgatttgctgaacagttttg

SEQ ID NO: 189512 - DNA, 1967 bp, Homo Sapiens
ttggcggagaccgaagacgaggacgaagggactgagggcgaggacgaagggcctcagtggtcgccgcaggacccggcactgcaaggcgtaggacagcccacaggaactggaagcataagaaagaagcgatttgtgtccagtcaccgctatgtggaaaccatgcttgtggcagaccagtcgatggcagaattccacggcagtggtctaaagcattaccttctcacgttgttttcggtggcagccagattgtacaaacaccccagcattcgtaattcagttagcctggtggtggtgaagatcttggtcatccacgatgaacagaaggggccggaagtgacctccaatgctgccctcactctgcggaacttttgcaactggcagaagcagcacaacccacccagtgaccgggatgcagagcactatgacacagcaattcttttcaccagacaggacttgtgtgggtcccagacatgtgatactcttgggatggctgatgttggaactgtgtgtgatccgagcagaagctgctccgtcatagaagatgatggtttacaagctgccttcaccacagcccatgaattaggccacgtgtttaacatgccacatgatgatgcaaagcagtgtgccagccttaatggtgtgaaccaggattcccacatgatggcgtcaatgctttccaacctggaccacagccagccttggtctccttgcagtgcctacatgattacatcatttctggataatggtcatggggaatgtttgatggacaagcctcagaatcccatacagctcccaggcgatctccctggcacctcgtacgatgccaaccggcagtgccagtttacatttggggaggactccaaacactgccctgatgcagccagcacatgtagcaccttgtggtgtaccggcacctctggtggggtgctggtgtgtcaaaccaaacacttcccgtgggcggatggcaccagctgtggagaagggaaatggtgtatcaacggcaagtgtgtgaacaaaaccgacagaaagcattttgatacgccttttcatggaagctggggaatgtgggggccttggggagactgttcgagaacgtgggtggaggagtccagtacacgatgagggaatgtgacaacccagtcccaaagaatggagggaagtactgtgaaggcaaacgagtgcgctacagatcctgtaaccttgaggactgtccagacaataatggtgaggagcaacggactctggttttaagaaactggattaaaaaaagatgtacccacaaacaggtggctcaagattggaaactgataatgttatcatattattctctttccaggaaaaacctttagagaggaacaatgtgaagcacacaacgagttttcaaaagcttcctttgggagtgggcctgcggtggaatggattcccaagtacgctggcgtctcaccaaaggacaggtgcaagctcatctgccaagccaaaggcattggctacttcttcgttttgcagcccaaggtagttcgtttttaccttatttttacctaaaaatcaaggcctgggcttgctaccttttcaaacaatttttgttatactttctttgctttccatattaacatatcttcaatttcaaatttgaactccttttcttttacattaattggcaactgcctgctttgagtttagtgttttcagttatgaatgaagcttaaatctaacacttcacatgcttgcaattgctcgctattactcttttatatgcaaagaaaagctttttggacagtcaagcgctcctctgtgcgactaggcttcacatacagctcatagttagatacattttatattcacacagtaaccagtagttttggaaaatagtctatgcatggtccaaaatacttgttactgggtaactagcagtagcagtgcaaacagataatagaagtggtagtctgagtattgattattttatgttt

SEQ ID NO: 189513 - DNA, 616 bp, Homo Sapiens
ttggcttcaaaatatttcttttgtgcctatgtacatgtgtaaacatgccatagcatgtgtggtaggtgtcctgtattttgtttgggaaaaaaactatcaaaatgaggaagagaatttcccctatttatgcactaggtttctgtgctttttctttgagttctctggagtagatattaatttgataccttcatggtaatgaaattatgatggagctgtgttataaattccttatgtcagaggccagtgcggtagcctttgtcccttcatgcctttcaattctgagtgggaggaaaagcaaacatcaaaacagtgcttcagccaaattccatatgtaatgccattgggagagtattgactaaaatatcattcgtcagggaaatatagttgtaatatttttacaggatattcctaggtaaatgaaggagccttcagttgtaaatttcaattaccccaaaatgtatttgctacattttgttgtttgaagtattacctcttaaccttctttgttaatttttttcattttgtcttatatagtccagttttccaagataagctcagtcctttttcaaatgtcccctttttaccaatactttttcattaaattatgaaaactgct

SEQ ID NO: 189514 - DNA, 1350 bp, Homo Sapiens
  misc_feature (308)..(316): n is a, c, g, or t
  misc_feature (1022)..(1112): n is a, c, g, or t
ttggcgaggtatcggggctgcttgggcccagaggaagtccctgaggaccgcagcagtgcctttgccgctgttgcagaaggagaaggcttgcagtcgagccccggggcctggggacggtccttcctctgccagcccccgccctccccactcaggcgcacacctccctcactgacgcattttgccgcacaagctgtaacatggcggcagcgactgcggcctgaactctagggagccgggttgatttttaaagcttcaaaatcctaagactcagcactgttgcggggagcacagggatcagttgtccttgnnnnnnnnnggtcttttcttcatttgaagattaagtattggagccatgggaataaaggttcaacgtcctcgatgtttttttgacattgccattaacaatcaacctgctggaagagttgtctttgaattattttctgatgtgtgccccaaaacatgcgagaactttcgttgtctttgtacaggtgaaaaggggaccgggaaatcaactcagaaaccattacattataagagttgtctctttcacagagttgtcaaggattttatggttcaaggtggtgacttcagtgaaggaaatggacgaggaggggaatctatctatggaggattttttgaagacgagagtttcgctgttaaacacaacaaagaatttctcttgtcaatggccaacagagggaaggatacaaatggttcacagttcttcataacaacgaaaccaactcctcatttagatgggcatcatgttgtttttggacaagtaatctctggtcaagaagttgtaagagagattgaaaaccagaaaacagatgcagctagcaaaccgtttgcggaggtacggatactcagttgtggagagctgattcccaaatctaaagttaagaaagaagaaaagaaaaggcataaatcatcatcatcttcctcctcctcatctagtgactcagatagctcaagtgattctcagtcctcttctgattcctctgattccgaaagtgctactnnnnnnnnnnnnnnnnnnnnnnnnnnnnnnnnnnnnnnnnnnnnnnnnnnnnnnnnnnnnnnnnnnnnnnnnnnnnnnnnnnnnnnnnnnngtgcatctagtgagagtgaagctgaaaatcttgaagcacaaccccagtctactgtccgtccagaagagatccctcctatacctgaaaatagattcctaatgagaaaaagtcctcctaaagctgatgagaaggaaaggaaaaacagagagagagaaaggaaagagagtgtaatccacctaactcccagcctgcttcataccagagacgacttttagttactagatctggcaggaaaatt

SEQ ID NO: 189515 - DNA, 1125 bp, Homo Sapiens
  misc_feature (543)..(627): n is a, c, g, or t
tgtacaaaaaagttggctcagaaaccactctattcatatatagagtgaagagttgtctctttcacagagttgtcaaggattttatggttcaaggtggtgacttcagtgaaggaaatggacgaggaggggaatctatctatggaggattttttgaagacgagagtttcgctgttaaacacaacaaagaatttctcttgtcaatggccaacagagggaaggatacaaatggttcacagttcttcataacaacgaaaccaactcctcatttagatgggcatcatgttgtttttggacaagtaatctctggtcaagaagttgtaagagagattgaaaaccagaaaacagatgcagctagcaaaccgtttgcggaggtacggatactcagttgtggagagctgattcccaaatctaaagttaagaaagaagaaaagaaaaggcataaatcatcatcatcttcctcctcctcatctagtgactcagatagctcaagtgattctcagtcctcttctgattcctctgattccgaaagtgctactgaagagnnnnnnnnnnnnnnnnnnnnnnnnnnnnnnnnnnnnnnnnnnnnnnnnnnnnnnnnnnnnnnnnnnnnnnnnnnnnnnnnnnnnngtgcatctagtgagagtgaagctgaaaatcttgaagcacaaccccagtctactgtccgtccagaagagatccctcctatacctgaaaatagattcctaatgagaaaaagtcctcctaaagctgatgagaaggaaaggaaaaacagagagagagaaagggaaagagagtgtaatccacctaactcccagcctgcttcataccagagacgacttttagttactagatctggcaggaaaattaaaggaagaggaccaaggcgttatcgaactccttccagatccagatcaagggatcgtttcagacgtagtgagactcctccacattggaggcaagagatgcagagagctcaaagaatgagggtatcaagtggtgaaagatggatcaagggggataagagtgagttgaatgaaataaaagaaaatcagagaagtccagttagagtaaagagagaaaaataacagatcacaggaatgtatctgagagtccaaacagaaaaaa

SEQ ID NO: 189516 - DNA, 874 bp, Homo Sapiens
gacaaggaggtgggggcagctgagttagagtcccaactcttggactccatttgctattctcttctttctcccccacacctatctggtggtggtagtgggcgtttatatttgcgttccttttcattcatttctaaatctcttaaaaattttgggttgggggtattggggaaggcaggaaagggaaaaggagagtagtagctgaagagcaagaggaggacatggagatgaagaagaagattaacctggagttaaggaacagatccccggaggaggtgacagagttagtccttgataattgcctgtgtgtcaatggggaaattgaaggcctgaatgatactttcaaagaactagaatttctgagtatggctaatgtggaactaagttcgctggcccggcttcccagcttaaataaacttcgaaaattggagcttagtgataatataatttctggaggcttggaagtcctggcagagaaatgtccaaatcttacctacctcaatctgagtggaaacaaaataaaagatctcagtacagtagaagctctgcaaaatcttaaaaatttgaaaagtcttgacctgtttaactgtgagatcacaaacctggaagattatagagaaagtatttttgaactactgcagcaaatcacatacttagatggatttgatcaggaggataatgaagcgccggactctgaagaggaggatgatgaaggatggcgatgaagatgatgaagaggaagaggaaaatgaagctggttccaccggaaggatatgacggaacaggaggagaacaaggacaaggaggatgacgatgagatgaacatgaagatgaagccaggttcagaatttgggagagggagaagaggaagtgggcc

SEQ ID NO: 189517 - DNA, 711 bp, Homo Sapiens
aatcagcatcataagggaatgtagccttccaacagagatgatgctgttcgtatgttaatctcagagacagtatttcaagagagtggcaggtctgttcctggtaaaattttaaccattaggattgcagataaatgtttgaattctgctcctctctcatcaatccaggacagtatttgaagtgtgagggctttgtgtatagttgtttatccattaccacatttttgtattttaatagtctacaggctatataaaagaacatggctttttgactgataaaagtgattacagatgttggctcaagttcagggccaccatcatatacctaacaagagttcatgattctttaggtaatgtcaaaacattttgtatttttccatcttaagctttataacattttgtgagtaagacaaatgttatttaaaattcttgttgtcagtccagcaattgaggctttcatagttcagtgttataatattcagtagggaccctcaacaaatatataaaaatatgttgctcactctataatcctcctatggctaacctctaggatagttctgccactatattttacttctttgccatcagcaagagtaggatttcatcaaggccaggtaggaatctaaatgaaattgatatataaatgaattgatctaaaatgtaaaagcaaatgaaaatgcatgtgttttttcctgtcgaacatgtataccctta

SEQ ID NO: 189518 - DNA, 1470 bp, Homo Sapiens
ttggcttcctttggacaggcgtgtttccccaggtcgggcccagccaacgtgacagccgcagacctcggaaaagggcgctccggccccgcctcgaggatttcccccggccgctagggcagcccgggcccgctcggcccagcccctcacggactgcggcgcgcggctccccggggcccggcccgccgaacgcctcgctctacagccctcacctcgcggcgccgagcgcagcgtccgcggcatggagaccggctccgactcagattctttatacaattgcatatgtacgagtggatgaacgtaccattggtgatcccgaggatttttgtcaagattggataaaccatgtatcacattgattgtagagatcagcttgaacgggtctttttacgacttggccatgctgaaacagatgaacaattacagaatattatatctaaattccttcctcctgttttgctcaaactctctagcacccaagaaggagtacgtaaaaaggtaatggaactgctggtccatctgaataaacgtataaaaagccgccccaaaatacaacttccagtagagacactgttggttcagtaccaggaccctgctgcagtttcctttgtcacaaattttactataatttatgttaaaatgggctatcctcgcctaccagtggaaaaacaatgtgaactggcccctacgcttcttactgccatggaagggaagcctcagccacagcaggatagcttaatgcatcttttaataccaaccctttttcacatgaaataccctgttgaatcatcaaaatcagcttctccatttaatcttgctgagaaaccaaagactgtgcagctgcttttggacttcatgctagatgtccttctgatgccttatggttacgtgttaaatgaatcccagagtcgccaaaattcatcttcagcacagggttcttcttcaaacagtggcggaggttctggaatcccacagcctcctccgggaatgagcttttatgcagccaaacgagttattggtgataacccatggacacctgaacaattggaacagtgcaaattgggaatcgtgaaattcatagaagctgaacaggtgcctgaacttgaagctgttctccatttggtgattgcctctagtgatacacgccacagtgtggcaacggcagcagacctggaattgaaaagcaaacagagcttaattgactggaataatcctgccatcattaataagatgtacaaggtgtaccttggagatataccactgaagacaaaagagggtgcagttctgaagccagagttgaaaagggaccctgtcagtacaagagtcaagttaaagattgtcccccatctcctccgctctagacaagctgctgaaacgtttccagccacattcagtggtgtatgatggactttttggtacaaatacaaattcaagttaagaacattatccctgcaattgtgcatcatatttgta

SEQ ID NO: 189519 - DNA, 1612 bp, Homo Sapiens
  misc_feature (1360)..(1383): n is a, c, g, or t
cattagagatatgactgtcagttgcagtgagttctgcatcccaagtggagggaattgggtttgtggcaaagagcttgacccaggaaatagatggtgccccccaaattgtctccacatgaagatgtactgatgacgccccagaaatgctgcttccatatcagctgctgctagcgccagcgcagactctcagggagtcaccacagcttgtcttgtgcttggtgagtgagggtctctctactcagtgtcagacatctacaggaaagaaacaactggtggaaaagagcaataaattgcccggtgctctgcagggctggaatttcaaacagaaagagggaataagatcctgtgatttttctcacctgcttttccacgcactgtggtcatcactgtgcaatctacatctagtatgaaatccacacataggagagctggggcacaaggggactggaggcagttgctttgcaagatggctgaggagaaagcacactgggaacacaatccagaatgttctaacaataagttttcagtgaataaaccactggcaagacaattccatgtgcacctttaggttacctatatagtctcctaggaagatcaggatgaaagacctagatgatacccctgaggataaaacctccatcccctaaaatgattttttttaaataccactgtctttagctgtccaggaggtcagagtgttttttctgtctttgggccaagtcctgtctgagacctgtattttcactcttgttaccaaatctatctccctagtgcagtgtctccaggcctgagtttcttctggaacagattccattttagaatggggattcacaggttctgtgcatcaccacagtgctcagagaggattctcctggggtgtcttagaggcaggtgcccaactcaaatgtattcccaaggtttgctgggctctgggatccacgagacaaccagagagggatatctcatgaaatttgcatctggtggctgaacagtacctatgttctctgttttgaatatactttaatacctgagagtcttaaaatttgtgaacaacgtttctatagtcctttattttcaaatgcacattgatcttcacttgctgcatttttactcttcaaccctgaaactatggtctacattaatatggatttttaaatcacatgtcattacttttgcaacaccatcaccaaaattttttgctcttttacatttaggttcatctctgtggtctgtgttgtcctgacatgtaaaaagcatatcgtttattgaggtttttttcccccccttttagagcatccggaagtgataacacgcaaaatcacaaagtagcataaatcagtaaattagttgagttgttttnnnnnnnnnnnnnnnnnnnnnnnncacagaacaccagaaagagtgttggtgtgtaggtagattccatattaatgaggaacactgaactagttggaaattactgctttctctagaaatataaagcaaagcactattccaaggctatggagtagctctacagcctggcctcaactctaaaagtgtgaagaatgcaaatgggcagagacctacctgcagtggactgtcatttccctttcttcttctgaattactgc

SEQ ID NO: 189520 - DNA, 1594 bp, Homo Sapiens
tcagccacccaagaaaaacccagttactccacgtagctcatgggggcggcatcctccctgcaatggtgcatggggggcagtcctttcccctgcaggggtgtcattgccacccccatcctcatcctggaggccagtccaggctccgatatgagtgactaggggtgaggtaggggtggcagaagggagatcaaactggagcattccagatgcctactactgccctcacacaacggggcaactgtgctctccaactcctccccttggcagagaaactggtcctgcagtttcaggactagaccagcgtggggtagtggcaataaaggggcttgtatgagaagtggctttcgcctctcatccctaggggcaaaaagtgaatcatctaactggtccaagtcactaatggcaatccttcttccccaagaagactgagtttcctttgtcacttcaggaagggaagaagagaggttagctgagccacccagattaggcccagatttagccaccacctagaacagggcaagctggaagtgaaagaacttgaaatactgactttttccttcttaaaaaagacctaacattgtaatggtttagcaaaattgttataatttcttttaaataacccacagacacccatgacacttccaaatttacagagcaaaaaagtgatttgcagctggttcctccagggaattggccccgaaggctggctcagttcacctccaggacctcagtctccgggaggccgaacttggtctttgtgcttgtcgaagagcttcaccagggcctccatgtacatggtgtggtacaggtcgatgtcttgctgggttgggtgctccagcttggggatggtgatgggctctcccacaacagtggtgatgggcttggagtagggcaccagcccccaggtgtcggaggagaagaggcctcgaccatggaagatgcatggggcgaaaccaatgtatttctggaacttcttctggacccatcggccccaggagccctcctcgaagatcacctgcttgtacacttcattctctccaaaggagtagatgggaaccaggtcagctccatgacgcagggccagtttcacaaagcccttgcggttccgcagggtgactgcattcttgccaggcatggagctcagagactcagccgcacccccgaccacgatgatgatagcattgccactcccattctttgaaagcaaatagtctatggtgtcccggctgacagggcagatacctccagacatcaggtactccctcaacacaggcattcggaagttgcctgccagtgtagccaggtaaggccgtatgcctgggaacttcttgctcacttctgtggcctctgtgctgaagttgcagaaggcacccaggcccatgataccatgggggtggtatccaaagatatagttcctggtggtcagcaggttgtgtgtcttcaccagctggatgggaaagtagtctcgaaagtagcgccacacagcccagtttcggacccactgtgacctcctgccacctttcttgggtgtgttccagtcaaacaccagccaatacatattctgcacagcgatgagccagcaatcagtgcccaa

SEQ ID NO: 189521 - DNA, 996 bp, Homo Sapiens
ttgggaaatgctgaaaatcaaagtaaaaaattaaagcccataaggccagaaactccttttgctgtctttctctaaatatgattacttaaataaaaaagtaacaaggtgtcttttccactcctatggaaaagggtcttcttggcagcttaacattgacttcttggtttggggagaaataaattttgtttcagaattttgtatattgtaggaatcctttgagaatgtgattccttttgatggggagaaagggcaaattattttaatattttgtattttcaactttataaagataaaatatcctcaggggtggagaagtgtcgttttcataacttgctgaatttcaggcattttgttctacatgaggactcatatatttaagccttttgtgtaataagaaagtataaagtcacttccagtgttggctgtgtgacagaatcttgtatttgggccaaggtgtttccatttctcaatcagtgcagtgatacatgtactccagagggacagggtggaccccctgagtcaactggagcaagaaggaaggaggcagactgatggcgattccctctcacccgggactctccccctttcaaggaaagtgaacctttaaagtaaaggcctcatctcctttattgcagttcaaatcctcaccatccacagcaagatgaattttatcagccatgtttggttgtaaatgctcgtgtgatttcctacagaaatactgctctgaatattttgtaataaaggtctttgcacatgtgaccacatacgtgttaggaggctgcatgctctggaagcctggactctaagctggagctcttggaagagctcttcggtttctgagcataatgctcccatctcctgatttctctgaacagaaaacaaagagagaatgagggaaattgctattttatttgtattcatgaacttggctgtaatcagttatgccgtataggatgtcagacaataccactggttaaataagcctattttcaaatt

SEQ ID NO: 189522 - DNA, 1234 bp, Homo Sapiens
ttggtcatgagtctcttcaagaggtcgacggaggagatcatcgccctcttcatttccatcacgtttgtgctggatgccgtcaagggcacggttaaaatcttctggaagtactactatgggcattacttggacgactatcacacaaaaaggacttcatcccttgtcagcctgtcaggcctcggcgccagcctcaacgccagcctccacactgccctcaacgccagcttcctcgccagccccacggagctgccctcggccacacactcaggccaggcgaccgccgtgctcagcctcctcatcatgctgggcacgctctggctgggctacaccctctaccaattcaagaagagcccctacctgcacccctgcgtgcgagagatcctgtccgactgcgccctgcccatcgcggtgctcgccttctccctcatcagctcccatggcttccgggaaatcgagatgagcaagttccgctacaaccccagcgagagcccctttgcgatggcgcagatccagtcgctgtccctgagggccgtcagcggtgccatgggcctcggcttcctgctgtccatgctcttcttcatcgagcagaacttggtggccgccttggtgaatgcaccggagaacaggctggtgaagggcactgcctaccactgggacctcctgctcctcgccatcatcaacacagggctgtctctgtttgggctgccttggatccatgccgcctacccccactccccgctgcacgtgcgagccctggccttagtggaggagcgtgtggagaacggacacatctatgacacgattgtgaacgtgaaggagacgcggctgacctcgctgggcgccagcgtcctggtgggcctgtccctgttgctgctgccggtcccgcttcagtggatccccaagcccgtgctctatggcctcttcctctacatcgcgctcacctccctcgatggcaaccagctcgtccagcgcgtggccctgctgctcaaggagcagactgcgtaccccccgacacactacatccggagggtgccccagaggaagatccactacttcacgggcctgcaggtgcttcagctgctgctgctgtgtgccttcggcatgagctccctgccctacatgaagatgatctttcccctcatcatgatcgccatgatccccatccgctatatcctgctgccccgaatcattgaaccccaagtacttggatgtcatggacgctgagcacaggcct

SEQ ID NO: 189523 - DNA, 800 bp, Homo Sapiens
ccaactttgtacaaaaaagttgggtcaggttacctactatcttaaacactgagtcagaaaatcattactgtatagaagttgctttcctgatcaagtctgaacttcagctagtgctagagaactattttctatgacttaactctaaccaagttttattttaagctgtttctttgatagaagggccatgaaaatagagtaatgatatagtaggagataagggattggtttggtctttttcaataaagatagaagttgctgaagttttctgaattaataatgacttagattgtgaccttttagattcggtgttgagctctgtgttgtattacttcctaaaagataatgcttaaacattaagcattagtgtgctcttcatgttaatatggcagagttttgtaaactaaattaaaacttactgatatattggactttgagccaagggaaagaatgagtactatctttccagatatcttaagggtaaaagcttattctaagacagtctgtccattgagaatattagatttctgacttgcaaatatgtttgtactccagaagaattagaggaaaagcagatactagaattctaatttaattacatatacagccgtctttgtttatagtgtagaattctttatattttgtacaaaaactaattcttttggtaaaatgaaccatttacagttcggttttggactctgagtcaaaggattttcctttaaatgcttgtctcaattttagtctggtcttttgtacttttcttcagaagaaatgaattaaagggtacagttgcataaagtggg

SEQ ID NO: 189524 - DNA, 564 bp, Homo Sapiens
cccggcgggcccggacctcgcgggcaggagggcggcacggccattgactcgggtggcggcggctgcggcggtgggggcgccgtcccggccatgggcgcccgcggcggcctgcggagctggaggcgcggcgccggccgccaggcgcctttgtgagcggcgcggacgacaaaggcgcgggcccgggcagccgaggtgtgtagctgggacggtgctggtctgagctggaccttgtctgatggcttcctccaaccctcctccacagcctgccataggagatcagctggttccaggagtcccaggcccctcctctgaggcaaaggacgacccaggagaggcgtttgagtttgatgacagtgatgatgaaaaggacaccaacgcagccctgggcgtccccagccttgctcctgaaagggacacagaccccccactgatccacttggactccatccctgtcactgacccagacccagcagctgctccacccggcacaggggtgccagcctgggtgagcaatggggatgcatcggacgcagtcttctccggggcccggcactccagctggaa

SEQ ID NO: 189525 - DNA, 1075 bp, Homo Sapiens
  misc_feature (840)..(896): n is a, c, g, or t
caatgctttcctttaatagccaactttgtacaaaaaagttggcagggagaaggacaaggcatacagcttattgattagagctggcaagcatctgctcattatgtttggaattgctttctataagaaaattgcccactactactaacttgatcaacaatgaattcaaaatagttaacctatgaaataacatcctctcaaatgtttgctgatgaagtacaagttgaaatgtagttattggaaaagtctgtaacctgtggatcatatatattcaaagtgagacaaaggcaaataaaaagcagctattttcatgaatagacaaagttgatttcaggaagtataaattatattctgcaccgaacaaggaacagaaattattgcatctgtggaacatatatctggagttactatactttactgaagagcaaggcataaatttagactaaaatccatccagattacactcattctttaggctactcctggatacttcatttaaatttgattttcgaggtagtgagatgtcggcaaggtttgtcctgtatattaggaataaaggaaaagttctaaactgcctctgcaatgacttgtagtcagtggaagagtatcactttcccctgatcatgaccactaaactgtaaattgatataaattagttttctctcgagttacacccaagtaatgaagacttaagagaaccttggttgaaataaatttccaatagtttggagactcataaataccatgcaggtgtaaccactgccaataggctgtttctatgcttatttcctattttgatttttactttgaagataggaatatctaaattatatctctagggannnnnnnnnnnnnnnnnnnnnnnnnnnnnnnnnnnnnnnnnnnnnnnnnnnnnnnnnctgatttcagaaagtctcaactaccaaatgttttcaatatattagtttttgagatgctaggattatactgtgattcttatgttttatagtaaagtctggaaagcaaaaggatagtttttttagcctggaaacttatttatgttgctttggtgaagtcttctatcattttttaaaaattt

SEQ ID NO: 189526 - DNA, 1126 bp, Homo Sapiens
  misc_feature (330)..(350): n is a, c, g, or t
ttggatttacagctttggtgtggttttactagaaataataactggacttccagctgtggatgaacaccgtgaacctcagttattgctagatattaaagaagaaattgaagatgaagaaaagacaattgaagattatattgataaaaagatgaatgatgctgattccacttcagttgaagctatgtactctgttgctagtcaatgtctgcatgaaaagaaaaataagagaccagacattaagaaggttcaacagctgctgcaagagatgacagcttcttaaaactttattggaaaagactcttgactttttatatacacctatctcaaccnnnnnnnnnnnnnnnnnnnnncctaaatattcttctttacctttaacaaggcataggctgttgcaggacagtggttattaaagcatgggttgaacttccaaaatataaaaatagagccaccatatcaacacttagccctacccattagtatcacccccagttcttacagtaatccctgagaaatctccttcaagcatcaccaaacacagtttgaaaattacagggttagcaaaaagagcctgggctgtatgtagggtggaaacactctgatctgaagcccagctgactccactactaatttgctgtaaagctttggacatacacttagctgctgtgagccactaataacattgggctaatatctgctgtgcttctctgacaggtagtcatgaaaatcaaatgatgcaaaatatatacaagcactttgtaaattgtaaaatgatacaaaatttaaagtttatagagccagttacaaaatcctattagtcatatatttatagattgtgttcacagcaatcatttaaccacaaataaaatatcccttgatgatactgccataatgatatgtccattattagattatgttacatgacaaagttgaaggaatttggcagatgcagttaaggttcctaaacaactcactttgagactgttgaaagggcctgacctaatcaagtgaacccttgcaagaagaaattctccttgtaagctttgaagaagtatgtgagagggccacattggctaaaacctaaaggtggcctctaggagatgagacctaccttcccagttgtcagcaa

SEQ ID NO: 189527 - DNA, 720 bp, Homo Sapiens
ttggctcctggccaccacagccaagccatcagtacccagtgctgacagtgagacacccctgacccaggacaggccaggcagtcccagtggctctgaggacaagggcaacccggcgccggagctgagggcctcctttctgccacgtaccttgtctctgcggaactccatcagcaggatcatgtcggaggcaggcagtgggaccctggaggacgagtggcaggccatctcggagattgcctctacttgcaacaccattctggagtcgctgtcccgagagggacagcccatcccagagagtggagaccctaagggaactccaaaatctgatgctgagccagagcctgggaacctctcagagaaggtctctcacttggagtccatgctcaggaagctgcaggaggacctgcagaaggagaaggcggacagggcggccctggaggaggaggtgcggagcctgagacacaacaaccggcggctgcaggcggagtctgagagtgcagccacacgcctcctcctggcctccaagcagctgggctcacccaccgccgacctggcctgagccgtctggaaccacctgggcccctgagggcactgtggtcacactgggccctcctcaggaactctccctgcgcagaggcgtgtcttagcactgcccccctccctagccccttatttggtggcggaagtggccctccacccctcccctgtttgtaaatattc

SEQ ID NO: 189528 - DNA, 1134 bp, Homo Sapiens
  misc_feature (994)..(1027): n is a, c, g, or t
ttggagactaacttccccatttttcacaagaggaaaccatccttatgacttaccttaaagttttttgttctgttttgaaggaaaccatgtgcttcatgaaacctacagttgacaagagaatgtacagctaagagaaaagcttaagaggccacactattcgcggaatggctttagaggcagatgaagtggtctttgaccacagttgattgaaccagagcacttattgcttaaagaataacagagttctagagctgggggttcttgggccatgctccgtgtgtggataaggaaagaaatactgtttctgggactctcccacagtcacaaagctgttttcactgtggcccctacatctcttaacttttgctattactcctatgctgccttccggattactgctgtctatcttcttgctccactcactgaagatcctattataatcccatgaaaatgtaaattacagtttacttgggagagccagattttctctgtgctcttgagttttttattcattcaagaaaccttgggccaccgctttgtacatagcaccgtgctaggctctgggatcccaaatggacccttttaactttctgaagatgggaccgtcccctggaggaaagtcattcctgcctaatccatcgagagaaagaggcttacgaaaaactttgcctctgatgctcagccccacccccaaatagcacaagcttgttaaccccacctcttacaaaatgtttagattctgtaggtgttaaaagcctttctggaagtattgcattctgccgtgtttataggtgttcactttcctccagagctgattaactactgacatgacttggctttctcatccagaaattatggaaacagggtctgtcagtggcaggaggccgtgctgtgttttacttggatgacacaatgcagtttacttgcctcttcatacccatgcatgctgctcaccctagacaatgacatataagccgtatatagatcaatgtcnnnnnnnnnnnnnnnnnnnnnnnnnnnnnnnnnnaagtgtaacaaggaacactaaaacagtgttgattcttgtctctgaagacaaataattaaaccttttttttcccaactaaagaatggatttaattaaactatgtattg

SEQ ID NO: 189529 - DNA, 934 bp, Homo Sapiens
ttggggacacctggaccgccgcgccgaggctccccgcgctcgctgctgccgcggcccgcgccatgccctcctacacggtcactgtggccactggcagccagtggttcgccggcactgacgactacatctacctcagcctcgtgggctcggcgggctgcagcgagaagcacctgctggacaagcccttctacaacgacttcgagcgtggcgcggtggattcatacgacgtgactgtggacgaggaactgggcgagatccagctggtcagaatcgagaagcgcaagtactggctgaatgacgactggtacctgaagtacatcacgctgaagacgccccacggggactacatcgagttcccctgctaccgctggatcaccggcgatgtcgaggttgtcctgagggatggacgcgcaaagttggcccgagatgaccaaattcacattctcaagcaacaccgacgtaaagaactggaaacacggcaaaaacaatatcgatggatggagtggaaccctggcttccccttgagcatcgatgccaaatgccacaaggatttaccccgtgatatccagtttgatagtgaaaaaggagtggactttgttctgaattactccaaagcgatggagaacctgttcatcaaccgcttcatgcacatgttccagtcttcttggaatgacttcgccgactttgagaaaatctttgtcaagatcagcaacactatttctgagcgggtcatgaatcactggcaggaagacctgatgtttggctaccagttcctgaatggctgcaaccctgtgttgatccggcgctgcacagagctgcccgagaagctcccggtgaccacggagatggtagagtgcagcctggagcggcagctcagcttggagcagagtccagcaagggaacattttcatcgtggactttgagctgctggatg

SEQ ID NO: 189530 - DNA, 955 bp, Homo Sapiens
  misc_feature (320)..(424): n is a, c, g, or t
  misc_feature (489)..(620): n is a, c, g, or t
ttggcactgcttttccatcaagggagcaaagaataagtgggagttttggaagagtttggatgagagacgccaaggtgcccagcgttcgtaaggcaacatgcagcctggcgtgaagcagtattttgaaactgcaaatggttcccttcttgtgtcctttcaatgctgaatattttagtgtcattctgcctgtgctcagagctccagcagcagaagtgtgtgtggttaattaggacacttctgtgagaggacccctgcacacattacgacaggtccctaaatgagcatttcccaaactaggttccccgaggcactctacggannnnnnnnnnnnnnnnnnnnnnnnnnnnnnnnnnnnnnnnnnnnnnnnnnnnnnnnnnnnnnnnnnnnnnnnnnnnnnnnnnnnnnnnnnnnnnnnnnnnnnnnngttcaagcgattctcccgcctcagtagctgggattacaggtgcccaccactgcgcccagctaaannnnnnnnnnnnnnnnnnnnnnnnnnnnnnnnnnnnnnnnnnnnnnnnnnnnnnnnnnnnnnnnnnnnnnnnnnnnnnnnnnnnnnnnnnnnnnnnnnnnnnnnnnnnnnnnnnnnnnnnnnnnnnnnnnnnccaaactactttttaaaacagctacagggtaaaatcctgcagcacccactctggaaaatactgctcttaattttcctgaaggtggccccctgtttctagttggtccaggattagggatgtggggtatagggcatttaaatcctctcaagcgctctccaagcacccccggcctgggggtgagtttctcatcccgctactgctgctgggatcatgttgaatgaatggaactcttcctgtctggcctccaaacagcctataagctgaggggctgtgtttgaagggacctccaccctggggaaatccgaggggctggggcagggtttctgacgcccaac

SEQ ID NO: 189531 - DNA, 675 bp, Homo Sapiens
  misc_feature (601)..(623): n is a, c, g, or t
tcatcgggacactggccctcagatacttccgcatgcgggaggataatctgtcccaagggtacctcttctgtcagcttctgtaacaagcgggcctggtaagcagggggatcctctccagccaaaggctgggggcgtacgtgcaggtagcgctcagtggccgtctccagctcttccacctcatacaaggtggctgggtccagcgagtgggcattgatgaggctcacaagatactctttgtagtgtgcctggcacaggccggcatagccagctggagtttccttgccacaagcttagtccctgagcccattgggaacctccttctgctctatcactcggcagccgcctaaaggtgagggaagaagggagcctctgttgggaggccaatgaccacaaagctccagaactgggatatccacaaggcagggaaggcagcctccaaggaagggaccgagcacagcaactcctgctttcccagtggtgctggtgggtactcagaggtgccgtcaacggcagaccatctgatacagaggcagggaccttgtccctacttttatccaagctggcttttggctcataaacacataccctcttgagatagtgnnnnnnnnnnnnnnnnnnnnnnnggttgttatttatctcttgactagttaacttattatcggaagatcttacctc

SEQ ID NO: 189532 - DNA, 1626 bp, Homo Sapiens
ccaagcaccacaaatctctcctggcccagagtccctttccccctttttggccgttcgtgggacacctcagagtccccaaggaaggctgtgctgatagcctcactcaacccagcttttcaaagttctgcaggaggcaaagggcaagcccagagattagggttagagaccaaagacaagcggtcgttacccctaatatccaaggggaggggacgggagggggctttttgtaaaaatgcccctgaggtatagaaccggcaggcaggcaggctcggaacaaaacaccctgaaccagccacgaagactgctgctcccagactcctttctgcttcagtggtagatgaggccagggcagagggttttcatcatgtagctatgaaaggaagcccccaacccggtcagtcaggcaatgaggggctgtctgaagcacaactggaacccctcacaaaggccatgtctgtccgaaacttcatgctggtgggtggctggcggcggagcagagactccgtctggtcttggggtagaggctcatcatagatggtggagatgagccccaagccatttctacggggcctcttcagttgcccaaatggctgtagcttctctccatggtaccccaatccacgcttgcatctggggtgttggccatcactatccagggcctcaggcacccctgagcacctgcagcccaggccctggccctcagcccagccctgccgctccatcaccttccgcccaatgcccttggtgtggcgctcaaaggtgcccacctggcgttcgatcacagagccatcttcctgtccatctcggagtctctgttccagacgcatttggacagagtctcgggcatccttgtctccaccatcctgtctcagcctttgctagctctggtaaagtgtcactgcaaggccagggcacctgtttcacctccagtattgccactccttgcccagtacctctgtcatagtacacactcatgtccacatcccagtcatcggctgtctgttcatcaaaatctccttcttcctcctgccagaactgggcatcagtataaaacaccaggccagagccacccttctcccacttgagctcaatctcctcctcaaagagctgctcagtggtccgctcctgcccggtcacgtcctcatgcagcgcttcatgccgttcccattcctcaccccggtcatcgtcctcatctgagtgagactcttcttcctcttccttccccacttcttcctcaggctctccacaggggctggctggtatatctgccaggtaggttccttggggtatttcttcaccctctgctgtatacacaagctcttcctgctccacagtctctgagtcctcatactcaaaaggcacattgccgtagcgccgggaggaacctgtcttggggaactggagctgcagctgggtgatgatccgagggggtaggcggcaggcccggatcaactccaaaaagacccgcaggggagtccccacattccctctgggcatcagcactggtgggttcagctccggcagttgcttcaggtcagccagggtgaaggcttcattctctgccttccaactctgcagttccttccgggtcgttgaagggaaagccaacttttttgtacaaagttg

SEQ ID NO: 189533 - DNA, 1371 bp, Homo Sapiens
  misc_feature (836)..(879): n is a, c, g, or t
  misc_feature (933)..(971): n is a, c, g, or t
  misc_feature (992)..(1027): n is a, c, g, or t
ttggcatttagttaatgctggcaaatactccacaactttcttcatggtgacgtttgcagccctttacagcactcacaaagaacgaggtcactcggacactatggtgttcttttacctgtggattgtcttttatatcatcagttcctgctataccctcatctgggatctcaagatggactggggtctcttcgataagaatgctggagagaacactttcctccgggaagagattgtatacccccaaaaagcctactactactgtgccataatagaggatgtgattctgcgctttgcttggactatccaaatctcgattacctctacaactttgttgcctcattctggggacatcattgctactgtctttgccccacttgaggttttccggcgatttgtgtggaacttcttccgcctggagaatgaacatctgaataactgtggtgaattccgtgctgtgcgggacatctctgtggcccccctgaacgcagatgatcagactctcctagaacagatgatggaccaggatgatggggtacgaaaccgccagaagaatcggtcatggaagtacaaccagagcatatccctgcgccggcctcgcctcgcttctcaatccaaggctcgtgacactaaggtattgatagaagacacagatgatgaagctaacacttgaattttctgaagtctagcttaacatctttggttttcctactctacaatcctttcctcgaccaacgcaacctctagtacctttccagccgaaaacaggagaaaacacataacacattttccgagctcttccggatcggatcctatggactccaaacaagctcactgtnnnnnnnnnnnnnnnnnnnnnnnnnnnnnnnnnnnnnnnnnnnnaaaacaaatatttacttcatttagaaaatttttatcaattaactgacaaatagnnnnnnnnnnnnnnnnnnnnnnnnnnnnnnnnnnnnnnnagcttccaaaatgtgttcccnnnnnnnnnnnnnnnnnnnnnnnnnnnnnnnnnnnnctgaaaaaatcatacaactttgtgcttctattgcttttttgtgttttgttaagcatgtcccttggcccaaatggaagaggaaatgtttaattaatgctttttagtttaaataaattgaatcatttataataatcagtgttaacaatttagtgacccttggtaggttaaaggttgcattatttatacttgagatttttttcccctaactattctgttttttgtactttaaaactatgggggaaatatcactggtctgtcaagaaacagcagtaattattactgagttaaattgaaaagtccagtggaccaagcatttcttatataaataaaattggtggtactaa

SEQ ID NO: 189534 - DNA, 825 bp, Homo Sapiens
ttggcaatcttccaaagaggctagaacgtcagataaacatgattccactcgtgcttcctcaaataaagacttcactcccaatagagacaaaaaaactgactatgacaccagagagtattcaagttccaaacgtagagatgaaaagaatgaattaacaagacgaaaagactctccttctcggaataaagattctgcatctggacagaaaaataaaccaagggaagagagagatttgcctaaaaaaggaacaggagattccaaaaaaagtaattctagtccctcaagagacagaaaacctcatgatcacaaagccacttatgatactaaacggccaaatgaagagacaaaatctgtagataaaaatccttgtaaggatcgtgagaagcatgtattagaagcaaggaacaataaagagtcaagtggcaataaactactttatatacttaacccaccagagacacaggttgaaaaagagcaaattactgggcaaattgacaagagtactgtcaagcctaaaccccagttaagtcattcctctagactttcctctgacttaactagagaaactgatgaagctgcttttgaaccagactataatgaaagtgacagtgaaagtaatgtttctgtaaaagaagaggaatcttcaggaaacatttctaaggacctgaaagataaaatagtggagaaagcaaaagagagcctggacacagcagcagttgtccaggtgggcataagcaggaatcagagccacagcagccccagcgtcagccccagcagaagccacagtccttctggaagccagacccgagccacagtagcagtgcc

SEQ ID NO: 189535 - DNA, 1407 bp, Homo Sapiens
ttgggtgtatatgtagatgtatgcacacacatatattatttgcagtgcagtatagaataggcactttaaaacactctttccccgcaccccagcaattatgaaaataatctctgattccctgatttaatatgcaaagtctaggttggtagagtttagccctgaacatttcatggtgttcatcaacagtgagagactccatagtttgggcttgtaccacttttgcaaataagtgtattttgaaattgtttgacggcaaggtttaagttattaagaggtaagacttagtactatctgtgcgtagaagttctagtgttttcaattttaaacatatccaagtttgaattcctaaaattatggaaacagatgaaaagcctctgttttgatatgggtagtattttttacattttacacactgtacacataagccaaaactgagcataagtcctctagtgaatgtaggctggctttcagagtaggctattcctgagagctgcatgtgtccgcccccgatggaggactccaggcagcagacacatgccagggccatgtcagacacagattggccagaaaccttcctgctgagcctcacagcagtgagactggggccactacatttgctccatcctcctgggattggctgtgaactgatcatgtttatgagaaactggcaaagcagaatgtgatatcctaggaggtaatgaccatgaaagacttctctacccatcttaaaaacaacgaaagaaggcatggacttctggatgcccatccactgggtgtaaacacatctagtagttgttctgaaatgtcagttctgatatggaagcacccattatgcgctgtggccactccaataggtgctgagtgtacagagtggaataagacagagacctgccctcaagagcaaagtagatcatgcatagagtgtgatgtatgtgtaataaatatgtttcacacaaacaaggcctgtcagctaaagaagtttgaacatttgggttactatttcttgtggttataacttaatgaaaacaatgcagtacaggacatatattttttaaaataagtctgatttaattgggcactatttatttacaaatgttttgctcaatagattgctcaaatcaggttttcttttaagaatcaatcatgtcagtctgcttagaaataacagaagaaaatagaattgacattgaaatctaggaaaattattctataatttccatttacttaagacttaatgagactttaaaagcattttttaacctcctaagtatcaagtatagaaaatcttcatggaattcacaaagtaatttggaaattaggttgaaacatatctcttatcttacgaaaaaatggtagcattttaaacaaaatagaaagttgcaaggcaaatgtttatttaaaagagca

SEQ ID NO: 189536 - DNA, 1179 bp, Homo Sapiens
ttggggagcagcagcatcacgctgacctctgcctgggatgtaaaccggaccagccgctgcgggcaaaggaaggctcttggctccttcgggaaacccagccccgtcaccgggctccgagcggctcgcaggcgagcgacagcggcctcagccccggcagcgcccagcggcggctgcggaaagcggagggagtccgacgcgggcgcgggcggggagcgtgcgtccgttcgcacaggcagcgggaggaggggcggcgcgaaccatggccggggacagcgagcagaccctgcagaaccaccagcagcccaacggcggcgagcccttccttataggcgtcagcgggggaacagctagcggcaagtcttccgtgtgtgctaagatcgtgcagctcctggggcagaatgaggtggactatcgccagaagcaggtggtcatcctgagccaggatagcttctaccgtgtccttacctcggagcagaaggccaaagccctgaagggccagttcaactttgaccacccggatgcctttgacaatgaactcattctcaaaacactcaaagaaatcactgaagggaaaacagtccagatccccgtgtatgactttgtctcccattcccggaaggaggagacagttactgtctatcccgcagacgtggtgctctttgaagggatcctggccttctactcccaggaggtacgagacctgttccagatgaagctttttgtggatacagatgcggacacccggctctcacgcagagtattaagggacatcagcgagagaggcagggatcttgagcagattttatctcagtacattacgttcgtcaagcctgcctttgaggaattctgcttgccaacaaagaagtatgctgatgtgatcatccctagaggtgcagataatctggtggccatcaacctcatcgtgcagcacatccaggacatcctgaatggagggccctccaaacggcagaccaatggctgtctcaacggctacaccccttcacgcaagaggcaggcatcggagtccagcagcaggccgcattgacccgtctccatcggaccccagcccctatctccaagagacagaggaggggtcaggaggcactgctcatctgtacatactgtttcctatgacattactgtatttaagaaaacaccatggagatgaaatgcctttga

SEQ ID NO: 189537 - DNA, 1754 bp, Homo Sapiens
  misc_feature (1505)..(1533): n is a, c, g, or t
ttggcgatttaacaacccctacttctggccccctcctcccaccatgcccagccagctggacaacctggttctgattaacaagatcaaggagcagctgatggccgagaagatcaggccgcctcacctgccgcccacgtcggcctcgtcgcagcagccgttgctagtgccgccggcacccgccgagagcagccaggccgtcatgtcgctgcccaagctgcagcaggtgccggggctgcatccacaggcggtgccgcagcccgacgtggcgctgcacgcacggccggccaccagcaccgtcacaggtctggggctgtccacccggaccccgtctgtgagcacttctgagtcaagcgcgggcgcgggcacgggcacgggtaccagcaccccgtccacacccaccaccaccagccagagccgcctcatcgcctcgtcccccaccctcatctcagggatcaccagcccccctctcctggactccatcaagacaatccagggccacggcctgcttggcccccccaagtccgaacgcggccgcaaaaagatcaaggcggagaacccggggggtccgcctgtccttgtagtcccctatcccatcctggcctcgggcgagactgccaaggagggcaagacgtacaggtgtaaggtatgcccactgacctttttcaccaagtcagagatgcagatccactccaagtcgcacacagaggccaagccccacaagtgcccgcactgctccaagtcctttgccaacgcctcctacctggcccagcacctgcgcatccacctgggcgtcaagccctaccactgctcctactgtgataagtccttccggcagctctcccacctccagcagcacaccagaatccacacaggcgacagaccctacaagtgcccacatcctggctgcgagaaggctttcactcagctctccaacctccagtctcaccagcgccagcacaacaaggacaagccctacaagtgtcccaactgctaccgggcctattcggactccgcttctttgcagatccacctctcggcccacgccatcaagcacgccaaggcctactgctgcagcatgtgtgggcgggcctacacctcggagacctacctgatgaagcacatgtccaaacacacggtggtggagcacctggtgagccatcactcgccccagaggacggagtcccccggcatcccggtgcgaatctctctcatctgagcccactggaggcgccgccccacccggcccactggcagacacagacccaggcagcaccaggccccagctccctccgggggccctccaggaaccaccaagctctctcacgaccttcccaatcttccagaaagcttggtccgcagaagccctgcctggtccagtccgggggcggccaggccaactgcaagattctggactgttttggtggcatccaaagacgatctcagagcactttgaacctctctgttgagttttctttttgttccccacccttcacttgcttcactgnnnnnnnnnnnnnnnnnnnnnnnnnnnnnaagtttgttttggaaataacagaaaagatatttattggccaggaagttggtgctgctaagaccgagaaatttaaagaatcggacagatggacgcagagaaccagagggcaatgtgggaccttctcttgccatggcctcaggtcttgagggaaggctcgggcctaggtttctggactgcaaaggggaccctcggtgggaggggcaagaagcagccggagtga

SEQ ID NO: 189538 - DNA, 873 bp, Homo Sapiens
ttggctccagtcctcactgcccagaccaaccccttcctcagcctgtcgggagcagagggcagtggcggtggccccaaaggagggaccgctgacaaaggagcctcagccaaccaggaaaaaggctaaatccacccttacccctcctgacccccccaagtggagggaacagatcctggcctgaggggtcctagcctggagcaggcgcctgcgcccagaccctggagagccttgacccagagcctgtgctgaggtccagggagtgtggagagctcctggtgtcgaggactgagactgacaggggagccccctccatctggcccccttccctttccgcactgtccgctttgtgaggctcagaggaaggacagtctgcaagcccgcctaggaggtccatccccagcaaatgttttggaggtccccccagagagcagagtgggccatggcagaagtagggggttggttggacctgtcacatgaaatggatcagcacttgaatggggagaagtggagggagaggccctgggcctgtccctgcggggaaatcttttatggaagaagggctggacccactttacctgcagtttcttcccagctcgggcagatggcagaagggaccccttggactttttctcgccatccctccccccagcgcaggggcacaagctgagcttgtaaaagcccacagatgttgggggctggagaaggggcaggagagcatcacactcagccccagcctcctcaacctcttggggccccgtgatggggaggagagggcaggtgcggggaggctctggccttccttggtgccccgccctttgtttgcactattggacttaggagtgccgagggtggggagatggagctgcccgtctc

SEQ ID NO: 189539 - DNA, 1571 bp, Homo Sapiens
  misc_feature (269)..(277): n is a, c, g, or t
gaattcgtctgaaaatgctcaggtttgtaagaatctaatctcacttacataactaagcactccataataagttttattaagtacaaagggagccagaaaaaatgacatttatttcttctagatcagaaaaatttaaattaagccctgccttgctgtttagaaatatgtgggcattgttataatttattcaataaatttatgttcctttgccttcctgtggaaacagttttatcccactaaactaggaattaggggataaatcacaaacnnnnnnnnngttgcagcactgaaaaaaagtaatttattgtttttgcaactggtatgtgaatttgtgtgataaaattatttattcttatttaacaaaaatatgttcaaatttttctatatttaaaatgttttgctgttgtcctactttttaatttatgcttcatgtttgtgtataaagtacacttttacactttgtgagtttacataatatacagcactggttgcttttgtatttttttacagaaagctttctgtgtgaagcaggtgtatatgtatatattcctcatgtattcttattctgatactatcatttttctttccaaggaaattttaatctgtcatgaccaatagtgttcattacttgtgcctatgataataggtcttttacatcacattaacactaatttttccaagtcacaaataagaaaaacacttattcaatgaaacaaggtgcaagttttaaatttgggtacacaaatagcctagaagcttcctacagacgctaagacacagccaataatcagatcctttcacttcatcgagaaacttggacaagtcgatattgatgtattagatgaaagttgtctacacacaacttctgagggatacaaacgataataaaaccaaatgttgtctgtttctcctttagaaacacctcctaaaattaatatcatttagtctctagtgtctgtaggattctacagatgagcacaaatagattgggtttgtataacaaatgctaatagtcataactgtttctacaaatatggggtgtccattaagagaatgtgatgttttcctactgctgttgaatcccatggggtgattataggacttgaaataggcagagtcacctctgatgacatcagcttgcctctgtgatttcacagtctgatcctggcaacaagacaaagcactcttggacacacagccaatctctggttgtgatatttccccattgattccttccttgttaacaaggtcattttaatggttcaggtgaggacagcagccagattcaaagtccagaatttgtgctgttacatagagttcacactgtcaaataacattgaatttaataatgatcaaatttttctagtagtctttggcagagtgtataatctcattggcatgattggtgaatattactaatctctttataatgaaagatgctttacaaataccttatatttgctaacatttcaaaactactaaataaatgaaatagccatgtgtacagaaatggtcatttaaagctttaatagaaccaaattcaagacatgtatcatttagacacacagaaa

SEQ ID NO: 189540 - DNA, 931 bp, Homo Sapiens
ttggtccccccaggtttttcgcgtgggggagggggcacgtctcggcgagtcacgatgatggcggccaccatcctgtggtgagctagcggattccctgcttgtctcgccgaccccctcgcgccttctgcagactccgtggctggcgctcggcgcgtgaggaagcacggcggcccgagttcgcggggaaggccgcagtcgcggaggcagcggcgcggtccggggcacgggctgggggagaggccgctccgctgggcgaatgtgacaagcccccacccccaccgccttcctccccagagcgcgaggagcgcgggcgaccccggggccccgccaggccacagaccccgcccagcggccagcacccggcgcaggcccggcagccgagctgcgcggcggcaccatgcaggtcaccctgaagaccctccagcagcagaccttcaagatagacattgaccccgaggagacggtgaaagcactgaaagagaagattgaatctgaaaaggggaaagatgcctttccagtagcaggtcaaaaattaatttatgcaggcaaaatcctcaatgatgatactgctctcaaagaatataaaattgatgagaaaaactttgtggtggttatggtgaccaaacccaaagcagtgtccacaccagcaccagctacaactcagcagtcagctcctgccagcactacagcagttacttcctccaccaccacaactgtggctcaggctccaacccctgtccctgccttggcccccacttccacacctgcatccatcactccagcatcagcgacagcatcttctgaacctgcacctgctagtgcagctaaacaagagaagcctgcagaaaagccagcagagacaccagtggctactagcccaacagcaactgacagtacatcgggtgattcttctcggtcaaacctttttgaa

SEQ ID NO: 189541 - DNA, 1460 bp, Homo Sapiens
gcttttcttgagcatccgacactggcccagctgggctggcaggcggtccaagcagttcccttcagctccagctgagtgagctgggagagctgaccaactttctctgggagtgaggtgatgcagttctgtcccagattcaaagtcctcaactttatgcatttaaacaattgtttggcagaatgtccactttgttcccagtgatatgcaaatgctgcaggttctgaagcaatcctatttctattggaatcattgaaatgttgttgtagctcacatctaagcatctgagtttctgtaaactaaatactgccactggtaaggattcgagcttgttgttagagaaataaagtgactccaagtttttgacatgggtaatagagggaggaatagtaacaattttgttatgccataattttaaacaagtcagtcgttttaaatgctggaaactgatgatttcctcaattgtgcgaatgttattggactttaaatccagttcctgtaaattagagaggctgaaaatagcatgtgggattctctctagctcacagttctggagttccagctcagcgacattcatcattttcttaaggctgttcagtaccaagagtttagtgccgtcattatgaatgactaactttgtaagatgtggagccacatctgtaatgttggagggaactttggtcaaattgctcttcacgtggagaatcttaaggtgccgcaactctcggagagattcaagtcctatcatcttattgttttcagagttcaaattgcctattaagtacaactctcgaaggtttttgagcaaatacacccaggcaggaatttcagccacatcagtgaacttcacgtgaaggcatctcaagtgatcgcgaagaaagctaaaagcagtctgttcaacttttgcagggcagtggcagaggtggagctcttggaggttagtcatttgagaaatcttagcaggaattttagcttctggaattagttcaagctttagcacatccaggtctgtgaggtcaaagacagcatcgggcacccccgacagcatgaacagatgcaactcctgcttgtcctgggcgttgcgtgaaatgtgctgcctgagtttttcaaatgtccactcatggttcaaactaatttccctaagtttattttcactaacttctgacaagaacacaccaaaacgcttggaatatagctggtcatactggtctaccatgtgaagaaggaacgcaaaatcgtttttgacatctggaatgtcactaaaactgctctcttctctgactttttcgaaagaatattccttcaaaggtatcctgaataaccagaagagagtgtagaggcagataaagccataaacacaaataatggatatgtaactgatgagaagctttttcaacatgtaagccatattgtgggtgcactcaaatacctcataaccaatcagatgctcaactttgggccaa

SEQ ID NO: 189542 - DNA, 1377 bp, Homo Sapiens
gtaacattctttaacttttaagaatgcctttctatagacagtatctgaattagacatctagaaattagtgcaatagaagatccaatataactttatattactttacagttaacaaacctttacacatagcacagaccctgttcagaaacgttcctatatatttacaaacacactgttgtacatatatacatgttaacaaaatacagggcaatctaaaaattagattcatctcagtacatgtttttaaacgttatttaaccaatacctttaaaaattatttcccataatctaaaataactccctgcctcacaaattaatacgatttccatttgtacttttcctcatgaggatttactttccctcattccttgacaacttccccaaacccgactccggttctgcctccatcgtcagctgagagctgggcctctttcctcctggtgggtctgcgctgtgtcgggagcgcccatctcagcagcggggcttcaggagtccagctccagctgctctcggttttcgctgagtcttaacataagctgctgttcatagtagaggctctttgcgtagtttatttcttgtgacaacttgacagcaaggacctcagatttcacatggaccatgggcttctggtgggaggggccggggatggacactccactgctcgtgctcacggctttcttggtcacctgcacatacaccttcccatggtctttggagacaaggcagtggtagaggtcatcgtatttgacttctaggaaaatggcttctcgatccacgtagtctccacttttcaggaagtaaacagctttggaggagatgagcacgcagtagctgtcaatgttctccacagcgatgaagaattcgtcctgtatgttgtctgtgagtttgaagagctgctcctgtccttccgcctggctctcagaatatcggggaagcagcccctggggccccgtgcagcaacgcggtttccgaaccctctgtgcttgagtcctggggccgctgagtgtggctgtgtctctcaccgcctgggctgtttctgatgcaaaatccagggcgcctgccactggcttggttacagtgccaacaagcccttttccaaggccagatatgaaaccgctgacacccccttctgttttcacaccttccactgtcgaagttataacactggtcagtccaccaatgataccatgagccaggccatggatgccggctacaaggtgttcaccacttgtggctgcatggtacctgatgtactcccgctctgactgatgccgattgtccatcgtcttccctaagccatctgataatgttccagcaaacttggcagcagagtttgatactccgtgtgtaacatttctgatgaggcccccgacccaa

SEQ ID NO: 189543 - DNA, 1252 bp, Homo Sapiens
  misc_feature (798)..(893): n is a, c, g, or t
ccccagcactttccaggccagcacagtctggcactacagactacagggctggagacaccaggcttggaagtgaccactggccaagagctgacataaaagccaacttccccaaacaggaagggcttgttcttcacaaagataaagaaaactgccagcattttgctggccttaagaagccatgcaaaattaaccagtacatcatgaattaacttcttttactctgctgtgcactgaataccattatgaagcaatatacttttggattaaaaataagcatttttgtggaaaatctgctacatgttttcataaaataaagtgctatgatgtactaaaacctcacattgccttctcgtaattttatttttatcacaagaaggaaatacatagtgattcctgaaccggaagaatgaaccccatcttccaactgtcacggaattatcaccaacatattcaaaagagaaaaaaataaaaccaattgttgatatattgagtccccttgatgtgaatagctcaacataagtatcttattcaggatgggacagggccctccccacagacacgtgacaacagatcaaacatgcatttcctgtttcctgtttggtttgatctgtctgcctctcaggtgacttataatttttttcatcaagagaccagttttagaataaaaaataacttgagaagattcaagtaaaggacccaaaagctttaagagaatgaaaagcttccttgatatctctgggccctttcgctctagtccttccatcacagctattcctcctggtcgtcgtcctcatcctnnnnnnnnnnnnnnnnnnnnnnnnnnnnnnnnnnnnnnnnnnnnnnnnnnnnnnnnnnnnnnnnnnnnnnnnnnnnnnnnnnnnnnnnnnnnnnnncatccagacttgcccttttgtcatcagatgtgctgctctcagactcctcctcctcccgagccaggagcttcttaaaaacttgaaactcctcaacagaagtacaggctgtcctggccaaaaactcagcttctgaaactctgagaatgtccttgagcaatgggttagggatctgtgtctgccccttcttatcaggggtttggtaccgtcccaggcgctccaggtaaatgtgtctctgcttaatcttggttagtgaatactgcaagtactcactctttacaatgtctggatgcttaattcccatcctgaagtatgcatactgaaacttgtattccagttgacccaacttttttgtacaaagt

SEQ ID NO: 189544 - DNA, 640 bp, Homo Sapiens
ttgggaatttgaggccacgcaaaaactttcctcacctattgacatgacatctaaaagacatttcgaactcgaaaagcatagtgccccaagtatggtacattcttctcttactcctttctcagtgcaagtgactaacattcaagattggtctctcaaatcggagcactggcatcaaaaagaactgagtggcaaaactcagaatagtttcaaaactggagttgttgaaatgaaagacagtggctacaaagtttctgacccagagaacttgtatttgaagcaggggatagcaaacttatctgcagaggttgtctcactcaagagacttatagccacacaaccaatctctgcttcagactctgggtaaattactactgagtaagagctgggcatttagaaagatgtcatttgcaatagagcagtccattttgtattatgctgaattttcactggacctgtgatgtcatttcactgtgatgtgcacatgttgtctgtttggtgtctttttgtgcacagattatgatgaagattatattgtgttatcactctgcctgtgtatagtcagatagtccatgcgaaggctgtatatattgaacattatttttgttgttctattataaagtgtgtaagttacccgtttcaa

SEQ ID NO: 189545 - DNA, 1262 bp, Homo Sapiens
ctttaaggaatgagaaaccaggggatcactcacttacttccatgaccacccttgtcacagaaaattctccatggtataatcatgaagaagaatgaccaaaccatcaaactggaaggatctagtatacataggttgaattttcaaccgtcttcgtgtccctgcagctttggcattttgataggtatcctcccttcaaggctacatcttctgggttactaccacctttcccaggatctgtggccggcagtgctcacttccagggctaggctgagcagacatgcacccatgcaccctggtggccccatatatccgtagtcaggttgattcaggacttattaaaatataaggctgattggattataaggggcaatatcttcaggctttggcctttggggaacagtgttcataagatcattttattactatggccttctcagtggagccatgagccagaacttgtgagtagtatatccatctctattaataaaccctctgcaaaagcccatttttccatcccatcacaggggttggcttatgaagtcggcttcttaactttagcttagtcagtgccaaggaataaggaaagcaaaaataaagtatgatgaggaactgcgcttggtgatctgggtcacttcagcacttattccctgtgttaaatgtgtgattaggacaattcccccgccctctccaaataatggcaataaagagttcttaaggtctcatgcagatatcttcttgaccttgatttggaggactgagtccccttcagtcaggcaaattttacctaaatgcagggtttctatgtggatgccatcccaagtgaggatgtgaggtgtctgtgagaagcagcaggctaccatttctctcttcctactcttttagaatactttaggaaatagttactcctcagaccactgtaaggggttatccctctgagtagtgtgacccttgtttcagagagctagaagtgaagagatggtgagattaggtacacttagtcttgcaaaccaggaaaaccagaaggcaagacattaagagagaaaaagaagccctctattttgtctttagtacttaaggaatatggatagatcagttggaaagttggcaattcaagactaaaacagtataccaaccaatgaacatttcattgtagggtcttcccatggacttgtagcagatttgtcttccctgccagcctctaccttcccaatggttagacatgaaaaagacatgggtacttaaggattgacacaaagacccaa

SEQ ID NO: 189546 - DNA, 663 bp, Homo Sapiens
  misc_feature (425)..(456): n is a, c, g, or t
acagagagtttcaaataaatagaatcttccaagccaagaacagagcccagcatcctcttaattcttaataccctgtatatataggaataaaaccttatgatgtgttatagattaccccatcaccattaaaagttaatattaaaattggatcccatgtctcaaaaaagttgtaagaagtgcaccagtatttacagaccccattaaattacgcataaataaaatctgtacactcaacgcactgtttcttaaaatacagaacctccacggggacttgggggtgacaagcagcaacaaattgcttcgtgcctacccttttcaagtttactcgaaacatctgaaaaaaatatgcaaataaagcttcagtcccttaaaggaacatgtcatttcaaagagtctcccatttgaagagttaactttcaaagttnnnnnnnnnnnnnnnnnnnnnnnnnnnnnnnntcaatcagcaggcttcgtttctacaagtttcctaaaaccagaaggcccccgtttgaacacggggtttagagtgtgtcagataccacttattaactagttgctaagcagatagaacctttgcctcctaccagaggacttgatctctgaagaagctagatacacacttttctttttttcaaggtaaatatttagcggacccaacttttt

SEQ ID NO: 189547 - DNA, 1116 bp, Homo Sapiens
ggccccaaacagcgagtggcacttcccctacagcatgtctcccctagtagtgggcttcttggtgctagctgtgttctcggctgtgagatatttcagggcagcaaagccgtagcggcgggacatgtcctgctgaaactcttccctgagggttttgagacagatgcggtattgcttgttggaacggaacttggtaatgtcgaagctgggggcatgaggcatgtggatcatgtaggcgttgggcagcacaatgaactcatactcctgcacatccagctccatgatatgagccactttgttccagccaaagcctacaaacctccggtcgtactccgggcagtcacgtctcacaacaacatacggctcaaaatcggcctcccactcaacccggtaaggcgtggtggcggtccgccacttggcgaagtttgtgggtgcgtggcctttcgtccagacgtggtacctgaatgtgaagagggtccccatgtccagcattgacagcaactccgcttttgacttggggaaggacagccggtagcgcagtgtctcgaacgcggggacaatcattgctttcttggtgttggcaagatcgagctggatgacagacttcctgaggtactcatagagcccatacatgggcaggaagtcaatgtcagacaggaacatgtagggagtgctgatgtgcttcatggccacgttgcgcagcaggttcacggggtagaactggccctccttgtacacgatgtggtagcccacgttgtggcggctcataagcacctcagagccctgtgcgtagcggaggaactgctgggcctcggcgtctgacaggtagagggccaggctgatgggcccctcccagtgcttgcagatggcctccagcatctggagcctgtccatggacagctgagcgaccagggtgacgtccgtgctgtctgctgcaggctcatactcgtagtgcaggaagtacaggtgggtgcggtggacagtgaagcgctctcgccggaactcatagcacaggtcgtcctcgtccagctcagacagctgcttctggaggttttcactgttgacatcagcctcactggggcagccaaacagttcccgcctcagaagattgcctgccaa

SEQ ID NO: 189548 - DNA, 1149 bp, Homo Sapiens
  misc_feature (398)..(719): n is a, c, g, or t
ttggcatttctcacagtcttaagttgatatttatagaaatgaatacctttgtgaacctagacttagaacaaatcctgcttttgaaaaaaaatgttttgcttcttacaaaatcatttgtgttaataacaaaaactttattttcggagtgttctttgtataacttttccaagcttttacattaacgagcaggcctctgtcttaaaagggactcagtatattaatttctgcattttttaaatcaaatgaaaaacgtcaaattggaccaattgtcttggtttcttgattcatttatttgagaaaaaaacaatacaaagaaatgcattcatatcaaaattggaatagaaaggaaaacctatttttaagatatcaacctattttcacatcataaaacatctatnnnnnnnnnnnnnnnnnnnnnnnnnnnnnnnnnnnnnnnnnnnnnnnnnnnnnnnnnnnnnnnnnnnnnnnnnnnnnnnnnnnnnnnnnnnnnnnnnnnnnnnnnnnnnnnnnnnnnnnnnnnnnnnnnnnnnnnnnnnnnnnnnnnnnnnnnnnnnnnnnnnnnnnnnnnnnnnnnnnnnnnnnnnnnnnnnnnnnnnnnnnnnnnnnnnnnnnnnnnnnnnnnnnnnnnnnnnnnnnnnnnnnnnnnnnnnnnnnnnnnnnnnnnnnnnnnnnnnnnnnnnnnnnnnnnnnnnnnnnnnnnnnnnnnnnnnnnnnnnnnnagacttacttaaccaatattattgattaccagacttttatgaaagccaaagactgcttgctagtaggaaaaaatttcaaataataaccaaagctgaaaaatggtctgtcataaattatttccccggtaatttttgaaggaaaaatgtataacaagtactatttacatatctgcatttaaaaaagcaattcttagaatacttcctttacattattctcctattttagacattttgtgaaagagaacaaattgtccagtggcctcctgtcagatcaacaattattatactccttaattccatgcaaatttaaatgaatgctataaaattttaaatctgtagcctgggtgtacgtttcactcagttctcctactgaggactcttgactaacagcatactggcagtttcaccttacctgctcgttaataatgtg

SEQ ID NO: 189549 - DNA, 1910 bp, Homo Sapiens
  misc_feature (1076)..(1094): n is a, c, g, or t
  misc_feature (1487)..(1519): n is a, c, g, or t
ttggcagaaattatgagcgttacaagaatgagtgccgggagaaggaacgtgaggagattgccagacaggcagccaagatggccgatgaagccatcctgcaggaaagagagagaggaggccctgaggagggagtgcgtgggggccaccctccagccatccagagcctcatcaacctgctggcagacaacaggtacctcactgctgaagagactgacaagatcatcaactacctgcgagagcggaaggagcggctgatgaggagcagcaccgactctctgcctggcccgatttcccgccaaccactcggggcgacctcgggtgcctcgctgaagacacagccaagctcccaaccgctccagagcggccaagtgctcccctctgctacacccactccatctgcaccccccacctcccagcaagagcttcaggccaaaatcctcagcctcttcaatagtggcacagtgacggccaatagcagctctgcatccccctcggttgctgccggaaacaccccaaaccagaatttttccacagcagcaaacagccagcctcaacaaagatcacaggcttctggcaatcagcctccaagcattttgggacagggaggatctgctcagagcatgggccccagacctggggctccttcccaagggctttttggccagccttccagtcgcctggcacctgctagcaacatgactagccagaggcctgtgtcttccacaggtatcaactttgacaatccaagtgtacagaaggctctggataccctgatccagagtggccctgctctctcccacctggttagccagaccacagcacagatggggcagccacaggcccccatgggatcttaccagaggcattactgaagctaaatctttcaactctccccagtcccctcatcccctggcctcctcccacttacttgttctaaatagagctgtttggaggatgttctctgcgctcccaggccggcatcgagtgtcatcaatttctaccacctgctctctcttctgcccaaggctgtgttgcttattccttacaaagtttatactgcatttggggctgtatcnnnnnnnnnnnnnnnnnnngtagaaaataaatatctccgggggcagtacaggtgtctgggcttgtatttgatggggtttctccggtccctgtttctactggatttggagccaggcccagctagccaagtttggaatggcatttgtcatgtcagtagccaccacctttgttcattgtgaacctaccaaggctttccagcttcatacacattgaccagagctcaagctcctgcctgcaactcctgcctagagttgaagaaaagcaaactggccttggcaggcacagtgtcatcataccctcaccccatatgtttggggtctgcttgaggattcataaatcagccactctggattgttgaggaatggccatggcagccacagaaaaaagaatttttctctctgagccaaggttgnnnnnnnnnnnnnnnnnnnnnnnnnnnnnnnnncatttcattggaagatctccaatggactgaacagctccagtcagcagcagttaccacaaactgtgaatctgggccccaccactcttccctgttaaccagttctgtcagcatccccctctccagcagcacttccatgaagttggttctgagactctggccgtgaacacccgtttcttcagtgatttgttttgggcttttggctcaaaaccccaggctcttgtttttgtctagactcttattctgtttcctgagcagcggaggtagggaccactttgatgtcagacttctggtagctggacatgttctcgagatgggtggctgttcgcgacttttgtaccagagtgaaattgttagaaagagggtttctgggctgtggttctaaatggagccc

SEQ ID NO: 189550 - DNA, 953 bp, Homo Sapiens
ttggacaatttgaacctcctctgagaaaagaaacagaagcacgagatgaaatgggattgtcatcagacccaaatttcatgttacagtggaatccttttgttgatggtgcaaatactggcaaatcaacctcaaaacgtgcaataccacctcccctacctcctaagccaaggataagcagttaccctgaagacaactttccggatgaagaaaaagcatcaaccataaaacattgtcctgattcagaaagcagagctccccaaattctcagaagacagagtagcccaagttgtgggcctgtggcagagacttcttctattggaaatggtgatggtatttcaaaactgatgagtgaaaatacagaaggatcagcacaagcaccacagttaccacgaaaaaaggacaaacgagacttccctgtagaaaccagccatcaatggccttccacccaccccaaaagttctgatgggagcatgcttttcaaaagtttttgatggctgtcctttgaaaattaattgtgcaacatcctggatacatcctgatacaaaagatcagtacattatttttggaactgaagatggtatttacacactgaatctcaatgagctacatgaggcaacgatggaacagttatttccacggaagtgtacttggctgtatgttatcaataatactttaatgtcattatcagaaggaaaaacctttcagctctactctcacaatcttatagctttgtttgaacatgccaaaaaaccaggattagctgcccatattcaaactcacaggtttccagaccgaatactaccaagaaaattcgctttaacaacaaagattcctgatacaaaagctgccacaaatgttgcatagtcagaaacccttacacgggacataaatacctctgtggagctttacagtctggaattgttttacttcagtggtatgagccaatgcagaaa

SEQ ID NO: 189551 - DNA, 975 bp, Homo Sapiens
  misc_feature (46)..(56): n is a, c, g, or t
ttggtgcaatttcttttggttcataacaaaacctgcttaagagaannnnnnnnnnngacaggtggacgtgggaatggaaattcttaatggtttctggagtagaaatctgtacttagaaaactagtttttgggtcagttccattttgatagaagtgaatacatagacagcttttattgacttccatatgtaacaataccgtttaagccttaaatcacagatatgtgccttctcagatacagtaattcttgttcaaccaatgtacaaaatccataaagaaacccctgttggataatgtttgatgtgtctattccttccatggaatggagcactatgtatgaatgttgggtttctttgtacttgttaagccacatttgaggtttatggtaaaaatcatcttttgagtttgctctttggtttttcttcattccttttgaggattgggaaaacagaaagattctttgatttgggtaatgaagaggtaatttgggacagtgtggtggtaccaggaagaaagaggattggaaaggccagtactgttttagttgctcggcactgttggttttgttttaatgtggttgccctgtccactacatggttctatcagtagtgtaatccattttcaatgtaaagctcttttagtttttgtcatagacataaattaatattttgagaggcatccctcacctgttcatttcttctgtgttgaaatgaagtacttaaaattaccgttatacatgaactttgtggactgtaagatttgttatatatgttcaaatgccttttagctggctttttaattaatatgcctgttttgagtgcttaatacaatgtaatgtgattgtaaatcatacctattttaaatcattccttcctgtatatttgtactcagagagccttattttattcttccggcagaattactacttgtgatagttcatttaattccccagaatgtgcctctactgtgaattttg

SEQ ID NO: 189552 - DNA, 1661 bp, Homo Sapiens
  misc_feature (843)..(924): n is a, c, g, or t
  misc_feature (1194)..(1276): n is a, c, g, or t
ttgggccatgacttcaaaccgtgttaacacgtaaataataccgcaaagaaaagtagttttgattcctatactcatagacgtacaatccctatatatacagatgacctttgccatcatcaggtatttaaaacctacacatacttcatttaggggagtctgacagtatttgtagtggcatcaagtcctcattttgtgcaacaaatagaagtgctaatgcctgtaacagaagttcctattttaacgtggggtgtctgacactaatcaactattttaaaagaattaatgtaaaaataggacccttcaaattaaatatttagttattctcactagtatttttgaagttttcacatcatcagtgcttcagaaaatgacattcatatgaaactgtgaaaaatgtcacttaaattgaaagtgatttttaagtcaacataaataccacatcagaacacattttctcttttttgatctcacagaatacccaaaggatcagtagttctcaagccactcaacctcttgctaccccagtcgtgtctgtgacaaccccaagcttgcctccgcaaggacttgtgtactcagcaatgccgactgcctacaacactgattattcactgaccagcgctgacctgtcagcccttcaaggcttcaactcgccaggaatgctgtcgctgggacaggtgtcggcctggcagcagcaccacctaggacaagcagccctcagctctcttgttgctggagggcagttatctcagggttccaatttatccattaataccaaccaaaacatcagcatcaagtccgaaccgatttcacctcctcgggatcgtatgaccccatcgggcttcnnnnnnnnnnnnnnnnnnnnnnnnnnnnnnnnnnnnnnnnnnnnnnnnnnnnnnnnnnnnnnnnnnnnnnnnnnnnnnnnnngacaggaaatgggtcgctcccctgtggacagtctgagcagctctagtagctcctatgatggcagtgatcgggaggatccacggggcgacttccattctccaattgtgcttggccgacccccaaacactgaggacagagaaagcccttctgtaaagcgaatgaggatggacgcgtgggtgacctaaggcttccaagctgatgtttgtacttttgtgttactgcagtgacctgccctacatatctaaatcggtaaataaggacatgagttannnnnnnnnnnnnnnnnnnnnnnnnnnnnnnnnnnnnnnnnnnnnnnnnnnnnnnnnnnnnnnnnnnnnnnnnnnnnnnnnnntacatacacagaatcaggcacttacctgcaactccttgtaggtctgcagatgtgtgtcccatggcagacaaagcaccctgtaggcacagacaagtctggcacttccttggactacttgtttcgtaaagataaccagtttttgcagagaaacgtgtacccatatataattctcccacactagcttgcagaaacctagagggccccctacttgttttatttaactgtgcagtgactgtagttacttaagagaaaatgctttgtagaacagagcagtagaaaagcaggaaccaagaaagcaatactgtacataaaatgtcatttatattttccaacctggcatgggtgtctgttgcaaaggggtgcatgggaaagggctgttgatatt

SEQ ID NO: 189553 - DNA, 1444 bp, Homo Sapiens
ttggcgaagaggaaggcgatttagctgacatcaagtcttccttggtgaacgagtctgaaatcatcccggccagcaacggacacgaggtggccagacaagcacaaacctctcaggagccctaccacgacaaggccagagaacaccccgatgacggaaagcatccagatggaggcctctacaacaagggaccctcctactcgagttattccgggtacataatgatgccaaatatgaataacgacccatacatgtcaaatggatctctttctccacccatcccgagaacatcaaataaagtgcccgtggtgcagccatcccatgcggtccatcctctcacccccctcatcacttacagtgacgagcacttttctccaggatcacacccgtcacacatcccatcagatgtcaactccaaacaaggcatgtccagacatcctccagctcctgatatccctactttttatcccttgtctccgggtggtgttggacagatcaccccacctcttggctggcaaggtcagcctgtatatcccatcacgggtggattcaggcaaccctacccatcctcactgtcagtcgacacttccatgtccaggttttcccatcatatgattcccggtcctcctggtccccacacaactggcatccctcatccagctattgtaacacctcaggtcaaacaggaacatccccacactgacagtgacctaatgcacgtgaagcctcagcatgaacagagaaaggagcaggagccaaaaagacctcacattaagaagcctctgaatgcttttatgttatacatgaaagaaatgagagcgaatgtcgttgctgagtgtactctaaaagaaagtgcagctatcaaccagattcttggcagaaggtggcatgccctctcccgtgaagagcaggctaaatattatgaattagcacggaaagaaagacagctacatatgcagctttatccaggctggtctgcaagagacaattatggtaagaaaaagaagaggaagagagagaaactacaggaatctgcatcaggtacaggtccaagaatgacagctgcctacatctgaaacatggtggaaaacgaagctcattcccaacgtgcaaagccaaggcagcgaccccaggacctcttctggagatggaagcttgttgaaaacccagactgtctccacggcctgcccagtcgaccccaaaggaacactgacatcaattttaccctgaggtcactgctagagacgctgatccataaagacaatcactgccaacccctctttcgtctactgcaagagccaagttccaaaataaagcataaaaaggttttttaaaaggaaatgtaaaagcacatgagaatgctagcaggctgtggggcagctgagcagcttttctcccccatatctgcgtgcacttcccagagcatcttgcatccaaacctgtaacc

SEQ ID NO: 189554 - DNA, 831 bp, Homo Sapiens
gtacaaaaaagtttggcacacggctaagaagagagaggcaagggcaggagtgaaggagagagctgaagcctggggctccgagatggtcagaggatgggagacggggcagtgaaacaaggcttcttgtatcttcagcagcagcagacgtttggaaagaaatggcgccgcttcggcgcctcactgtatggagggtcggactgcgccttggcccggctggagctgcaggagggcccggagaagcctcgtcggtgtgaggctgcccggaaggtcatccgcctcagtgactgcctgcgggtggccgaggccggcggagaggccagcagcccccgggacaccagtgccttcttcctggagaccaaggagcgcctgtacctcctggcggcccctgcagcggagcgcggcgactgggtgcaggccatctgcctcctggccttccccgggcagaggaaggagctctcggggccagagggaaagcagagccggccctgcatggaggaaaatgaattgtacagcagcgcagtcacagtcggcccccacaaggaatttgctgtgaccatgagacctacagaagctagtgagaggtgtcacctgcgggggtcctatactctccgggctggggagagtgctctggagctgtggggtgggcccgagtcagggactcagctgtacgactggcctctacaggtttctgcggcgctttgggcgggacaaggtaaccttttcctttgaggcacccgtcgctgcgtctctgggagagggcaactttgagttcgaaatctggcaaggcaatgagatcttcttggtcttggaagaggtcatctctgctcagaa

SEQ ID NO: 189555 - DNA, 1071 bp, Homo Sapiens
ttggcagcctcagcttcggcctcagcccgccgcagagggacgcggagcccggcgctgagccctgcgcgcgcgcctgccggtccgatctggacgaacgcgaggcgttctgcgagagcgaattcgcggtgaacgggatcgtgcacgatgtggacgtgctgggcgcgggcatccggctggtgaccctgctggtggatcgggacgggctgtacaagatgaaccgcctgtacctcacccccgacggcttcttcttccgagtccacatgttagccctggactcctccagctgcaataagccgtgtccagagtttaaacctggcagcaggtatattgtgatgggccacatctaccataagagacggcagctccctacagctctgctccaggtcctgagaggccgcctccgtccaggggatggactgctaaggagcagcagcagctatgtgaaaaggtttaatcgaaaaagggaagggcagattcaaggtgcagttcatacccaatgcatttgaaacaaccatcctggcatttctggaccgcaagagacttggacgtcggcaacaagacatgaaaggtctaccttcatgtaatgggtcctccttcagaagagagccctcagctactctgtgaatgacttgcatagctgcaactgtaatctcgaaggtgtcactttgttatttacaagatgcttcttaaatgggctgctcctgagctcagtgtcaaggtgattcaactgtagtgccagacaatgatttacacagctcagataattgacctgtccagttaacagatcattgcttcataagtttttaaattattttaatttaatattctttagtagaaatagtccacaaaaacattttcttgaatttaaatatacaacttttatatcatgtatcaaaccagattttatattcaaacgatcacattttaaattctgtacatagcagtaagcgcactagtcaaaagacatttatgtttgaaatgtcatttagatcaaacacaagggtcaaagcccaggacaagtaaagttttatacttaaagagtactaaagggccagtgtgcagatgggtgga

SEQ ID NO: 189556 - DNA, 1657 bp, Homo Sapiens
ttggcaagtcccttcctgagtggctttctgataggaagaagagagcgctacagaagaaagatgtagatgtccgtaggagaattgaacttattcaggactttgaaatgcctactgtgtgtaccactattaaggtgtcaaaagatggacagtacattttagcaactgttgtcacctttgaaattttgtctgatgactactcaaagattgtcttcttacataatgatagatacattgaatttcattcgcaatcaggtttttactacaaaaccagaataccaaagtttgggagagatttctcttaccactatccatcctgtgacttgtactttgttggtgcaagttctgaagtttataggttaaacttagaacaaggacgatacctgaatcctctacaaactgatgctgcggagaataatgtttgtgacataaattcagtgcatggcttgtttgccacaggaaccatagagggtagagtggagtgctgggacccaagaactcgaaacagagttggcctgttagactgcgccttaaacagtgtcacagcagattcagagataaacagtttaccaacaatctctgctttgaaatttaatggtgccttgaccatggcagttggaacaaccacagggcaggttttattatatgaccttcgatctgataagccattgctagttaaagatcaccagtatgggctgcccattaagtccgttcatttccaggattcattagatctgattttgtctgctgactctcgaattgtcaagatgtggaataagaactccggaaaaatatttacttccttggagccagagcatgaccttaatgatgtttgtctctaccccaactcaggcatgcttctgacggccaatgaaacccccaagatgggcatctattacattccagttttgggtcctgctcctcggtggtgttccttcttagacaacttgaccgaagaattagaagagaatccagaaagcacagtctatgatgattataaatttgtcaccaagaaagaccttgaaaatttagggctcacccacctcattggatctcctttcctccgggcatatatgcatgggtttttcatggatataagactctatcacaaggtgaaactgatggtaaatccatttgcttatgaagaatataggaaagataaaatacgacagaaaatagaagaaacacgtgcacagagagtccagttaaagaaattgccaaaagttaacaaagagctggcacttaaattaattgaggaagaagaggagaagcagaaatctacatggaaaaagaaagttaagagtcttcctaatattctcaccgatgatcgatttaaagttatgtttgagaaccctgacttccaagtagatgaagagagtgaagaatttaggcttctgaatccacttgtttcaaaaattagtgaaaaaaggaagaagaaactaagactcttagagcaacaagaacttcgtgaaaaagaagaggaggaagagcccggaggaaaaccaagtgatgcagaaagttcggagagttcagatgatgaaaagcctgggttgaagaggtcagggaagcaacgcagactcctccagccggaaggaaaaagtgaagcggcaggaacgacttcaaggaggaccagcagacagtcctaaagccccagttttta

SEQ ID NO: 189557 - DNA, 1499 bp, Homo Sapiens
  misc_feature (1364)..(1377): n is a, c, g, or t
acaaaaaagttgggtctttaagaacgatagcaaattttacttcagatgtggagtactcggatgaccactgccatttgattttaccagattcggaagcattccaagatgtgcaaggaaagagacatcgagggaagcacaagttcaaagtaaaagaaatgtatctgacaaagctgctgtcgaccaaggtggcaattcattctgtgcttgaaaaactttttagaagcatttggagtttacccaacagcagagctccatttgctataaaatacttttttgactttttggacgcccaggctgaaaacaaaaaaatcacagatcctgacgtcgtacatatttggaaaacaaacagccttcctcttcgcttctgggtaaacatcctgaagaaccctcagtttgtctttgacattaagaagacaccacatatagacggctgtttgtcagtgattgcccaggcattcatggatgcattttctctcacagagcagcaactagggaaggaagcaccaactaataagcttctctatgccaaggatatcccaacctacaaagaagaagtaaaatcttattacaaagcaatcagggatttgcctccattgtcatcctcagaaatggaagaatttttaactcaggaatctaagaaacatgaaaatgaaattaatgaagaagtggccttgacagaaatttacaaatacatcgtaaaatattttgatgagattctaaataaactagaaagagaacgagggctggaagaagctcagaaacaactcttgcatgtaaaagtcttatttgatgaaaagaagaaatgcaagtggatgtaagcactctggggcctggcttaatctggcaaagttcttcagacgacttgggagcaaaatggctgcttgagctactctgtgtcgttaatttgttgtttgcacataggttccactttgggcactgtctttttaagagaccaaggcacatgcacagcttttagaaagcataccaacccttgtgcctgtgtgtataccgtgggaacccttctgtaaatagagttgaagtggttgttgcaaacagcctccttgtttacagagaatacaaggccagtaagcgaatgtcagtattgtaactacagtctccacttaagcacaatgatataagtggttttgtttgaaaactacagctatgtagcacttgtgctacactgcacctctgcattgtaaagggatactgccagtgctcaaaacaaaatgtgaaatgagtcatttggaaacagggtgggggtgttagggcaacctcgaggatttgcagcattgaaactttccccaatagttcttggaaaagctgaccgcaaaatttggtagtgtacacttagcatttgagannnnnnnnnnnnnnttaaaccaaacactaacagtgttgccacattgttgaaagggctcgtgtttttcagtggtcatcctctgcactccatcacactcacctccatctcaccagagatctctaaagtagagagagtg

SEQ ID NO: 189558 - DNA, 884 bp, Homo Sapiens
tgtacaaagaagagaaacaactgttttgttgaatctggccaacctatttgtggaaatggaatggtagaacaaggtgaagaatgtgattgtggctatagtgaccagtgtaaagatgaatgctgcttcgatgcaaatcaaccagagggaagaaaatgcaaactgaaacctgggaaacagtgcagtccaagtcaaggtccttgttgtacagcacagtgtgcattcaagtcaaagtctgagaagtgtcgggatgattcagactgtgcaagggaaggaatatgtaatggcttcacagctctctgcccagcatctgaccctaaaccaaacttcacagactgtaataggcatacacaagtgtgcattaatgggcaatgtgcaggttctatctgtgagaaatatggcttagaggagtgtacgtgtgccagttctgatggcaaagatgataaagaattatgccatgtatgctgtatgaagaaaatggacccatcaacttgtgccagtacagggtctgtgcagtggagtaggcacttcagtggtcgaaccatcaccctgcaacctggatccccttgcaacgattttagaggttactgtgatgttttcatgcggtgcagattagtagatgctgatggtcctctagctaggcttaaaaaaagcaatttttagtccagagctctatgaaaacattgctgaatggattgtggctcattggtgggcagtattacttatgggaattgctctgatcatgctaatggctggatttattaagatatgcagtgttcatactccaagtagtaatccaaagttgcctcctcctaaaccacttccaggcactttaaagaggaggagacttccacagcccattcagcaaccccagcgtcagcggcccc

SEQ ID NO: 189559 - DNA, 799 bp, Homo Sapiens
cattttttggttaggaatcacacaaaatgaaacacacaacagtacattttcttttcatctacgtcattaccattcttcacacagatcctgaaaaattaccacagcagttaacgcgaagtgaacaaaggggtggaacaggcaacggcattcccccaaggtaggtgtggtgtgtctgggagaaaacaggatggagatcaaacccagagaaacgcactcccgtcatctctccatgtctcaatttccaacgctctcccagtcaacacagcttcgcccccaaccagagccacccggtgcagcccgcagagtgtacacgcatcagggccgggaggccccgtcggcaaagcagtaacacacggtcagacggccgccacctccaagtggagtgagccacgctaccactaacactgaactcaagcacaagagctcctgcgaaagcagaggggcgggaaacaaagaagcgggtggttaagggcacgaaccgcacactgcgggacgccggcatctttgaatcgccactcactcctacagagccaaactgcaaaacaacagaattaaaaagttactctctccaatcaaagacctggaggaataaatcgtgagtgaagacctgtcgaagcaaaggtggagaggtgatggagaggtgatggagtggtaaacacagtgtgaaaatcgtcagcaccttcccacccagcccacgtggagttctcaaggctgaggcggagcagagtggcaggaatacggccctcacccagttgaagccaggaggtggagggagaggagcatggaaagccagggccaa

SEQ ID NO: 189560 - DNA, 1116 bp, Homo Sapiens
ttgggcccttggagagattcagaatgtgggcgaaggtgccaccgccacacaaggcgcttggcagtcctcggagtcctcacaggcaaacctgggggagcaggcccagagtgggccccagggaggaaggtctcagcgtagggagaggcataaccgaatggaaagagatagaaggcgcagaatccgcatttgctgtgatgagttgaatctcttagtgccgttctgcaatgccgagactgacaaggccacaactctgcagtggaccacagcattcctgaaatacatccaggaaagacatggagattctcttaaaaaggaatttgagagcgtattttgcggtaaaactggccgaaggctaaagctgaccagaccggactccttggtgacctgtcctgcacaggggagtttacagagcagcccctcgatggagatcaagtgatcggactgaacaggaatcctcggggggtgaacagccattccttcgtgacctgtgcacgccttctgcaaccctggagctctgctcggctagtctgactcgaaaagggcgtgactcaagctgacgggactccagtagggactttgagagcacattttgtaaaaatatttatctagacgcaaatgcttatccatgaatgtcctcttagaccatttggggatgaagccatcttaataattagtaataattaattagtaataattagtaagcattttctcaatgctctgattccatcatgttttcttaacatgataacttaaaaaattgacatcctttgtactttctttaatcttaaaaagtacacggctttttacttatttaccttttaaatatgcccctttagcaattggaacaagttaaattgttaactaaaaacagtttggaaattttatttcattcgttatatcacacccccttgtcatgactctgagtcacgtgctgctgtattgcaacgtgcaggaccattttaaacctgtgtgctaaaaattttccagatacttgctttaagctacttttgtccacaaatgaaatactgtcacagtagacgcttaaatgccacgttttcataccaagagtcattcattacttcatgtgtcacacactggtggtgtttggaattgggt

SEQ ID NO: 189561 - DNA, 1840 bp, Homo Sapiens
cactttttaataatgggttagaacttttccctttcgttaaggccattagctggttttctgactagttgcctaaacatgtttctcatataagcgaaactgaacatgctgctgctattaatcatcataaactgtaaaatgtggttttctggaaaactggtacttgggagttttataatcctttttggagtctaagccagcacatctctgtgagttcattctagaaaatgtgctttgtctttatctttagtaatccaagaccactctaaaattaaggccatcagggaaatagcaaactgatgatgcattttcttatagtgcttttttcacactactgcttgattgacagatctttctgaaccattttcatcaggcactttcatcatctgaatcaaatccaaagagtgtctgacatttcttttgtgcaagatgagcctcaagtgcttctgcattacagtaggtggtcaggcatttgccacatcttaatcttttcactgattttttatacacgttatcttgatcagaacaggcatctactctatcagtcagaaattttctgcgttttggcatactaagataccgttcatcaaggtaactgggaggcaatggtctgacgtatggttttgttaaaattaagccatatgaagtatgttcacttgtcagatttggtttggaaggtgcctgagatactggcaaggtgttgtgttcttgtggtacaacactgggcaaaatggaaccattttctgtcctgattctgtttgtatcaattttcaaagcaggatctgatgaaactaaaggtgtttgctctatttcactgtgtccattgactatatcactactactacaattattttcagaatttggctctatgtcaggcatcttttggtctatcaagcttatatttgaaacagtgtcatcagaacgttcgtttccattctgaactaaactgtctgttttcttttccatactttctatacatgtctttggttctgtagactctttccttgatttgctagtagaaactggcagactaatagtttgtttctcattactagatgagtctttttcctgattaggatttgagtctgtctgaacatcccaaagaattgtttcacttggttgtgcagatgactctggtgttttacttaaatagtgttgagcttcatgttcatacagcagaggaagatcttcaaaaagctcatggcattctggaaaactacactgagcctgaaatgtcctgtgactttttgtgtgctgggcaagctggaacggcagcttaaacgactcgttgcaattaaaatgcaaacaaaaatacacatttggatagctatgtctattaaggtggtctataaaatgttgagaatcttcaaattgcctttgacaaaatttgcattttcctttgctccacttcattactgtttgtcgcacatttaaatcggttggatgtacggtcattgcatgtttatttagaaacccaattcttttaaatatccggacacaaccaagagcaggacacttaaagtttccttcttgatctgtggcatatatgtcttttggatggcacacagttccattgattttatgaattactgaagtttcttgattcaggtcataatcatcttcttcataatcaccttcttcatcctcttcctcctcataatcatccccacattcagttaaaggcttgaaaacattatttaaagaattattaggactgccattttcaataacattttcaataacatcttctggtacacttatgggaatttcaatgaattcagccacatgctcagggatgacttctttgtttccttcactagaagcagtaagtgtctccacccaa

SEQ ID NO: 189562 - DNA, 1750 bp, Homo Sapiens
gcccagtcgtgcagcaaccaactggataagttcctccatggtcaggcctgccatggtggtacgtgctgtcttgatctgctgaagaatgttggtcatctgggcgttattgcactgtgggaaccgggtcagcagcttctccaggatcttctccagtttgtctactggttggggccggggagtttcagcagaagccttaacaccgcccaagcctgggggaggtgggatggaggcggcagggggcatgtgtggaccgtgggggctgacaagggaacccaagccagggctatttctgccatgggagccaggaaggggtgaggaaggctggctgggctgggaaagggcagggttcaggattgggaaagacaaggagcggggatctgcactgggcataaccatgggcattgtgacctgcccaatggagaagggcatccgaggagccagagagggactgggttgaaacacctgaagcatgaagtctgtctctgatgggggtggaggtaaagtgggagtagggatttgaggaaggctgctcagcttggctccgttcctcactaactggatatgactattaaattggtcacgaacattctttttcattatccgaactccattcagtctcgtctcccactcctgtttggaacgaactgtctccagtgttgggggagttgacttgaggtaagtaaggtgcaattctgcctctttttctgcttcttctagtttcagtaccagtaactctttccggctctctagtgataagatctctgccttccaggcccgttcagtctcttccataatgttcctatttatttcgccatcctgattcttgagtctatccagttccatttcccacacctctcttctgcccttctcacaaagcttctcaatttcagctttcagatcttgctccttctgcaaaaactcctttttctctttctctatcttctttctttgtttcttcccgctttattgtcacatcctgaatagcctttaatatctcctggtgaacttcatttcctcttctctcctttgctgaagctgctttaattgcacttggagctgattctccacttgcctctgtttgtccaggacctcctggtaacgctctttcaacagggttctctctgtcatcattttatccaaattcttttcaatatcttgatctgtgtttacctctgaatcagctgtcttaaagtcagtctataaaggaaaaaagttatatttagaatcgttcagagacactttaaaagaggcagaatcactaacacctagaattccgccacaggtaactaactttttactctttccccttaccagcttccaagcaagctaagcaatgtagttctggcaaacggacaccaacatccacgctgcattaatcatcggtcccacaaaataacccaaacaagacccaatgactgactgagagaaagcctcaagtctgagatgagacgtctgccctctacagtctgttgtgcccatactttctcctacaacaaagcacacccgtcactagaaggcaggatacactgtacttcttaagatgtgactcagagaattaacaaggattcttcctgcaaggtcaaagatgataaatatgaatgctaatgtcctgcactcatcagttactcagtgaaagagactacacgtaggtcataaagttcctacttgccataagattagacaatggctactggctttcttatttactgaacatcagaatgaagtcattgtatggcactgtatgagccaa

SEQ ID NO: 189563 - DNA, 835 bp, Homo Sapiens
ttggctttgtggacacaagatggtggagatggctcagaagttgggagctgctctccaggttggggaggcactggtctggaccaaaccagttaaagatcccaaatcaaagcaccagaccacttcaaccagcaaacctgccagtttccagcagcctctgggctctaatcaagctctaggacaggcaatgtcttcagcagctgcatacaggacgctcccctcaggtgctggaggaacatcccagttcacaaagcccccatctcttcctctggagccagagcctgcggtggaatcaagtccaactgaaacatcagaacaaataagagagaaataagaatagaatgaatgaccccaaaatagggttttcttgggcgaggatgtgctggattaggaaaggtgacatgacacaggcagagcagagtggcacccaccacagaatacagtgtgtgttattacgaggagccagcagttgagcctaaggtccttctacctacctggtattggcatttgaggtcggaaaccctctactgccccataagccaggaaaagtgaaaagagaacacagttcctttaagaactggcagcaaggcttgaggccttatgtatgtagctgagtcagcaaggtacatgatgctgtctgctttcaaaaggacttttctctcctagctgactgactccttccttagttcaaggaacagctgagacagacctctgctgagtagctctgtgatgacaaagccttggtttaactgaggtgatcctcaggttgtgaggtttattagtccccaaggcaaacacaaatattagattaataatccaactttaatagtatacattt

SEQ ID NO: 189564 - DNA, 1300 bp, Homo Sapiens
ttggcaaggttgctaactgcagcttgggaactgccaccatcatcagtgagaacttgaacaatgaggtcatgatgaagaaatacagcccctcggaccctgcatttgcatatgcgcagctgacccacgatgagctgattcagctggtcctcaaacagaaggaaacgataagcaagaaggagttccaggtccgcgagctggaagactacattgacaacctgcttgtcagggtcatggaagaaacccccaatatcctccgcatcccgactcaggttggcaaaaaagcaggaaagatgtaaatcagcagaaaaaaaacaccgagacgtttctgtgacttcactttcacctgctccaggggtcaaggacttgccttgcctgataaccagccagcaggctccgaatcaccatctccctcacatgttatccggcaagagtgaattctaccaatggaagccaggttaatgattacaattaatcttttactgtacattcccaaggctttagttttaaatgccactgtgcctttaacaaggttgtaaatattttatgcccaccagagatgtggtcataagatctgatcctgagccagagattcagatggcacaggaagtattcatgtattttaacactggggttttctttctttcatactgagattttttttcagtatgtatcctccagctcttaaagcttacctgagaaagctttaaatgagaaaaggaccatgcgattggtgctgtgttacatacacatactttcttggcttctgagtagctcaggtgtggcttttggctgcagatgttaaattttgataccatgtaaacctacccagcttctcagacttgggtcttgttttttgatgggaacagaggtgtttagagaaagcctctgagtatgcctttcagattttgaacaagcggccttttctaaacatcgacttctactactctctagccttaaaataccttctgcttagatccagggcccttctactggagataggaaaagtagaattcaggaattaaaagaattactctttattcaatttgaggaacttggtgaaagcccctcctcttatgacagccaggttcctgctggctagaccagcctattcagcgctttgctaggggattgggtggtccacgcactcgctaatacagttctccaggtgtggaatgatgtcaatacgattgcttggccttttccccctgtgcctttgctcggtgctctggtttcctcagcaacactccttgtaaaggggcagagacagggtccaccaactccccagatgaaaagccccttc

SEQ ID NO: 189565 - DNA, 509 bp, Homo Sapiens
tggtgtagtatttgcatataacctatgcactttctcccatatagtttaatcatctttagatacttataatgcctaatacaatgtaaatgctatgtaaatagttgttgttatactgtattgtttagggaataacaataagaaaaacagtctgtacatgttcactacagatgcaaccattgttaagcctgactacatctttttatctgcagttgattgaatctatggatgtggaacctgtgcatatggagggtcaactgtactataaataatacgaatatgccaacattatataatcattgctttctgcaactgtttactataatttcaaaattaatatcctattaactgttcctataaattatcaaatttggcaagtgtattactagcaggagatggaccttaaattatgacaactttatattttttgatagcatctcttgaaaaagaattttaatgattctaataagaggttctttttcttttttccatttccttgacaaatagtactc

SEQ ID NO: 189566 - DNA, 1892 bp, Homo Sapiens
tctgggcgcaggggcagtggtgaggcagtgcgtgaggtatactgctggtgcagcagtggagtagagcagcgtgacaaggatggagctggtgctcctgctgatggttctgcatataattcatacgggcagccagaaaagagaagtctgggtccgcatgatgttgcagtctgtttggctcaccccatggcgggctgcccctcttagaagctccccatcatgccgaacaggctcccaccatttgggcaattcaggaccaggaggctgacacaatgccagccgatcttccaaaagggggtggcataaaacttgttcccgtaagcgccgaagcaattctatacggtagagagtccgtgaggctctctcctcagtgatgggctcaatgaacaggttagggtcggggggttcatctccagctgctgggggaaggcggcatacttggcggcacatggccacaaagccatggaagtacttggtaaggctttcatctgtctttttgtctagtcgagcaaaagtgcggaagcgatcccaatggaactgcatggtgtcagggtcatattccacaccaaacgtagacaccactcgataaaaatcagtttgttcacgccttgtccatcgttgttgtttctcccgccgtgcaatttctttcagcttgaaggctgcttcacaacgccgccttcgccggtccccacgttctgcagcctctatcttcatttgttctctcttgtagctgcgctgatacgctgttactagacgccgaagcctagctgttagggcagagcccggaggccagaataaatggcctggctgttgggtcacctgggcttcatctccatcaatcactgagatctcctcatccatcatcatcaagggatcaccctcatcatcttggtcctttgggggaccttggagtggtttatattcaggatcttcacaatctttatcaaagtcaaccccttctactatgtcagagaagttatccaacactcgatgttctgctgcaattgctttgtcatctggtcggccagccttttctaggaaacataaggctgggtctgccctcatggtattatatttctcatagccatgtttaaagactccaatgagcagcgacttgtcagcctcactgtcccaccaagttgttggaacctccagttgatccactactgggaaccatatgtcaatctcactggcaatcgcaccccctaacaccttttctgcttggtctccaataacctcctgcctcaggtagtatagcattcgtacccgcaacagtaccttgttacactgatgtttcaagtgcttcttataactttcatcttggaacaaagtgtcagggttatatttccggatccaatctgccttatggatatcaaaagtgctttgtgactttactttttttcctttgcgtccacgaggcacagggatagatagacctgaatgattctgcaattcttttgtcttgccattttcagctgggctaatcaagtcccagatgaagcctttaatattttcatccccacggtagtgtagaagacagtacacgagaatggcccgacaaatggtctccacatctcgttcagtcatacgtcgcttgaagcgtccatgagataaaatatctcgccatcgtccccaaccatataccaggagatgcttttccacccgaaagcagtcagtgcgcccataggcatgatgacggtcatgtctgcgggagcgtggccgctcatcatcctcactttccaaatcagagaattccaccaggtcatcatctttcagagtgctaaagtggcgcgtttgttttcgtactctaggtgtgtcaattaccaaattattcttgctgttgagcagatccatgtctaggtcagcctttttggcccacttttgccaaaagccaa

SEQ ID NO: 189567 - DNA, 1644 bp, Homo Sapiens
ttggctgttattgaagaaaaaaaattagtctgtatggtgacaaagctgctatggcgttttgccccattcccccgtcttaatttgcatacattcaaattgatagccacatatgatttctccattaaagtggcacgatttttttcatgtcttttgagtttttggagactctttaaatctcacttggtaaagagtgtggccaacgctgtatcttacatatggctgagactgtacctcatctgttactgttttctacctttgtccaagactgagatatacaagattatccaagtatttaaagctgtaagaaaagagggaaaagtatacacacacatacacttattttttctcgctttttgttagttgtgtttatttgttgaaatgtaggcctacacatttagttttttaaatgtttctcaccgtagtttttaattcttttacctttgttctgagaaaatggctgttgaattcttaatgcatacttttacatgaattggtatagtgtagaaaactagcctgtgtctatttttaatgtatttttccatttccaccttctcatttcaaggcctagtaaatgacaaagactcaaaagattctatgacagaaggagaaaatcttgaagaggatgaagaagaagaagaaggtggggctgaaacagaagaacaatctggaaatgaaagtgaagtaaatgagccagaagaagaggagggttctgataatgatgatgatgagggagaagaagaggaggaagagaatacagattaccttacagattccaataaggaaaatgaaaccgatgaagagaatactgaggtaatgattaaaggcggtggacttaagcatgtaccttgtgtagaagatgaggacttcattcaagctctggataaaatgatgctagaaaatctacagcaacgaagtggtgaatctgttaaagtgcaccaactagatgttgccattcctttgcatctcaaaagccagctgaggaaagggcccccactgggaggtggggaaggagaggctgagtctgcagacacaatgccgtttgtcatgttaacaagaaaaggcaataaacagcagtttaagatccttaatgtacccatgtcctctcaacttgctgcaaatcactggaaccagcaacaggcagaacaagaagagaggatgagaatgaaaaagctcacactagatatcaatgaacggcaagaacaagaagattatcaagaaatgttgcagtctcttgcacagcgcccagctccagcaaacaccaatcgtgagaggcggcctcgctaccaacatccgaagggagcacctaatgcagatctaatctttaagactggtgggaggagacgttgatccagcagcacgtgtcatttcattaggtcctgtatctgatgttgtggttagtggagtcctccagcaattgaatgagagcagtggacacatctcagcaggtcggtctagagagttgcgaatctaaacctgggacaggctggggccaggaggcagaaacatcagcctctgccaacaccggaacaagccgacgcttccagacaaggcggaaaaggccttttgtaatggaaatctcgcgaggggttaatcttctcttgagaatggcagtcaagaaatgagatgggttcactttgactactg

SEQ ID NO: 189568 - DNA, 692 bp, Homo Sapiens
ttggctctgcggcctggggcccaactcggcggccgccgccctccgacaaggactgcggccgctccctcgtctcgtccccagactcatggggcagcaccccagccgacagccccgtggcgagccccgcgcggccaggcaccctccgggacccccgcgccccctccgtaggtaggcgcggcgcgcgcagcagccgcctgggcagcgggcagaggcagagcgccagtgagcgggagaaactgcgcatgcgcacgctggcccgcgccctgcacgagctgcgccgctttctaccgccgtccgtggcgcccgcgggccagagcctgaccaagatcgagacgctgcgcctggctatccgctatatcggccacctgtcggccgtgctaggcctcagcgaggagagtctccagcgccggtgccggcagcgcggtgacgcggggtcccctcggggctgcccgctgtgccccgacgactgccccgcgcagatgcagacacggacgcaggctgaggggcaggggcaggggcgcgggctgggcctggtatccgccgtccgcgccggggcgtcctggggatccccgcctgcctgccccggagcccgagctgcacccgagccgcgcgacccgcctgcgctgttcgtcttatgtttgtttgcccggaagggcaggccgacggatcttagcgcgccgcccccgctcctt

SEQ ID NO: 189569 - DNA, 930 bp, Homo Sapiens
actttgtacaaaaaagttggcatcagagcgccagtttacctgggatcacctccatcagggaaaccaaagagcctccccacaaacagctttgtgggatgcctgaagaactttcagctggattcaaaacccttgtataccccttcttcaagcttcggggtgtcttcctgcttgggtggtcctttggagaaaggcatttatttctctgaagaaggaggtcatgtcgtcttggctcactctgtattgttggggccagaatttaagcttgttttcagcatccgcccaagaagtctcactgggatcctaatacacatcggaagtcagcccgggaagcacttatgtgtttacctggaggcaggaaaggtcacggcctctatggacagtggggcaggtgggacctcaacgtcggtcacaccaaagcagtctctgtgtgatggacagtggcactcggtggcagtcaccataaaacaacacatcctgcacctggaactggacacagacagtagctacacagctggacagatccccttcccacctgccagcactcaagagccactacaccttggaggtgctccagccaatttgacgacactgaggatccctgtgtggaaatcattctttggctgtctgaggaatattcatgtcaatcacatccctgtccctgtcactgaagccttggaagtccaggggcctgtcagtctgaatggttgtcctgaccagtaacccaagcctatttcacagcaaggaaattcaccttcaaaagcactgattacccaatgcacctccctccccagctcgagatcattcttcactcaggacacaaaccagacaggtttaatagcgaatcttaattttggattctgaccatgggatacccaaccactttggcattcagtgctacatgtgtattttatataaaatcccatttccttg

SEQ ID NO: 189570 - DNA, 805 bp, Homo Sapiens
ttggctctgatttttcccagctgcagtggaggcggcggtgggaaagcctggcccacacacgtggtctgtagcgacagcggcttggaagtgctctaccagagttgcgatccattacaagattttggcttttctgttgaaaagtgttccaagcaattaaaatcaaatatcaacattagatttggaattattctgagagaggacatcaaagagctttttcttgacctagctctcatgtctcaaggctcatctgttttgaatttctcctatcccatctgtgaggcggctctgcccaagttttctttctgtggaagaaggaaaggagagcagatttactatgctgggcctgtcaataatcctgaatttactattcctcagggagaataccaggttttgctggaactgtacactgaaaaacggtccaccgtggcctgtgccaatgctactatcatgtgctcctgactgtggcctgtagcaaaaatcacagccagctgcatctcgtgggacctccaagctcctctgactgaacctactgtgggaggagaagcagctgatgacagagagaggctctacaaagaagcgcccccaaagagtgcagctgctaattttagtcccaggaccagacatccccagactccacagatgtaatgaagtccccgaatgtatctgtttctaaggagcctcttggcagtccttaagcagtcttgagggtccatcctttttctctaattggtcgcctcccaccagactcacctgctttttcaacttttaggagtgcttcctcacagttaccaagaataaagaaagc

SEQ ID NO: 189571 - DNA, 968 bp, Homo Sapiens
ttgccagaagcgagcaccccgtgacggcgatggtgatgtgcagctgctgccctccgtcagaggcagaaacgtgaactcttcaatggctcccactcgcttcttcatcttgtatcctgtcaggccagctccagctgcaccaaacagcgaggtcatgatggctatgccggctgctgagcccagagccgctgcccccggcgctgccaataatcgtcgctgctccagcggcaacaaggggtgcagctagacctccagtcacaccgatcaccgttccgcctccgacagtcgccaggcctatcaggagataacgcttccatttcctccggttttctttcttctttcgggatgcctcggccatttcagattcctcttctttgatttccttcaggctctccaggaacatctcttcaaggacatccagctcctccaagggcacttggagcagggaggtcatgtggcaaacgaggactctggcccgggcgtcatagtgcccatccttgagtgagaagctcagaaggtcctgagtgatcaccgtcgggtcgtccttcaagatggggtccttcagtaaaatttgaacaaacacatctgctccttcacctcccaggccgctcgcaaaagcagtaatggttggcaagacagcttcagacaactccagccactgcaccaggcctgccatgaactctgtgcagaaggagctgtgttcgggttcaggaaataactgggacagggagatgccacagagggcagcataggcgaagcggttggcctcagtcagctcccggcccgtgggcaggtgtggctccccctctgcagtgggctcagctaccagaggctgctgaggcagcctctggcatggcctgttccacatggccattcccagcgccagatttcaagaaacagccgtgggcctctctctgtctgaagacaggctgctcaggttctggatggttctttggagaaatatgcaccaa

SEQ ID NO: 189572 - DNA, 1715 bp, Homo Sapiens
ctttgtacaaaaaagttggctgccatttacttcccatgttagagaagtggaggtggatggtctttaaaggggaaattcccaaagaccagtggatgaaaaagtggtgggagatgaagcgagagatagttggggtggtggaacctgtgccccatgatgaaacatactgtgaccccgcatctctgttccatgtttctaatgattactcattcattcgatattacacaaggaccctttaccaattccagtttcaagaagcactttgtcaagcagctaaacatgaaggccctctgcacaaatgtgacatctcaaactctacagaagctggacagaaactgttcaatatgctgaggcttggaaaatcagaaccctggaccctagcattggaaaatgttgtaggagcaaagaacatgaatgtaaggccactgctcaactactttgagcccttatttacctggctgaaagaccagaacaagaattcttttgtgggatggagtaccgactggagtccatatgcagaccaaagcatcaaagtgaggataagcctaaaatcagctcttggagataaagcatatgaatggaacgacaatgaaatgtacctgttccgatcatctgttgcatatgctatgaggcagtactttttaaaagtaaaaaatcagatgattctttttggggaggaggatgtgcgagtggctaatttgaaaccaagaatctcctttaatttctttgtcactgcacctaaaaatgtgtctgatatcattcctagaactgaagttgaaaaggccatcaggatgtcccggagccgtatcaatgatgctttccgtctgaatgacaacagcctagagtttctggggatacagccaacacttggacctcctaaccagccccctgtttccatatggctgattgtttttggagttgtgatgggagtgatagtggttggcattgtcatcctgatcttcactgggatcagagatcggaagaagaaaaataaagcaagaagtggagaaaatccttatgcctccatcgatattagcaaaggagaaaataatccaggattccaaaacactgatgatgttcagacctccttttagaaaaatctatgtttttcctcttgaggtgattttgttgtatgtaaatgttaatttcatggtatagaaaatataagatgataaagatatcattaaatgtcaaaactatgactctgttcagaaaaaaaattgtccaaagacaacatggccaaggagagagcatcttcattgacattgctttcagtatttatttctgtctctggatttgacttctgttctgtttcttaataaggattttgtattagagtatattagggaaagtgtgtatttggtctcacaggctgttcagggataatctaaatgtaaatgtctgttgaatttctgaagttgaaaacaaggatatatcattggagcaagtgttggatcttgtatggaatatggatggatcacttgtaaggacagtgcctgggaactggtgtagctgcaaggattgagaatggcatgcattagctcactttcatttaatccattgtcaaggatgacatgctttcttcacagtaactcagttcaagtactatggtgatttgcctacagtgatgtttggaatcgatcatgctttcttcaaaggtgacaggtctaaagagagaagaatccagggaacaggtagaggacattgctttttcactt

SEQ ID NO: 189573 - DNA, 2177 bp, Homo Sapiens
  misc_feature (1708)..(1726): n is a, c, g, or t
ttggcactgagccggctcaggcagagacgcggcaccatggctagcaagaaagtctgcattgtaggctccgggaactggggctcagccatcgccaagatcgtgggtggcaatgcagcccagctggcacagtttgacccacgggtgaccatgtgggtatttgaggaagacattggaggcaaaaagctgactgagatcatcaacacgcagcatgagaatgtcaaatacctgccagggcacaagttgcccccaaatgtggtggctgtcccagatgtggtccaggctgcagaggatgctgacatcctgatctttgtggtgccccatcagttcatcggcaagatctgtgaccagctcaagggccatctgaaggcaaacgccactggcatatctcttattaagggggtagacgagggccccaatgggctgaagctcatctcggaagtgattggggagcgcctcggcatccccatgagtgtgctgatgggggccaacattgccagcgaggtggctgatgagaagttctgtgagacaaccattggctgcaaggacccggcccagggacaactcctgaaagagctgatgcagacaccaaacttccgtatcacagtggtgcaagaggtggacacagtagagatctgtggagccttaaagaatgtagtggccgtgggggctggcttctgtgatggcctgggctttggcgacaacaccaaggcggcagtgatccggctgggactcatggagatgatagccttcgccaagctcttctgcagtggccctgtgtcctctgccaccttcttggagagctgtggtgttgctgacctgatcactacctgctatggagggcggaaccggaaagtggctgaggcctttgcgcgtacaggaaagtccattgagcagctggagaaagagttgctgaatgggcagaaactgcaggggcccgagacagcccgggagctatacagcatcctccagcacaagggcctggtagacaagtttcccttgttcatggctgtgtacaaggtgtgctacgagggccagccagtgggtgaattcatccactgcctgcagaatcatccagaacatatgtgagtggggccagggcccaggccaggccgcttttttaccccagtggagaccagcagaagcctggggtacctagtcaccaggatctccaggactcccagggagcagagtcttctcatcttttcactggaggacaggaggctatggggcccagctacgcacctggagatcctgaactgtcaagccactggcagcctcatgccaccacatttgccagaaatgcagttgccctgtccctctccagatgtggggctttctccatatcctctgggaggggtggaatcaagccccagtgctgcctgcttggtggcgggggtgatgtatgtggagaagggttgggggagaggccggtagggcaggggctgctagtggctgtctcacatacaccagtaatcctgttaaagggctgaagaagtatcttagccacaggagcgatgaggcaaggattgtcagggaggggtctgggcttctgagctgatgcaggccccaaggacccctttgctgacctctgccaggacccacacagcttcgatggatctcagtgtttgttaacaaaatacaaagatctcaaacaaaccccttttagcttctcctagcaacatctgtgtcctcagaaacctctggttcnnnnnnnnnnnnnnnnnnnaggctgccctggcacccaaattgctgccatgctggcatctgtagctcggtggcttgacattctccccagggacttcccggttcctagttctttgccagctcctccccactctgtgcgacctttccaagccttccctcaccctccccgccagcaccctctttggggagcaggaacttaatctgctgacagagctacacctttcataacaggctcagatcactcagctccctgtgacctttgtattcacccaggcttccttctcagtagctctagctgggggaggtgtcagctgggcccctcctgtgctatctccccagaggacatccctgactccacccctttcttcctcccaaactctgcacctcttcctcagctgctccagaccggccagggtaaccagctaacccatgcctggcatctgggagccagcagccagagggtggcccaaagg

SEQ ID NO: 189574 - DNA, 1295 bp, Homo Sapiens
  misc_feature (296)..(328): n is a, c, g, or t
  misc_feature (365)..(407): n is a, c, g, or t
  misc_feature (450)..(487): n is a, c, g, or t
ctttgtacaaaaaagttggctttgtttgcgttcttatagcgatgggaatcaatgcaagttcggttcccactgatggctcagggccatcgatgcacccctcggagctaatagcggagatgagaaacagtgggtttgcactgaaacgaaatgtactggggagaaacttgaccgcaaatgatccatcacaggagtatgttgcaagtgagggtgaagaagatccagaagttgaatttttaaagtcactaacaaccaaacaaaaacagaaacttctcaggaaattagatcgactggagaannnnnnnnnnnnnnnnnnnnnnnnnnnnnnnnngtttcagaagagcagaagtaaacacaaaaaacataannnnnnnnnnnnnnnnnnnnnnnnnnnnnnnnnnnnnnnnnnnactgagacttcagaaagcagtagtgagagtgagagtaacaatnnnnnnnnnnnnnnnnnnnnnnnnnnnnnnnnnnnnnncaagtgttcagggcataacaacagtgattctgaagagaaggacaagtctaagaagagaaagcttcatgaagaactttctagcagtcaccataaccgggaaaaagccaaggaaaagcccaggttcttaaaacacgagagttctagggaggacagcaaatggagccattctgattctgacaaaaagtccagaacccataaacatagcccagagaagagaggctctgaaagaaaggaggggagcagcagaagccacggcagggaggaaaggagccggagaagccggagcagaagtcctggtagttacaagcaaagggagacaaggaaacgggcacagcgaaatcctggtgaagagcaaagcagaagaaatgacagcagaagccatggcacagacttgtatagaggagaaaaaatgtacagagagcacccaggaggtacacatactaaagtgacacaaagagaatgaagcagaagtagagaagaaagactgtatgtgacaattacctgggaataaaaatatctccatttttttattgaatacctttagcaaggggtaaattatgtactgttgtctttctaataaaaaagctcaattttaatttttcatctctagactgtcaattcaagtacaaaactacatgagtactatgagaatgaattttgcaaatatttgtaagtaagctattttggggctgtggaaatattttctgttggtaactgtttcttgttccccataccagataaaaaccgcatataactctgtgacattttctttgttctgaaacatcattaaaagaatgacagtacattg

SEQ ID NO: 189575 - DNA, 828 bp, Homo Sapiens
ttggggcaaacagaacagcaagctgcggcccgaggtgctgcaggacctgcgggagaacacggagttcaccgaccacgagctgcaggagtggtacaagggcttcctcaaggactgccccaccggccacctgaccgtggacgagttcaagaagatctacgccaacttcttcccctacggcgacgcttccaagttcgccgagcacgtcttccgcaccttcgacaccaacggcgacggcaccatcgacttccgggagttcatcattgcgctgagcgtgacctcgcggggcaagctggagcagaagctcaagtgggccttcagcatgtacgacctggacggcaacggctacatcagccgcagcgagatgctggagatcgtgcaggccatctacaagatggtgtcgtctgtgatgaagatgccggaggatgagtccaccccggagaagcgcacagacaagatcttcaggcagatggacaccaacaatgacggcaaactgtccttggaagaattcatcagaggtgccaagagcgacccctccatcgtccgcctgctgcagtgcgaccccagcagtgccagtcagttctgagcgagcggcccctggacagttgcagagaaacacaggcttgtcgtgccgtttaagctttgcttgcaagagtggatgccccgcaatcgttcctgctctcccgggccccgggcctggggcatgcgttgcacctgcccggcccggtggctgcgcctccctcctccacctgaccaacgcgacattcctcccctcacgcctggcccggtcccttccagggcaactcccagggatgtggtgacatgcagggt

SEQ ID NO: 189576 - DNA, 1705 bp, Homo Sapiens
ttggcgccgctcgggtcagtcggcggccggactgggaagatggacgcagctactctgacctacgacactctccggtttgctgagtttgaagattttcctgagacctcagagcccgtttggatactgggtagaaaatacagcattttcacagaaaaggacgagatcttgtctgatgtggcatctagactttggtttacatacaggaaaaactttccagccattggggggacaggccccacctcggacacaggctggggctgcatgctgcggtgtggacagatgatctttgcccaagccctggtgtgccggcacctaggccgagattggaggtggacacaaaggaagaggcagccagacagctacttcagcgtcctcaacgcattcatcgacaggaaggacagttactactccattcaccagatagcgcaaatgggagttggcgaaggcaagtccataggccagtggtacgggcccaacactgtcgcccaggtcctgaagaagcttgctgtcttcgatacgtggagctccttggcggtccacattgcaatggacaacactgttgtgatggaggaaatcagaaggttgtgcaggaccagcgttccctgtgcaggcgccactgcgtttcctgcagattccgaccggcactgcaacggattccctgccggagctgaggtcaccaacaggccgtcgccatggagacccctggtacttctcattcccctgcgcctggggctcacggacatcaacgaggcctacgtggagacgctgaaggtcaaagcactcagcatggccacctcccgcacccctgctcacatctcctgccaggccccctcactcccggcctccccaaagcccacctctgacatgaagcttccctgagctgagcctgcagattgggtttcttgtgcctgtgggatgtcctgtggtctttcctggacagtaagctctttggtaccatgtcccctcctgtcccctcttgtgtcacccagttgggcctcagcaggcccttggttcccctatggcagtgggtggggggaccgtctgctcccacctgggacctgtgctcagtcccccgcccctccacagcactgcttcatgatgccccagtccctgggcgtcatcggagggaagcccaacagcgcccactacttcatcggctacgttggtgagtccagggttcccaccgtgtccctgtgggcctgggccttttaagggcattccatgagcaggtaccacaccccaggtgaccacttgaggccactggtggaaaagcagcatgccctggggttcattttcagcctggtcgcgggcggcctcctgtgtgcccctttccctgatggtctggtgccctcggctccctccccacctcctgcccactgcttctcagtgtgatgtgggtgcagtgggtctgaaatgcggcctcctctgtccctttcctctgccggctcggccacccacctgcccacctgcctcatcctcccaggtgaggagctcatctacctggacccccacaccacgcagccagccgtggagcccactgatggctgcttcatcccggacgagagcttccactgccagcacccgccgtgccgcatgagcatcgcggagcttgacccgtccatcgctgtgggtacgtggcggccacctgagcacacaggcatttggtgctgaatgctgtttgggaatgacgaggaaaactttcgga

SEQ ID NO: 189577 - DNA, 1039 bp, Homo Sapiens
  misc_feature (761)..(801): n is a, c, g, or t
gccattctcttcagccctcgctctcccctttccacagcctccacccctgacccccatcctcttttcctacctctctgtttggtttagaaattgctcaataagtcatttggggtttggcatcctgcccagccacttcccaaacatgaagacctctctgttgctttatgttgtacatgccccatagccatcccaacgtcctccccagtcctctcctggcaccagcaccttagaagttgttggcagaaggcacttaaactgtgggagaagtgtgcacacctttgagtcccttccctcaaggttaaagctcctgtcagactctcagaagggtctgtgggtgttgtatattaggcaaacaggggaaagcttagaggtccttctatatgtgttaataagctgtttctaagtgtttaaatttgaaaagcatcatgttctcatgatttatgggaatgaagcaagtactgaaatcaaattaaatactccctgggtcctgggtcagtttgaccctagccctggggtgaggcaagccccctcctatgaggatgagcaaaaatactactctcttcgccctgagttgctttctggatctggggcttcaggacttgctgcttcagtcagcctttattagcaccaaagactttatgaagatcccacacacagacacacatcccttcccgcctcccccctgccttcagtaggatctggctccgtggctggaggaccaacccctatagtgggaatgcagagcttaacgtgtactgctnnnnnnnnnnnnnnnnnnnnnnnnnnnnnnnnnnnnnnnnntccgcctcccaccctctccccatctgctctgggtatttttgtttttgtttagttttaggtttacaacagagaggaattaatttatcagcagcctaaaactgttgtgtttttcttatggtttaaaaaaacgccatgtcattgataactccctttctcccttcccttctcccggtctgctgatcactctttcatgcctgtgtatccagggtgctctgtttccccaccgttcccaggtgta

SEQ ID NO: 189578 - DNA, 1186 bp, Homo Sapiens
ccagcccatgctgaatcacatgatcctctgtaattcgtctggcaagctgcctcaattgttcagcacactcgctgtctgatttctggtttataagttcaaggatgttcatggttctatgaaaatggccacatgataaactcacactaacagctgtttcatgtttatccccagtaagtacccatactttgataccagccattctcaatgcttcaatagtttctcgaactttatcttgtagtctgtcttctactgctgtggctccaagtaatatcaggtctttctctatgaactggaaaacagctgccaatttctcttcccgctgctgcaaggcagtcctggcttcaaatatgcgtttatctatttcctcataatcttttgatgtaaattttctatatgctatacacagagttcttagccctttcaaagcaaattcatctacatgaattctggtttttttctatttctccacctatacatttagggagaattgatgactcagctcctttagcaaataataacttctcacctgaaggtgcctgaacaattacactcattctcctacgatctgaatcaaattccagaatatgaagcagtttgtaccgttccagttttccaagagttttaacctccatagtttcttcagaattgccaataaacacaataccaatccttgcagcagcttctactagagccttttcatctggtgaagatgcatagtactccaactgcgatggtgccaggttggattgccagggaccatcaccagtgcagtcagtttgaacattgctaatctgtacagtgtgacagagactgactgctttaaagaagagatcatgttctttaattagttcagtttcattttcaggactggttctgaaagaggaactggttgtaagatgggataagttgttaagatgggataaactactaagataagataagtttccttctgaagagtctggtgttggtccttcgggtacaagtctaccattaatttcttggtatttcatgccattaattgaacattcccgaaactgcatctcattttctgtcagtgtaccagttttatctgtaaacacgtactctacctgtccaagctcttcattcagatcggaagtattgacttgagctttctgatctgattcttcatgatacagatcaagatcccagccaataaaaaatccaa

SEQ ID NO: 189579 - DNA, 1179 bp, Homo Sapiens
ctttgtacaaaaaagttggctaaggaggctcttgaaccctctggagagaacgtcatccaaaacaaagagagcacaggttgatgcaagaggtggaaatgttctccatatcaagatgtggcccaaggggttaagtgggaacaatcattatacggactcttcagatttacagagaacttacacttcatctgttccacctctcctgcgatagtcctgggtgctccactgattggaggatagagccagctgtctgacacacaaatggtcttttcagccacagtcttatcaagtatcctatatgtattcctttctaaactgctactcatgaatgaggaaagtctgatgctaagatactgcctgcactggaatgttaaacactaaatatataacaagctgtgttttcctaagctgagatctgttgaataatgtttacattcgtcccccggggaaatgtatgctcagccaccattcaagagatgactgagaaggagatggtaagttcaagaagactgattgcacctgggacccaggccctttctttgggatccagtcccagccttcatccatgtgattaagatccaggccgctgaagttccccaggaaatgatcttccacttgagcaaccttttacttgatacgatttgcacctttctgttttcctgcagtcagggtggtggcctgcagggacctgagctttgctacccaaccagattcctcatagagattcctaatcactagtttcttgtattcataaactcaaagatacagagggcttggtttgaagttggggtgagatgaaacctttgctctgagccaaagctctggggccctgcattccctgcattgggttgatgactgtcagcatcactgccgcaggccatgcttgactaaggtacctggttttagccacagccacctccttgtatgttacctttcagctctggccaagagtgggacagggttttaaccacaaataggagcagcatgcaattcctagtgacttgctgcacagtattgtatcataattacaggaagtttttatttttaaaactggatctggggtatattcatttgccccatcacctctgtctaaaggcccaagtcctagggctgccatggtcacgagcacactgatgctccttaagattgtttatctggagctcacatagtgtggaacaaaaa

SEQ ID NO: 189580 - DNA, 1392 bp, Homo Sapiens
ttggtaaaccatgagatgtatgaggctaaatatgtgattagtgctattcctcctactctgggcatgaagattcacttcaatccccctctgccaatgatgagaaaccagatgatcactcgtgtgcctttgggttcagtcatcaagtgtatagtttattataaagagcctttctggaggaaaaaggattactgtggaaccatgattattgatggagaagaagctccagttgcctacacgttggatgataccaaacctgaaggcaactatgctgccataatgggatttatcctggcccacaaagccagaaaactggcacgtcttaccaaagaggaaaggttgaagaaactttgtgaactctatgccaaggttctgggttccctagaagctctggagccagtgcattatgaagaaaagaactggtgtgaggagcagtactctgggggctgctacacaacttatttcccccctgggatcctgactcaatatggaagggttctacgccagccagtggacaggatttactttgcaggcaccgagactgccacacactggagcggctacatggagggggctgtagaggccggggagagagcagcccgagagatcctgcatgccatggggaagattccagaggatgaaatctggcagtcagaaccagagtctgtggatgtccctgcacagcccatcaccaccacctttttggagagacatttgccctccgtgccaggcctgctcaggctgattggattgaccaccatcttttcagcaacggctcttggcttcctggcccacaaaagggggctacttgtgagagtctaaagagagagggtgtctgtaatcacactctcttcttactgtatttgggatatgagtttggggaaagagttgcagtaaagttccatgaagacaaatagtgtggagtgaggcggggagcatgaagataaatccaactctgactgtaaaatacatggtatctctttctccgttgtggcccctgcttagtgtcccttacctggcttagcgttctgtttcaccagtttccaagtttattgccctcaaaatctttagaatagttaaattggcttgtttaaggttcttgctgccccacaacacaccttgcccatgcacaaggaatgaattttttcctaccattatggctttgtgcttgttcttcctcttacctgtaatagcctcaccttccctagttctttgcattcgtccttagaatactgtattgttacagctgaaagacagtaaagaccatttagtcctcaccttctgttttagagttgagcaaactgaagcccacagaggtggaacttaattacctaagagccacaataagccactggtatctgggggactagaacacaaatccaacgcttttcccac

SEQ ID NO: 189581 - DNA, 1519 bp, Homo Sapiens
  misc_feature (1180)..(1240): n is a, c, g, or t
ttggattattttccttcttcatccctctctggccactatggaattctaatttgaaccatgtttggattgaagccgcctctgtattacttaccaggcatgagccatgagcccaagtccccttcgctagggatgctttccaccgcgaccaggaccaccgccaccgtcaaccccctcaccccctcgccgctcaatggcgccctggtgcccagcggcagccccgccaccagcagcgcgctgtcggcccaggccgcgccatcctccagctttgccgccgcgctgcgcaagctcgccaaacaggcggaggagcccagagggtcctcactgagcagcgagtcgtcccccgtgtcctctccggccaccaaccacagctcccccgccagcacacccaagcgcgtgcccatgggccctatcatcgtcccccctgggggccacagcgtgcccagcaccccccccgtggtgaccatcgctccaaccaaaaccgtgaatggtgtctggaggagtgagagccggcaggatgccggctccaggagcagcagtggaggtcgggaacgcctcattgtggagcctccgctccctcaggagaaggcagggggaccagccatcccctcgcacctgctcagcaccccctaccccttcggcctctcccccagctcagttgtgcaggattcccgcttcccgccactcaacctccagcggcccgtgcaccacgtggtgccccccagtaccgtgaccgaggactacctgagaagcttccggccctaccacaccaccgacgacctccgcatgtcctcactgcctcccctcggcctggacccggccactgctgcagcctactaccaccccagctacctggccccacaccccttcccccacccggccttcaggatggacgactcctactgcctgtctgccctgaggtccccgttctaccccatccccacccccggctccctgcccccactgcacccatcagcgatgcacctgcacctctctggggtccgctaccctcccgagctctcccactcatccctggcagcgctgcactcggagcgcatgtctggcctcagcgcggagaggctgcagatggacgaggagctaaggcgggagagggagcgcgagcgcgagcgcgagcgtgagcgtgaggctgaccgcgagcgggagaaggaacgtgagcgcgaannnnnnnnnnnnnnnnnnnnnnnnnnnnnnnnnnnnnnnnnnnnnnnnnnnnnnnnnnnnntggagcgccagcgggagcagcgggcccgggagaaggagctgctggccgccaaggccctggagcccagcttcctgcccgtggccgagctgcatgggctgcgtggccatgccactgaggagcggggcaagccctcggagcagctgaccccaacccgagcagagaagctgaaggatgccggcctgcggcgcccaagcccgtccaacaccccttgcatccggtgccaccccacaccacacggtgcccagcctcatctccaacatggcatcttctctctgccta

SEQ ID NO: 189582 - DNA, 427 bp, Homo Sapiens
tttgtacaaaaaagttggctcattgtttgtgaaagctgagctcacagcaaaacaagccaccatgaagctgtcggtgtgtctcctgctggtcacgctggccctctgctgctaccaggccaatgccgagttctgcccagctcttgtttctgagctgttagacttcttcttcattagtgaacctctgttcaagttaagtcttgccaaatttgatgcccctccggaagctgttgcagccaagttaggagtgaagagatgcacggatcaaatgtcccttcagaaacgaaccctcattgcggaagtcctggtgaaaatattgaaaaaatgtattgtgtgacatgtaaaaactttcatcctggtttccactgtctttcactgacaccccgatcttcactgcagaatgtaaaggtttcaaggtcttgatttaata

SEQ ID NO: 189583 - DNA, 601 bp, Homo Sapiens
caccctttaaatataagacacaaattctacagtattgaaataaggatttaaaggggtatttgtaaactttgccctccttgagaaatatggaactaccttagaggttaagaggaaggcagtgttctgacttctttaggtgatctgaaaaaaacacccttatcatccagtgtaccatctagagatcaccacagaatccatttttttcccagttccacaaaacactctgtttgccttcagtttttactcactagacaataattcaagtttagaaacaggtaatcagctatttgatcttaaaaggcaatgaattgttgggatatcagtgaactatgttgtatacttttgaatttttacattttataaatggaattgaaagttggataactgctttttttaaattttccaacagaagtaacaccacagttgctttgtttctttttatagcttacctgaggttcagttcttctttgtgaacctgtgagtactccacagtttactgggggaaaaggcttcagtaaagcagaggctagaattacagtatttatacatagcaacttttcataaaagtagaaaaattcaaaggaagctgtctcaatttgag

SEQ ID NO: 189584 - DNA, 915 bp, Homo Sapiens
acccacactcacgcacacctccaaaccgcacacccagacgcacacgcataccccagcgcccggcagttatgtattctccgctctgtctcacccaggatgaatttcatcctttcatcgaagcacttctgccccacgtccgagcctttgcctacacatggttcaacctgcaggcccgaaaacgaaaatacttcaaaaaacatgaaaagcgtatgtcaaaagaagaagagagagccgtgaaggatgaattgctaagtgaaaaaccagaggtcaagcagaagtgggcatctcgacttctggcaaagttgcggaaagatatccgacccgaatatcgagaggattttgttcttacagttacagggaaaaaacctccatgttgtgttctttccaacccagaccagaaaggcaagatgcgaagaattgactgcctccgccaggcagataaagtctggaggttggaccttgttatggtgattttgtttaaaggtattccgctggaaagtactgatggcgagcgccttgtaaagtccccacaatgctctaatccagggctctgtgtccaaccccatcacataggggtttctgttaaggaactcgatttatatttggcatactttgtgcatgcagcagattcaagtcaatctgaaagtcccagccagccaagtgacgctgacattaaggaccagccagaaaatggacatttgggcttccaggacagttttgtcacatcaggtgtttttagtgtcactgagctagtaagagtgtcacagacaccaatagctgcaggactggcccaaatttttctctctcagatttggaaagttcttcatactacagcatgagtccaggagcaatgaggaggtctttacccagcacatcctctacgagctccacaaagcgcctcaagtctgtggagga

SEQ ID NO: 189585 - DNA, 1070 bp, Homo Sapiens
ttggctgacatttcacacaggtaccagctttgcagaggaggtagactctttggcactttggcacagggatttggtttggtttggtttggtttgataattaaatttcagaatgtccttaggccattctccttctcttccatggagaatccagcctcacaaaaggattctttcaacttctttattgcaagaaacagttgagttaaatgtttgtttttggaaaggcgggatgtcagttcacatccttggtgtgtgtaagtaccgatgcacgccaccaccatgcctgtgttacagcagctccatgatggttgttgcccgaggttaatgtagttgtttgttagacctgtgtcttacacatttctcagagtaggatattagtattataatttaaagctacgacagtcacaaagtcacaataacttagaaacattgcgcatattcttctgaaatagcacttaaaaatgattagtgtcagtattttttcacttgggtcaatcaaatctgtaacactgaatccaagctattaaacaaaaagtatgcaatgaatgaattttgtaaatgaatagagagtatcagtttacaataatgttcttaaaacagtatcctctggatagttgagtatgggttagaaatcattgaaatggattggtcagaaattgctatctgtgtaaaatgtctaccagtagccagatgcttccagagttcttaatgcctctctggcatttcagagccagcatcccccaactcccacccctctgccatcacccagcccaaacacatcagctttcaaatgagatgatagtaaatgcggcaatgttaagacaagaaatttatgatttgccagattcaacatttatgacctccccttccaagactgtctccgttgaccttgtctttttggtatgccttggggtttctgataatgtgtggagtctcattatggctgagagtttagtgttttcacagtgaaagtgcagacatttgatttctttatgagttcccctgtgttagaaatggctatagaaaaatttgtcataataattttcatttgcatgaaatactgagggggtgca

SEQ ID NO: 189586 - DNA, 871 bp, Homo Sapiens
ttggcgcccggcagcagctgcacaggccggtggcccacgccttcgtcctggagtttctagccaccttccagctctgctgctgcacccacgagctgcaactgctgagcgaacagcaccccgcgcaccccacctggacgctgacgctcgtctacttcttctcgcttgtgcatggcctgactctggtgggcacgtccagcaacccgtgcggcgtgatgatgcagatgatgctggggggcatgtcccccgagacgggtgcggtgaggctattggctcagctggttagtgccctgtgcagcaggtactgcacaagcgccttgtggagcttgggtctgacccagtatcacgtcagcgagaggagcttcgcttgcaagaatcccatccgagtcgacttgctcaaagcggtcatcacagaggccgtctgctcctttctcttccacagcgctctgctgcacttccaggaagtccgaaccaagcttcgtatccacctgctggctgcactcatcacctttttggtctatgcaggaggaagtctaacaggagctgtatttaatccagctttggcactttcgctacatttcatgtgttttgatgaagcattccctcagttttttatagtatactggctggctccttctttaggtatattgttgatgattttgatgttcagctttttccttccatggctgcataacaaccatacaattaataaaaaggaataactgttccaaagactcagactaacatacaggacagtccagctggatgtgataaagattttatcacctcatatggaaaacaccggctgcactggattcatcagtgttaacttcctttgaggaagctgccttatagttttcatcactgggacttt

SEQ ID NO: 189587 - DNA, 935 bp, Homo Sapiens
  misc_feature (343)..(362): n is a, c, g, or t
aactttgtacaaaaaagttggccctaaagctgaattcaattcacatctctcagaggttcaccgtagacagctttggaaactacgcttcctgtggacaaattgacttctcctgaggtggatcttggaaagcactagaaactaaacatcttcaccaggtgctgaagaaaagtgtcttcgttttaattgccaagcagggatgtggacatttggatggtgactttcctgggtggttccccatagattcaccattgcctctaatggtgtctacacccgtcatactaccagctgagatggtggtgggcataaggagaatttgtgcctataacccttagtgtgttctggnnnnnnnnnnnnnnnnnnnnaaattgtcgtaaaatactcataaaacatactgtcttcaccatttttaagtgcacagttcagtaacgttaactgttaatacattcataatgctgtgtggccgtcaccgccgtccatctccataggcttctcagcttgtaaaatggaaactgtacccattaaacagtaattcccactcctcccagcccccgcagccaccattctgctttctgtctctctggttttgactattctcagtatctcatataaatggaatcatacagtgacttgtctttttgtgactggcttatttcacttagcataatgtcctcaaggttcatccatgttgtgtcaggtgacaggatttccttcctgtattatacatataatggaatgtttccgttacatgtgcgtaccacactctgttcctccatcagtgaacacttgggcttgcttcctcttgactattggggagtagtgctaatacagacacggggggggcaaataatctctttgagactctgcctttaattccttttaccacccagaaatttatcctttatcaaaataaccattaaaagttggtttgacttttt

SEQ ID NO: 189588 - DNA, 971 bp, Homo Sapiens
ttggccctgacctggagcagctggagccgtctttggaagatgtggaaagcatgaatgattttgatcccttgttttcagaggaaacacctggagtggagaagccggtcaccactgttcagcatatcatcagctatttgttgggacagaaagaattcgagctccagagattattttccagccatctctcataggagaagaacaggctgggattgcagagactcttcagtacattctggacaggtacccaaaggacattcaggaaatgctggttcagaacgttttcctcactggcggcaacacgatgtatcctggcatgaaagccagaatggagaaggaactgttggagatgagacccttccggtcttcttttcaggttcaacttgcctcgaaccctgtgctggatgcctggtacggtgctcgtgactgggccttgaaccacctagatgataatgaagtttggatcaccaggaaagagtatgaagaaaagggaggagagtacctcaaggagcactgtgcttccaacatctatgtccccatccgcctgccgaagcaggcctcccgctcctcagatgcccaggcatccagcaagggctccgctgctggtggaggtggtgctggtgagcaggcatagcagaggccctccagagagactgccctgcacaccatgccttgggccacgttggcagtgtgacaggactgtgattgtgctagatgtacctgcccaagtctgctggtcacatttggcagcaaaatggatttctcctggggagaacaaagttaagggacactgagacctgcccttcagaattcggttcacttgggggcttctgtggtagagactaactggccttctgatgtctttgttcaactgtggccagctgtgggcatcaacttcctggaagcagtaaaaggaagacagagtggagggacacaaatgtacaaaatgcacaggactgaatttcttacccaca

SEQ ID NO: 189589 - DNA, 986 bp, Homo Sapiens
ttggcggcggcgagcggacggctgcatttacggggtctcccggagggccagagtcggaaattgttgaaaacgttaaatttgattcctaaaaggactcaatggcttacagaagagacgaaatgtggtctgagggacgatatgaatatgaaagaattccgagagaacgagcacctcctcgaagtcatcccagtgatggctacaatagactagttaatattgtgccaaagaaaccaccactgctagacagacctggtgaaggaagctacaatagatattacagtcatgttgattaccgagactatgacgagggccgcagtttttctcatgatcgaagaagtggtccacctcacagaggagatgaatctggttatagatggacaagagacgatcattctgcaagcaggcaacctgaatacagggacatgagagatggctttagaagaaaaagtttctactcttcccattatgcgagagagcggtctccttataaaagggacaatacttttttcagagaatcacctgttggccgaaaggattctccacacagcagatctggttccagtgtcagtagcagaagctactctccagaaaggagcaaatcatactctttccatcagtctcaacatagaaagtccgtgcgtcctggtgcctcctacaaacggcagaatgaaggaaatcctgaaagagataaagagaggcctgtccagtctttgaaaacatcaagagatacttcaccctcaagtggttcagcagtttcttcatcaaaggtgttagacaaacccagtaggctaactgaaaaggaacttgctgaggctgcaagcaagtgggctgctgaaaagctagagaaatcagatgaaagtaacttgcctgaaatttctgagtatgaggcgggatccacagcaccattgtttactgaccagccagaggaacctgagtcaaacacaacacatggggatagaattatttgaagatagtcagctaaccac

SEQ ID NO: 189590 - DNA, 1551 bp, Homo Sapiens
ttgggctgagcgcacagaggagtggcagcgcatggctggcgtcaacaccgaccgcctggagccgctgcggggggagcccaaccccgtgcccaactttatccactgcaggtcctaccttgacatgctgaaggtggccgtcttccgatacctgttctggctggtgctggtggtggtgtttgtcacgggggccacccgcatcagcatcttcgggctgggctacctgctggcctgcttctacctgctgctcttcggcacggccctgctgcagagggacacacgggcccgcctcgtgctgtgggactgcctcattctgtacaacgtcaccgtcatcatctccaagaacatgctgtcgctcctggcctgcgtcttcgtggagcagatgcagaccggcttctgctgggtcatccagctcttcagccttgtatgcaccgtcaagggctactatgaccccaaggagatgatggacagagaccaggactgcctgctgcctgtggaggaggctggcatcatctgggacagcgtctgcttcttcttcctgctgctgcagcgccgcgtcttccttagccattactacctgcacgtcagggccgacctccaggccaccgccctgctagcctccaggggcttcgccctctacaacgctgccaacctcaagagcattgacttccaccgcacgatagaggagaagtccctggcccagctgaaaagacagatggagcgtatccgtgccaagcaggagaagcacaggcagggccgggtggaccgcagtcgcccccaggacaccctgggccccaaggaccccggcctggagccagggcccgacagtccagggggctcctccccgctacggaggcagtggtggcggccctggctggaccacgccacagtcatccactccggggactacttcctgtttgagtccgacagtgaggaagaggaggaggctgttcctgaagacccgaggccgtcggcacagagtgccttccagctggcgtaccaggcatgggtgaccaacgcccaggcggtgctgaggcggcggcagcaggagcaggagcaggcaaggcaggaacaggcaggacagctacccacaggaggtggtcccagccaggaggtggagccagcagagggccccgaggaggcagcggcaggccggagccatgtggtgcagagggtgctgagcacggcgcagttcctgtggatgctggggcaggcgctagtggatgagctgacacgctggctgcaggagttcacccggcaccacggcaccatgagcgacgtgctgcgggcagagcgctacctcctcacacaggagctcctgcagggcggcgaagtgcacaggggcgtgctggatcagctgtacacaagccaggccgaggccacgctgccaggccccaccgaggcccccaatgccccaagcaccgtgtccagtgggctgggcgcggaggagccactcagcagcatgacagacgacatgggcagccctctgagcacgggctaccacacccgcagtggcagtgaggaggcagtcaccgaaccccggggagcgtgagg

SEQ ID NO: 189591 - DNA, 1707 bp, Homo Sapiens
ttggcatctcctttcccctcaccttaaaggagactacccctttgccccatattgtcaacctaattttctctcgtactctctctagtgaatgatgtgctaccaagtatatgccaggctgtgagaggattatactgagtagtagaaagaagctaatttgaaataaaaattatttgtataattaagaaagcagattagatgcacatggtcaacaggaagttgactgtatgtctgctagttagattcaaaacatcataaagatgatagcatgtcaatatattagcctagccattatgttagcctttgttaggtgggcagcttttctgctttttcccttcctctgtggtgacaacggaggaaatatccaacagaaatacgtctaacagggaaattgggatcatagtttatatgcatctgatttgaaaggagtattgaggaaggttttcatatatgatctatctttggattaaaaagaacatttatgaaatcaagccttctaacactagttataattgagaagcaacagtaactccgtggacagcaatcaagcttaaaattgtaaataaatatggggataattcagttgttgcaaaaaaagggcagaattcagtagaataaagtccttttctcttacaggtattaaatgaggacagagaacctcaggtgttcttatgctagtgcttgctgagtgcatactaagaaagcaattccaaatagatgtatacatctagagagagtggtattagagattcagtgtatgtatttatttacatgagaggaaactggaatataatcccataaattatcaccttttatgactggaaaatatttgccaatgaagaaatggtctgtaggtatttgtcttaagatttttggctgtttaataaaaatgtaactttaacggtttcttatagttgcctttataaagtgtattgtctaaaatatttttgtatcatgtgcctttgaaatttgacagctgatttgggtgttggatttctgcccagccatttatcagtattatcattttattcagtagctggcaggtgtattagaccaacgagacttaggtaaggaatggaacctttcctgtggtttgactgcacattacaccagaagactccagtatccctcattccagaatgaggaaaaagtattctacaaagaacctaatcacctctgtgaaatctatgggatggaaacagtgtggccttaggagtcaaatagtctctgcatggtggggaggatcatgatggaatatgtgaatttctacttctagaagttgtgaaataggtcctgcacttttgcagaatgtccttctttaaacctggcttattccacagctgtagctgataacatgacctggggcttagctgctctagccctgggttcttggagacctcacactgcctggcccctggccatccacctaaggactgcctgctttctggtcacatgtggaccttgatacgactaagcggttacatatgtggttgtgcaaaagctttctgtttaatgcatagtgttaccgatttacatcttggttttcagtggcactatgtctaggaggcaatatccttttaaacagtgctttggctaagatagatacttgtgaatcaaagatagcacagaaatgaactaagtatatcccatttgggaattatattttgatactatttaaaatggtttcacctgttaaagggccaacagaac

SEQ ID NO: 189592 - DNA, 1393 bp, Homo Sapiens
ttgggaatgtttgaagcctgttcccaaggacccttgaacatctgtgaagaaatgactattctgcatggaggcttcttgctggccgagcagctgttccaccctaaggcactggcagaattaacaaagtctgactgggaacgtgttggacggcccatcgtggaggccttaagggagatctcctcggctgcagcacactcccagccctttgcctggaagaagaaagccctgatcatcatctgggccaaggttctgcagccgcaccccgtgaccccgtccgacacagagacacggtggcaggaagacctgttcttctcggtgggcaacatgatccccaccatcaaccacaccatcctcttcgagctgctcaaatccctggaagcttctggactctttatccagctcctgatggccctgcccaccaccatctgccatgcagaactagagcgctttctggaacatgtgaccgttgacacttctgccgaagacgtggccttcttcctggacgtctggtgggaggtgatgaagcacaagggtcacccgcaggaccccctgctctcccagtttagtgcaatggcccataagtacctgcctgccttagatgagttcccccatcctccaaagaggcttaggtcagacccagacgcgtgccccaccatgcccctgttggccatgctgctccgcgggctgacacagatccagagtcggatcctgggcccggggaggaagtgctgtgcgctggccaacctggctgacatgctgactgtgtttgcgctgacagaggatgacccccaggaggtgtctgcaaccgtgtatctggacaaactggccacggtgatctctgtgtggaactcggacacccagaatccctaccaccagcaggcgctggcagagaaggtgaaggaggcagaacgggatgtcagcctgacctcgctggccaaactccccagtgagaccattttcgtgggctgcgagttcctgcaccacctgctgcgggagtggggggaggagttgcaggccgtgctccgcagcagccaggggacaagttacgacagctaccggctgtgcgacagtctgacttccttcagccagaacgcgacgctctacctgaaccgcaccagcctgtccaaggaggacaggcaggtggtctctgagctggcggagtgtgtcagggacttcctgaggaaaacgagcacggtgctgaagaacagggccttggaggatatcacagcttccattgccatggccgtcatccagcagaagatggaccgccatatggaagtgtgctacatttttgcctctgagaagaagtgggccttctcggacgagtgggtagcctgccctggggagtaacagggccctctttccgagagccagacttgggtgttgaggctgc

SEQ ID NO: 189593 - DNA, 1452 bp, Homo Sapiens
  misc_feature (74)..(83): n is a, c, g, or t
  misc_feature (1325)..(1340): n is a, c, g, or t
ccaactttgtacaaaaaagttggcacaataatggcgttttccttctaatttctcagttgttaacttctttctcnnnnnnnnnnaggatagggccttgctctgtcacctgagctctagtgcagtagtgcaatcacagctcactgcaaccttactcctaggctcaagttaactattcttgatcctttattattactaatattctacaattgtttaaataaaaggaactttataatgaaacggttcggaatactggctcaagaacctatgtcaagatgagctgaattttggtaaattattttaggaattatgacaagctaattgaattaggcttgtgacaattagagtaatttacatgacaggtaaaactcctattaaaaatgtttagatgtttgcttctgtagatgtcactttagtaaaataccaatttagttttacttgtggcttatctagttagaacttagcagactttactgggacaagtttactgctcttgtaggagctcctctcacaagtagttgtaatgctgtagcatgatactcaggatcagtagcttgagatgttactatttttctcttcatctttgacttgcagagagcctcccgtttttggatccaggcatcttttctgaatcctggttccatcagtatacctgctctcctatgaccccaaatcatagtcaatggtgcctcaaacatagcaccttaagttaaaggctgcctagtgctctgaggaaagcttgctgattatcttcctgatctactcaccccaaaaggcagaaaagcaacacagtcactgctgtggtcatttgtaatgtaaagatcagttatatatatatatttgtaatgagagcaagtatatactcattatagaatcaatttaagaagtttaaaataacccagagtagaatttctatatctagtcttggtttttttcatgaatatttgcaagtaattaccattaaattcacacatgaaagattaatctgaaagatcagagaccatgttattcctgaccacgatagaactgctcctgtggtttgggacaagtaataaaacaactgcttgagttttgtttgtaaaatacataattaatatttgacctacctcaaaatgtattgaggatctgtgaaatgctaagtgcccaaaataaaatattgctgattgtctttttattaaaagtaaatttcctcattaagccaacctgccttctgtaagtcacagtgcttaaatctcaagatttttcattaggagagacctgtcgttaaggatttgtagtataattgcttagcctccattattggtgcttgggatagagaggttttagannnnnnnnnnnnnnnngttctgcctcaaagctcagtttattgaagacatttgtaagctattggatcatcacttaattcaagattttgactagtgagcttaaattgtccatttcttacaatttcaaagt

SEQ ID NO: 189594 - DNA, 1148 bp, Homo Sapiens
ttggatataattacctatatagaaatattagctgaatcatcttcattactaggttacaagaacaacactatctcagccaaggacaccctttctaactcaactcttactgaatttgtaaaaaccgtgaataattttgttcaaagggatacatttgtagtttgggacaagttatctgtgaatcataggagaacacatcttacaaaactcatgcacactgttgaacaagctactttaaggatatcccagagcttccaaaagaccacagagtttgatacaaattcaacggatatagctctcaaagttttcttttttgattcatataacatgaaacatattcatcctcatatgaatatggatggagactacataaatatatttccaaagagaaaagctgcatatgattcaaatggcaatgttgcagttgcatttttatattataagagtattggtcctttgctttcatcatctgacaacttcttattgaaacctcaaaattatgataattctgaagaggaggaaagagtcatatcttcagtaatttcagtctcaatgagctcaaacccacccacattatatgaacttgaaaaaataacatttacattaagtcatcgaaaggtcacagataggtataggagtctatgtgcattttggaattactcacctgataccatgaatggcagctggtcttcagagggctgtgagctgacatactcaaatgagacccacacctcatgccgctgtaatcacctgacacattttgcaattttgatgtcctctggtccttccattggtattaaagattataatattcttacaaggatcactcaactaggaataattatttcactgatttgtcttgccatatgcatttttaccttctggttcttcagtgaaattcaaagcaccaggacaacattcacaaaaaatctttgctgtagcctatttcttgctgaacttgtttttcttgttgggatcaatacaaatactaataagctcttctgttcaatcattgccggactgctacactacttctttttagctgcttttgcatggatgtgcattgaaggcatacatctctatctcattgttgtgggtgtcatctacaacaaagggatttttgcacaagaatttttatatctttggctatc

SEQ ID NO: 189595 - DNA, 948 bp, Homo Sapiens
agcaatgcttttcctataaaagccaactttgtacaaaaaagttggatttcactgatttgtcttgccatatgcatttttaccttctggttcttcagtgaaattcaaagcaccaggacaacaattcacaaaaatctttgctgtagcctatttcttgctgaacttgtttttcttgttgggatcaatacaaatactaataagctcttctgttcaatcattgccggactgctacactacttctttttagctgcttttgcatggatgtgcattgaaggcatacatctctatctcattgttgtgggtgtcatctacaacaagggatttttgcacaagaatttttatatctttggctatctaagcccagccgtggtagttggattttcggcagcactaggatacagatattatggcacaaccaaagtatgttggcttagcaccgaaaacaactttatttggagttttataggaccagcatgcctaatcattcttgttaatctcttggcttttggagtcatcatatacaaagtttttcgtcacactgcagggttgaaaccagaagttagttgctttgagaacataaggtcttgtgcaagaggagccctcgctcttctgttccttctcggcaccacctggatctttggggttctccatgttgtgcacgcatcagtggttacagcttacctcttcacagtcagcaatgctttccaggggatgttcatttttttattcctgtgtgttttatctagaaagattcaagaagaatattacagattgttcaaaaatgtcccctgtttgttttggatgtttaaggtaaacatagagaatggtggataattaccacctgcacaaaaataaaaatttccaagctgtggatgaccaatgtataaaaatgactcatcaaattatccaattataactactagaacaaaagtattttaaatcaattttttc

SEQ ID NO: 189596 - DNA, 1915 bp, Homo Sapiens
ttggcgcgtttggatgatttcacctgtgaaaaaatagggtctggcttcttttctgaagtgttcaaggtacgacaccgagcttctggtcaggtgatggctcttaagatgaacacattgagcagtaaccgggcaaacatgctgaaagaagtacagctcatgaatagactctcccatcccaacatccttaggttcatgggtgtatgtgttcatcaaggacaattgcatgcacttacagagtatatcaactccgggaacctggaacagttgctagacagtaacctgcatttgccttggactgtgagggtaaaactggcctatgacatagcagtgggcctcagctaccttcacttcaaaggcatttttcatcgggacctcacatctagaactgcctgataaagagggatgagaatggttactctgcagtggtagctgactttggcctggctgagaagatccccgatgtcagcatggggagtgagaagctggccgtggtgggttccccattctggatggcacctgaggttctccgagatgagccctataatgaaaaggcagatgtgttctcttatggtatcatcctctgcgagatcatcgcccgcatccaggccgatccggactatcttccccgcacagagaatttcgggctggactatgatgctttccagcacatggtgggagactgtcccccagattttctgcaacttactttcaactgctgtaacatggatcccaaactgcgcccatcttttgtggagattgggaagaccctggaggaaattctgagccgcctacaggaagaagagcaggagagggataggaagctgcagcccacagccaggggactcttggagaaagcacctggggtgaagcgactaagctcactggatgacaagatcccccacaagtcaccatgcccaagacgtaccatctggctgtctcgaagccagtcagatatcttttcccgtaagcccccacgtacagtgagtgtcttggacccatactaccggccacgagatggtgctgcccgcacccccaaagtcaacccttttagtgctcgccaggacctcatggggggcaagatcaagttttttgacctgcccagcaagtctgtcatctctctggtatttgacctggatgcaccagggcccggaactatgcccctggctgactggcaggagcccctggccccacctattcgccggtggcgttccttgcctggttcgcctgagttcttgcatcaagaggcttgtccatttgtgggccgggaagaatcgctatctgatgggcccccaccacgcctaagtagtctcaagtacagagttaaagagatcccaccattccgggcatctgccctaccagctgctcaagcccatgaggctatggactgctccattctccaggaagaaaatggttttgggtccaggccccaggggaccagtccatgccctgcgggtgcttctgaggagatggaggtagaagaaaggccagcaggctcaactccagccaccttctccacctcaggcataggcctgcaaacccagggaaagcaggatgggtgagggggtttagtccctgcctcaccttggggatggaccttcagctgaaaccatatggccccctaggtgcacagccttgattcttccctggagcctacagagcaggcaggctaggccaagccaggctcaacttctgggctcccagtgcccattggctgtgtatgacgggaggcagcagtgagaggccttcctagttagggccaacagctgataccaagcctctgaaatccagcaaggaggtctgcctcccaccagaccctctccagtgtacttccccagataggaccagaggatgtctagttctatgctgagctggcaggcagctattaccacggttctttccccaccccaggtctgtc

SEQ ID NO: 189597 - DNA, 1380 bp, Homo Sapiens
ttggctccgccccgcgccgcggctggcagggtgtgcgtgagtttggtggcggccggctgtgcagagacgccatgtaccggctcctgtcagcagtgactgcccgggctgccgcccccgggggcttggcctcaagctgcggacgacgcggggtccatcagcgcgccgggctgccgcctctcgaccctgaggcgtcgcctctggccgagccgccacaggagcagtccctcgccccgtggtctccgcagaccccggcgccgccctgctccaggtgcttcgccagagccatcgagagcagccgcgacctgctgcacaggatcaaggatgaggtgggcgcaccgggcatagtggttggagtttctgtagatggaaaagaagtctggtcagaaggtttaggttatgctgatgttgagaaccgtgtaccatgtaaaccagagacagttatgcgaattgctagcatcagcaaaagtctcaccatggttgctcttgccaaattgtgggaagcagggaaactggatcttgatattccagtacaacattatgttcccgaattcccagaaaaagaatatgaaggtgaaaaggtttctgtcacaacaagattactgatttcccatttaagtggaattcgtcattatgaaaaggacataaaaaaggtgaaagaagagaaagcttataaagccttgaagatgatgaaagagaatgttgcatttgagcaagaaaaagaaggcaaaagtaatgaaaagaatgattttactaaatttaaaacagagcaggagaatgaagccaaatgccggaattcaaaacctggcaagaaaaagaatgattttgaacaaggcgaattatatttgagagaaaagtttgaaaattcaattgaatccctaagattatttaaaaatgatcctttgttcttcaaacctggtagtcagtttttgtattcaacttttggctataccctactggcagccatagtagagagagcttcaggatgtaaatatttggactatatgcagaaaatattccatgacttggatatgctgacgactgtgcaggaagaaaacgagccagtgatttacaatagagcaagattttatgtttacaataaaaagaaacgtcttgtcaacacaccttacgtggataactcctataaatgggctggtggtggatttctgtctacagtgggtgaccttctgaaatttggggaatgcaatgctttatggttaccaagttgggctgtttaagactcaaatgaaaatctttttacctggatactccaaaccagaaacaattggttatgatgtcggaccccagtccctaaccacagagatgtcttggggataaaagaggggtaaatatgcaatgggcgttgggggtgtttgtgggaaa

SEQ ID NO: 189598 - DNA, 734 bp, Homo Sapiens
gctactcctccccgctcattccaacaacaacaccatctcaagtgaaatttctcctaaccagaatgcgcttgatgctcaaatgacttacccaacctgtgggattggttatcctgtctcctctgcatttgcattccacaataccttccctcattcgatatctgcccaaaaaaccagccaccctggttcaggaacaaaggttcagtttaatttgcagtttacaaaaccaaatgcctcagtaggatatgttcagtcaggagcaactattagtatgccttgctcaactgataaggaaaatggtgaaaatgtatggttggaatccaaatacctgaagaaaagggaagatagcattcctttacgcggactcagccagaacctatttagtaattcagaccatcatagagatggcactttaggagctttacatacatcttccaaacccacagcgctcccctctgcgtcttccgcctatttccctgggcagttacaaaacagttaattctagtgtcatgttttactttttattggtatttttagaaactcaggtgcttaaaaaatatgtaaacacaaaccagatcctcaaatagcaagtttcaaattttacttgagctgttaaagactggatactttaagtactgcttttatggcagttttataatatacggaacaaattttgtacttggggattggtaaagattgttgagtaaatgacatttttttggtttgtgaacatggcg

SEQ ID NO: 189599 - DNA, 649 bp, Homo Sapiens
tacaaaaaagttgggctaacagcaattgtgtcccaaagatgaagatactataacctcaaatggtgcaaatccagaactgggctggatgacatccctactgtgccatgtcctggggcatttggaagggactggacctctttcccctcatcaaaggaaacagcagtctttgcctctttctgttggttgtgcccaagggctacagtagctctgaaataacaagagctctgtaataacagtaataaatagctctgaaataacagtcctaagaactcctaaagtcctgagaacttttcttgtaatgcagctttttctcttcctgagaaacagtgtgttctaatgggattcccaggcagttcctacacctacggtgtgtgttccagcagggaggagttatgggctgggctgccttttcccatgggtcttcattcccaatggaaagttcactctgcttagtttggaattatttttctttcagttgttctggaacctttgctttttattgatttatacaatacaattggtgggagggtggacttgggatgggagtgggaaaagcatgtaagagctccttttgtgatggtccatctacccaaaagagatctgctttaatgaaccatactctttcatttttctaaattatatcaagttg

SEQ ID NO: 189600 - DNA, 1467 bp, Homo Sapiens
  misc_feature (1327)..(1359): n is a, c, g, or t
tttgtacaaaaaagttggcagaaatcccatccacactttacagacttgtaggaagaataccacttgggtcaaatatgttggtaacatcataaaatgtattcttttttggcttttccctgacattgcctcagtggatggtaaatgctgggagacacgcatttgatggagcaaaaattataaaccttgcagatactcttcgggtggttggttagctgatacgagttctaatgagatgactattaaattgattgtagattgattgctcttgcttttctgcttcttggtattttatctgcacagatctactctaatcttaatgtagtttatcccatgcaatcacatgataatctgggttaaatgcattttgtctgtataatggaaaggattatattgctttggggagattttattttggtgatattcatcctaaatggtgttctttggttctttccttgctaaaacttcttctgaatctctgtttctttgcttcgctagtacgctggggaggaggaggaggaagggagcggcagcagtgaaggatttgacccccctgccactgataggcagttctctggggcccggaatcagctgcgccgcccccagtatcgccctcagtaccggcagcggcggttcccgccttaccacgtgggacagacctttgaccgtcgctcacgggtcttaccccatcccaacagaatacaggctggtgagattggagagatgaaggatggagtcccagagggagcacaacttcagggaccggttcatcgaaatccaacttaccgcccaaggtaccgtagcaggggacctcctcgcccacgacctgccccagcagttggagaggctgaagataaagaaaatcagcaagccaccagtggtccaaaccagccgtctgttcgccgtggataccggcgtccctacaattaccggcgtcgcccgcgtcctcctaacgctccttcacaagatggcaaagaggccaaggcaggtgaagcaccaactgagaaccctgctccacccacccagcagagcagtgctgagtaacaccaggctcctcaggcaccttcaccatcggcaggtgacctaaagaattaatgaccattcagaaataaagcaaaaagcaggccacaaccttaaccaacaccaaagaaacatccaagcaataaagtggaagactaaccaagatttggacattggaatgtttactgttattctttaagaaacagctacaaaaagaaaatgtcaacaaatttttccagcaagctgagaacctgggaattcctgcacggaagacaagagagtagcctctccagtttcagcaaccgctagnnnnnnnnnnnnnnnnnnnnnnnnnnnnnnnnnggtaatatatatattgaaaacaagaaatattaataccacatggggagaaccccaaccaaagaaatctgaatatatagtaaatgctttttttcccgtttttgttcattt

SEQ ID NO: 189601 - DNA, 1111 bp, Homo Sapiens
  misc_feature (333)..(345): n is a, c, g, or t
aaagatttgtctacagttagacagggaagccaaggtcataactacagccagaactgtagaggctagacacctatgaggtataatgtattctattcaaactttgtgtgaaatggtatatttaactcacctgtcttgttggcatcacctctccttaaccctaacttcttgcaaaccctttaaagcatggacttgggaaatgtcagtgaccacctgccttctctgaccaggttaaaaaggctagccaatgcttgtgtaaaaaaaagaacaccacatattgttgtattatatgcaattggaaatgttcagttatcgcactttggtatccttttcagnnnnnnnnnnnnntctcaaaacttataaacataagcatggcattttacattgtaccaactgagtaacagtaaatagatgaggtgtgaccactataacttcttgaccaactttctatcttgaaactacacacatccaaccctaccagctaccattctaattctacaggatattttccagtgagacaagctgtacaatgaccactcttttcaaaacattccagaccatttccattttcttggatcataatatcgtgctttttctctttctgttttttaaactttatcccttcttgtacagatgaaaccagtccttctactgacagatacacaacactgtttgctcctagatattctgcaaggtgatcaaattctggtttattggcaatgagctcttcttttgtaggaatgtttattcccatgaagcatggatatttaattggtggtgaagctactcgaatgtgtacctcttttgcaccagattctttgagcagttttattataggtgagatggtattgcctctgacaattgaatcatctacaagaacaattcttttgcctttaaagttgtctgacaatactccaaatttttttgcaacaccaagttgtcttaacctcatgtttggctgaatgaaggttctccctacataccggtttttacacagcacctccacatatggaagtccacactttcctgcgtaagcaagagcagcaggcgtagcagattctggaacagtgctaacctaaatctgcatccacaggtgccaacttttttgtacaaa

SEQ ID NO: 189602 - DNA, 929 bp, Homo Sapiens
ttggtgattatcgactcttagaggcatctaaagctggagacttggaaactgtgaagcaactttgcagctctcaaaatgtgaattgtagagacttagagggccggcattccacgcccttacacttcgcagcaggctacaaccgcgtgtctgttgtagagtacctgctacaccacggtgccgatgtccatgccaaagacaagggtggcttggtgccccttcataatgcctgttcatatggacactatgaggtggctgagcttttagtaaggcatggggcttctgtcaatgtggcggacttatggaaatttacccctctccatgaagcagcagctaaaggaaagtatgaaatctgcaagctccttttaaaacatggagcagatccaactaaaaagaacagagatggaaatacacctttggatttggtaaaggaaggagacacagatattcaggacttactgagaggggatgctgctttgttggatgctgccaagaagggctgcctggcaagagtgcagaagctctgtaccccagagaatatcaactgcagagacacccagggcagaaattcaacccctctgcacctggcagcaggctataataacctggaagtagctgaatatcttctagagcatggagctgatgttaatgcccaggacaagggtggtttaattcctcttcataatgcggcatcttatgggcatgttgacatagcggctttattgataaaatacaacacgtgtgtaaatgcaacagataagtgggcgtttactcccctccatgaagcagcccagaaaggaaggacgcagctgtgcgccctcctcctagcgcatggtgcagaccccaccatgaagaaccaggaaggccagacgcctctggatctggcaacagctgacgatatcagagctttgctgatagatgccatgccccca

SEQ ID NO: 189603 - DNA, 1119 bp, Homo Sapiens
acaataatgattaccaccactttagtcaacccaggtttacattttgtggcagcagatgaccttgtcctcaggtttcaagaagcacacctcttctaaatgggggccatttccaaaagtagacattaacagagtctaagttcattctccagaccaaacactttcgacttaagattcttcagttctccttgtatcttatgtgcccgtctattgctgtcacggacctcacacagaagggcaagatcctggtttgcccgggcattaactgttgccttatacaacatttgctccaagtctttcagtttctgtcggagaactttaatatctgtcttaaagccttctacttccaggatacgtcgacgctccaatgcctcatagcgttttgtcattatctgtaaacgcttccccatcttgttagtgcgatccttgaagatctctctcctcattccctcttcctcacgaattcgggcaagttcttcttctaaggaaatgcactgctcttggtacatattggacagctttttctcttgtactaacttatcttttagggacttaatatattcactttgagcatggtgactctcatgcgtaacgggcaacacttttccaattttatcttctttcttcttacactgcaccctatattgcttaatctttgacatcaaattatctttttcaagcatccatgacttctctttattttggttttcagatctgagttgcagaaaatctttggtgctctcatagagcagttcttgggtgtggtgaagatttttggttagctctttgattttgttctgatttctctggtgctgaacttgtatttcctcaaggtgaatccgtctgtcctcgatgagcccttcaatttgttctcgagaaagtttggtctgctctcccagctgagcctgcagtgcttccacctgtaggatgagtgtctgtatgtctctttggtaatgctcagaactttcttttctctctctcgatggtcttcttttgcttattttaggatctgctttgaaagctgaagattcactctgctcacattcacctacagcctggatagtcttttggagaatggtgactttgtgaggaggctccttacaaaaataggtcacttcccaa

SEQ ID NO: 189604 - DNA, 321 bp, Homo Sapiens
  misc_feature (69)..(91): n is a, c, g, or t
cccaccgggctcttgggcgcggggtcctggggagccgcggcggccgcctccgtcggagcctgcgggagnnnnnnnnnnnnnnnnnnnnnnncctcgcccgcctcactcatgcctcctcctcctctgctctcgctcaggcgcctcggtggcggttggtcggcggttagcgcggctggtggtcgcggcggccggggctcgctctcggggaggccggggcggatctcgcggcgcaggcggcggcggccgaggtggggtcgcgcggcggaggcggctcgagcttcgtgctgcgcgctcgctcttgggctcctcgctcgatcccaa

SEQ ID NO: 189605 - DNA, 805 bp, Homo Sapiens
  misc_feature (584)..(614): n is a, c, g, or t
gagaatgtgagggggatgagtgcaggtggcgcagcgcggttcctgggacatgggtccttcactcctcggtgagatgttgcggctgccttttcttccaatgcggttgtggcaggagaatccacggatgtaatgttttcacctttttccctgagggtgctttctgaggaaccagtccttaagaggtggggtcttggattcctgacccaggcgtccggcagctgctcagtttccgagatgtcagactcatggaggagcaggctatgcccttccctccccattccccacccctcaagccccaggtcttactgtataatgatttattttccccacacgtctaccctcaaaattggcttcatgcagatttcccttgaatcctaatgctggagaggaaaggggaggggaagtgggagggtggtgggcagggtggcttgaccctgtcagcctcccagggaactcgggaccacggctccccagcacaggctgaacaagtaccaggaacaaggtctatgcatctgcgttagatctgaaggccttggcagcacctcttcaattttaagagaatcaggccgggcacggtggctcannnnnnnnnnnnnnnnnnnnnnnnnnnnnnnttatcttttattaaggacaaaatatgtctcttgatttgtgtatttgctaatagttaggcttgacttgaatgcagtattgcaaaatacccacaggattatttgtcaagatataggtttaggctaaattaaagctcttggctatgttttcctattttaatgtgggacataagaaagatccaacttttttgtac

SEQ ID NO: 189606 - DNA, 1435 bp, Homo Sapiens
  misc_feature (923)..(935): n is a, c, g, or t
  misc_feature (957)..(979): n is a, c, g, or t
ttggaatactgtaattttacaatccctttgatgcacagtccagtatactattttattacagatcattctatagggactacagacatgaattagaggaaatgtgcacagtcaaaatccagaatatcagctctgagaagtgtacactgttagaggatgaagcacatcctttgccatttcaaatactgtgccaggtggaggactaggaaggctcaaagatggtcatggttgacaagcactcttatcacaaacacatggatagcttatcacggagaacacatttcaaaggccagcaaagtgagcaagctattcacacaaagccaggagggattatgactaaactctccagtttataagcacaagtccacatctcacctcctcagaacaggtgctcaatggcaattaactaaaagttatgacatgaacattacagactttccagctagcattttgtaaacagcctgtgtctgtaagtcagcaaattaaaaacattcagttgtatcctctagacagaacaccacaccactacatgtacacttacaggctttcacattttatgtcagttcatacacaaatgtacaacttgtcagatacgtaaacacattttgccagaaatatgacagctgctttcagttgtacagtgagtgtctttaagagagaaaccgactccctagtcaacacttgaaggaaaaatagttacatttacattaagacagagtttggatacctttatatttttcaatcttgaatgagaagtaataatacagcatgtctgagaatagagcgcttcaaactttttttggcatagttaagtgcaaacttgataacctgtacttgtcacaactctccattgtaaaatggcgaaaatataggttgttcacgataggattttaaactgctgctaaaggcaatttattgtttcggcnnnnnnnnnnnnnttgctaagaagctgtgtaagcnnnnnnnnnnnnnnnnnnnnnnngcattcgtttctgataattctgggtacttccaactaacaggtaaatacattttaaagagtatattcttcttctgtctggaactactcaatgagcacaaagaaaacattttctgtcttccttaacagatttaggtattggtgggtgtggggcacagaacatgagcaaacagcttctgtttatcctctcagccacaaattcgcttttaggtatattttcctatacccttttgcaaattacaaaatcaccttcagaggaactatgggtagatgggattccaatatgcatatctggcaacaatcagcttcaaatcaaaccctttctggggtggctaagatccagctaatgtgtcatcagcaaaggcctctaatatgtgtttgcgtagtaatggaacagtttttaattgggcctgtttatagttgactgacagtaagttctatatggtatataacacccaa

SEQ ID NO: 189607 - DNA, 414 bp, Homo Sapiens
ttggatgaacaaaacgtttaaaagattttctaaagatgcagtgttgtttctgttcatcagggttaatatttctaactatattgcttgtaggtgaccccattctggatttgtttggtttggtttggttccagttaaaagagaggacaggaactaaatggggctaaccacttcaggtgcagcttgtgcgagggtagatggttcctgcacacagaagttaccacaggggtcaggttactttcttcaaataacagatttcagtactttatcctcattgtggaaacaagccaaaccaaatgaactctggaaaacctaaaacaaatgtacattttcctttgtgtatgtttctgtggccccacggcaatataaatccaatctttattctccctttgttgcactcatgctgaatcttccctt

SEQ ID NO: 189608 - DNA, 645 bp, Homo Sapiens
ttggctttttgatcagcctggctggtaccgtctagtactatgcagcggtcctcaagttggagaaaatgtgcctttcattcattacctctctggagacttcttgctggaatgaacagtgtgctcagggactatttggaactggatgtttttgaattattttatacttagagatattctgaattttttgagggccttttaacactccccgagctgattgtttgcaagtgtgtttgttccagagtgtggaagtataaagacatgggcatcacgtaaattggttttgtttgctattctgtgtgtcagaaccaacgagtgtaatggagagggcaggtcatctcttattgtttctaaaacaacttaaaaggtgtagattgggaagaggtgagtgatccagctttctccttttggattgaggctatgtacttggtgggggcaggggagggaatatattataatactattcagttgggataatgggaaaaacagagtatatagggtatctacccagcctagaaagcacaggaacaatacgtcatatatttggaacagttattgtctgtgccatgaccttcatgataccagtgagaagccaggctagagaaataaaatcctgaattacattttagtaattgttttcaagacaac

SEQ ID NO: 189609 - DNA, 506 bp, Homo Sapiens
gcgggtggccagtcttggtgatggggtctgggcccacccgggaatgctgggggttggggcaggcccgcggtcctgcggggtgacaccgctgtgcctggggtgcagaccccgagaagcacaggccccctcctgctctgctgtgagtcttccctgccctctccctcctgcaacatgcaccctcggggaagaaccacgatttctaagtgagacacacccagaagaaaacagggttcccgatgtttggattctggcctgggaagtgcgtggggagggtgtggcctttaggaggccgggccaggccgcacctgtggagaagcagcacctgggagccagaggggcctgtggcatccaccctgcccagggagagagcgccacacagcggtcatctcaggtcctgatgtcggagtggaggccccagaggctcctgcccggcccccataggtggtcagagcccccaggggttactgcagcgaggagtgggccgtggccaacttttttgtacaaag

SEQ ID NO: 189610 - DNA, 838 bp, Homo Sapiens
ttgggtctatcctgaaataataatggagagtatactgtagattacatgtttacccatcaaatctgacttaaaaggttaaatggaaggttttataggtaaggtaattgattggggaatggggtagggggaggagttgtgggggaataatgtgcatttcagtctcaacgcatagataaatttaggggaattggatgtattattcaactttgatttgggttgtaaaatgtgttaaatcctgttcattgaactcccatcaactcttataaaattcatgctgatcttcattaccgttgcatgattggaaatgtttaaaacattgtacagttttagtatagagaaatgtaatggtttttgtgaccagtttctgtctgcatgtaatttggatttctcaaatacattcattagtaatttatcagtaacattagttttatttttgttcatctccttatctataaaaaggggatattcttaggataaatacatgaaaaattatacttgatagcttaactataatcagctatttttgtatttttgtaatatttgtccactaagctggagaagcagcctcatacagttgattttgtgtatgtggctagtcttattgtcactatgtaagtaatccaatggttttagaaactaaactttctagagcaataaaatgactataatgttaagtaaacataatgttgatttctaattatgttttaaaaaatgaagtcttgaattatatcaagaaattttggcagctgaagtcatgtttattttgaagctgttagttttttcctataatttaaaaagatcttttagatttatagaagagtcagaaatgtacaagaga

SEQ ID NO: 189611 - DNA, 1057 bp, Homo Sapiens
ttgggtcctcagagccgtggagcaagccatgggccacagccaggaccggctcaccaccttccaggagaaccaagcccgcactcacgtcctcagcaaggaggtccagcacctccgggaggagaagtccaagcagttcctcgacttgatggagactattgataagcagcgagaagagatggccaagagcagcagggcgtcggcagcccgtgtagggcagcttcaggaagccctgaatgagaggcactccatcatcaacgctctcaaggccaagctgcagatgacagaggccgccctggctctgtcggagcagaaggcccaggacctgggggagctcctggccacagcggagcaggagcagctgagcctgtcacagaggcaggccaaggagctcaagctggagcagcaggaagctgcagagcgggagtctaaactcctcagagacttgtctgctgccaatgaaaagaacctgcttctgcaaaaccaggtagacgagttggagcggaagttcaggtgtcagcaggagcagctgttccagaccaggcaggagatgaccagcatgtcagctgagctgaagatgcgggccatccaggccgaggagcgcctggacatggagaagagaagatgcagacagagcctggaggactccgaaagcctgcgcatcaaggaggtggagcatatgacccgtcacctggaggagagtgagaaggccatgcaggagcgggtgcagaggctggaggcggcgcggctgtccctggaggaggagctgagccgagtgaaagcagcggcactcagcgagcgtggccaggctgaggaggagctgatcaaggccaagagccaggcccgcctggaggagcaacagcgcctggctcacctggaggacaagctgagactgctggcgcagcacgggacgaggcgcagggcgcttgcctacagcagaagcaggtggtggcgaggcccagacccgggtcagccagctgggcctgcaagttgaagggcctgcggcggcgcctgggagagctgcagcatgagctgagcctcaaggaccaggaaagggtgg

SEQ ID NO: 189612 - DNA, 1195 bp, Homo Sapiens
ttgggtaaagaattgtatgatatgttccttttttcagttcaccaagttggaagccttttgcagctctgtggcttggaatttcatttgagcaatttctataggatatgtatttattattgattgttatttaatttttttccaattttacctgtattaccaaactgggttctccaataatgtccaaattgtaatgttgccttgcttcaagataaagtgtatttgggaataatattataaacccttacaaattttatgcatgtatctactgcatccttcaactctcactagaaaatcttttgaaaccaaatggattaatttatggctatttataatttgctttgacatctcactgttggaaattttttaaagatgagatttgcctttataatgtaaattatgatttttgttttacatgtgggtttctatagttttaattttttcagcttttaagatacgagttttgtgtaatttggtatttttaatcatttatgttattttaaaagctcagaatatcacattgaaattactataaatacatttaaaattatctattttagatctaaggaaatactacagagatattttcatgggttcagtaacttttcattttataacattgggcacggtacagagtgattgtcacataaggtacttgaagatttattagtttaattctatttttacagtaaccttgaattcttctgagttttgcatgtattaaattcaattaatgctgaacatgaagagtaaagtatttatctgaaagaagtttctgggttaggagaagtaatgaatgtatccatttgtacatggtttacatgttgtggatgctttgtaaacattttcctgtatgtttaaattgtgtttcagcaggatgtaattgcccttgtgtgtagttaaaatgagtcatcatctggtcctttgtgaaatggaattcatggtattttctgtaacgttttcctgaaactgtttctggagagccacacatttaaatacagacagctttcctgatcatttgatttattgtgcacctgatttttggtctaatatgaattattgccaccatatattttatttattctttagattttagccttgtaagttaaaatgctttacatgatgatgtgaaaagctgtttgtccctttactggctttggggggttgttaaaagatacggaatgaataatgcaaaatg

SEQ ID NO: 189613 - DNA, 368 bp, Homo Sapiens
ccgcctctgggtctcgtactcgaagatcttcttctcgtaaagcctacgagttgatcctactacaggcccgtgcgggatgttgtaccggcgcagcaaggtggtcagctcggtatccgaaagatctgcgtagttgtccatggcgggtgcgggctcaggcggaggcctggcggcggcccgggcctaccaaaaccggccgagcaacggctgccgaggagcacggcgggggcggcacgagcgcatcgggagcggccgcgctcgcgtcacagccgaatcgttgtcgcgtcacagccgaatcgttgtcgcgtcacggccgctggctccgcaggctgcgcgcggtgcgcggggcggccaacttttttgtacaaagt

SEQ ID NO: 189614 - DNA, 1336 bp, Homo Sapiens
ccaactttgtacaaaaaagttggctatgaatgaatctcaaaattaggcagtttttgccagttgctttcttagctcaaaggagaaccagaatttttttgacagccacaaacaagaatacaggtatcttggatttcagacacattctgtttcttcataaaaattttacttaaaatctgtaacgctagatattgactatccttagttgagtcactgaggtttaaacacaatggtaagtcttaaagtctgctatttacagagcattgaatctgtaccaatttgcaatagaaagccttcagtatgcaagaagtttgcatgggtattaagaacacagcctaaataaggcatttgatctaatctgcaggaagaattttcttccccaaaacagaattataaaagcttactttaaacaggaggcagaataattcttttaggaaaccatttcattctgtttctactaacctataccatctgagaattctaggaagaataataaaatctcgtgtattccacagcaaacttacataccataaagacagaattcctaaacatcttggagccgtctgtctctcccatatgatggctgtctgtatatttttacttggggtgctgctttattggctttgaaaaacactgtcagataagctcagtaatatgttaccatgggataaaaatatgtatccctgcctaagaataacttgtgcatttgttatggaaatttaattcatatggtgtttacagtactacttttgtaacttccagactttctaaaacattctgcttaaaaaccatataaaatataattccaaagtctctgctgtcaagatagattcgagagaaagcacgtggccatgtatgctttaaccttaaactgcatacacatgtagtgatacctaggctgcatttagatcaccgtgtgctcaggccaggtgtgaatcctgaggtccatggaggtgcagagatgagattactcctattcacgttgaagtgatttgctttgttaacaaaaaattgcagctattgtctagctttcatttttttactgagaactttaaattagtcccctattagaatagggttgctactcatctttttttaaaaaccgaatttcatcatttatctaaagagaaaatatgcagaataactggtcttgttaagagtgcaatattatatttttatgtaaaaataaaaattaatttggggggattatttattcagcatgaaacctaatatgtatatgtttgaaatacttcataatgtgcatgttgtagcaaacatttctgtaaattatcacaagctctgttacctttatatacactgcctcttcaatttggaaata

SEQ ID NO: 189615 - DNA, 1337 bp, Homo Sapiens
  misc_feature (301)..(311): n is a, c, g, or t
ttggcacagtaattcattcataatccagcatctgaaatacagcagccacttttaagcaaaatgcattctcttacattttaagtcaatatttcagaaaatcaaaataatagtgaatgtcttaacagattatgttaagttctatttgtgaatgcatattcataaaaattagcaaattctgggttctacatgtttcaaatgataattttatgctaggctttgtatgatgactcatgttttcaataaattaaatactaaaatgaactgtatacttttaccacaccccagtacaaaaatatattcnnnnnnnnnnnccccctaagggacttttaaaagctgaagagcacagctggtcccttgcggaattggtacatgcagtagttttactcacacactatcattctcttgcctcattcacattcggctgtggaatcagtccagaaattcattgtgatggtggccacacattcagacctccttctgttagcaactactgcatctgtgacattacaaatggcaatcacagtgtggatgagatgccggtcaactcagcagaaaatgtttctgtaagtgattctttctttgaggttgaagccctcatggaaaagatgaggcagttacaggaatgtcgagatgaagaagaggcaagtcaggaagagatggcttcacgttttgaaatagaaaaaagagagagtatgtttgtcttctcttcagatgatgaagaagttacaccagcaagagctgtatctcgtcattttgaggatactagttatggctataaagatttctctagacatgggatgcatgttccaacatttcgtgtccaggactattgctgggaagatcatggttattctttggtaaatcgcctttatccagatgtgggacagttgattgatgaaaaatttcacattgcttacaatcttacttataatacaatggcaatgcacaaagatgttgatacctcaatgcttagacgggcaatttggaactatattcactgcatgtttggaataagatatgatgattatgactatggtgaaattaaccagctattggatcgtagctttaaagtttatatcaaaactgttgtttgcactcctgaaaaggttaccaaaagaatgtatgatagcttctggaggcagttcaagcactctgagaagttcatgttaatctgcttcttatagaagctaggatgcaagcagaactcctttatgctctgagagccattacccgctatatgacctgatgcctttccttcattaagatgattctgggatgatcagcagatatagtctacacggggaaggtactaggctccaggaccatggtagacaaaa

SEQ ID NO: 189616 - DNA, 918 bp, Homo Sapiens
gagggcttcaactcaaagaaagaatcacttacagaaacattttctgctgagttgaccggcatctcatccacactgtgattgccatttgtaatgtcacagatgcagtagttgctaacagaaggaggtctgaatgtgtggccaccatcacaatgaatttctggactgattccacagccgaatgtgaatgaggcaagagaatgatagtgtgtgagtaaaactactgcatgtaccaattccgcaagggaccagctgtgctcttcagcttttaaaagtccctcaatgtgttctttggtaataagccaaggtctatgggctaacactttgttaagttctcctaaattctgtagtttttgaggagcattctctaaaccattgagccacttggggtccccaccaacatgaaggaaatcatttacatgcaggttcactaagtaggagcactgatgtcttgccgcagccattattccaatgtagtgacgataatgtaggggtaacggcccatccatttgcagtagatagtgctgagtttttaagaaactttctaaatattgtgggtggaaaaccatcactaacgtaatgttatccaaacggcccaaagcagcaaaagaatctgcaaataaagcatgcatctgtgcgtcttcactccccacttggaggatctccttttctgggatgaatctgcttggtccctgtcctagtggtcgaggaattctaatgccaagttcctcgtcctggtcgcggcccccgccgcactgcttgcagcccagcagccccgagaccgccaaaggggccgtgtacgcctcgttcgcggcggcggccaagcgcatgtcggcgcggggacggctgcggacgcgcggaggcggcgagcgctgggcagccggccgcggctcctggctgcagcgcctcagtcagcaccaa

SEQ ID NO: 189617 - DNA, 703 bp, Homo Sapiens
ttgggaagaatgccagagaaataacacaggtacagtccttggacacaaatgatatcacatatgcagacctgaacctgcccaaggggaagaagcctgctccccaggctgcggagcccaacaaccacacggagtatgccagcattcagaccagcccgcagcccgcgtcggaggacaccctcacctatgctgacctggacatggtccacctcaaccggacccccaagcagccggcccccaagcctgagccgtccttctcagagtacgccagcgtccaggtcccgaggaagtgaatgggaccgtggtttgctctagcacccatctctacgcgctttcttgtcccacagggagccgccgtgatgagcacagccaacccagttcccggagggctggggcggtgcaggctctgggacccaggggccagggtggctcttctctccccacccctccttggctctccagcacttcctgggcagccacggccccctccccccacattgccacatacctggaggctgacgttgccaaaccagccagggaaccaacctgggaagtggccagaacttcctggggtccaagaactcttgtgcctccgtccatcaccatgtgggttttgaagaccctcgactgcctccccgatgctccgaagcctgatcttccagggtggggaggagaaaatcccacctcccctgacctccaccacctc

SEQ ID NO: 189618 - DNA, 864 bp, Homo Sapiens
  misc_feature (144)..(161): n is a, c, g, or t
  misc_feature (163)..(197): n is a, c, g, or t
  misc_feature (206)..(228): n is a, c, g, or t
ttggtttttaaacagagttgtatttttatatgtaatacatttatattcatagaaaaatatctgtaaagatatacctgtaactgagtctatcttaatcctgtgttatgctcagctcctagtacatggtagacataaaataaatannnnnnnnnnnnnnnnnngnnnnnnnnnnnnnnnnnnnnnnnnnnnnnnnnnnngctaaagcnnnnnnnnnnnnnnnnnnnnnnngaaacaaagatggtcaggcagacaaaaggggcagacagccagacaggtcacccctagaggaaggcgcacgcagacagaataggatgagatgagcagggaaggagaagtgaggtggagagaggatgggacctacagattcagagtgggaggcctctgaacttgtccacagttccttgttcctccctaggtcagcaatctgaagatggtcttacggagcctagtagagtactcccaggatgtcctggcgcatcctgtgtcagaagagcatctcccagatgtgagcctcattggagagttctcaaacccggcagagctcggcaagctgcttcagctggtgctgggctgtgccatcagttgcgagaaaaagcaggaccacatccagagaatcatgacgctggaagaatcggttcagcatgtggtgatggaagccatccaagagctcatgaccaaagacactcctgactccctgtcaccagagacgtatggcaactttgacagccagtcccgcagtactatttcctaagtgaggaggctgaggagggggacgaattacagcagcgctgtctggatctggagcggcagctgatgctcctgtcagaggagaagcagagcctggcgcaagaaaatgcaggctgc

SEQ ID NO: 189619 - DNA, 1113 bp, Homo Sapiens
gagaagaaaaagccccccagaacgcagagcctcttctttccccacccctacctgtccacacccccagctgagcacatgtagaaaaactatggtattgctgattctgtgacaagaatcttcccccatcggtaacctgccaaacacccacagaacatggcaatgaagccctacatgcttttaaaagaaaacagactgttaagactaacagaaaccaacttagtacggcgaatacggtaatgagtaccaaattccgcagaactgagagctcaacagaagtgcagttccacctttcattgtgccagcagcactgattgatttaaagttcagatcaacgtgctctcctcagcttcagagagggtctcatttcctacaccaatgggaatcactgaggttacccaaaaatgtaaaatcctggagagctcaaacgcaaacatggtttgtagcaaaagattcaaccaagacgcccgcagccactacagaggggccaggacgcagcagcctgcgggcactctcagaacctcgtgcacacaacttatgggaacttacaaaatcataaaaaaggccccacattcttaaaggtataatttatagcgcattctgtacaaaagcagtcttttacaagggactctgctgctcctcagaagaaatccatagccctgggccttctccttggtgtggtggtcaggggcttcttggccaccaggggtgagctggcaggtgagctggtgggggtcttcagcaccccgtggaggggcttctgttcagggtcgaaggccactcgagaagggcccgtgggactgaccaagatactcttgtctgtcttcttgaattcggcagtcatgtttctgttcagcccaaaggtgactttcttggagctggatggtgtcttgtttagctggacggcagggcctggagggtgggtggcagtgctgctcttggctcttctgaagaacaggggctttggtaagaagggggtgtcaaacttcacaaagtcgctctctgccctcagcttctgcttcttcagggaactgcaagtcccactgcttcccagagcctggggttgcccagcttcggactccagcaccccgttgtgctccaccaagtttgacccaa

SEQ ID NO: 189620 - DNA, 1484 bp, Homo Sapiens
ggctttggccagcagtgagacagcagccaggggcttccataactggtggggaggggtagctggaggggtgagccctgccacgttggccagttctggggcttgtaaccggtctaggggcctcttctcctggggaatgtcaacgccgcttgagtttctacagccaagctgtcagcaggagccggaggaggacactcctttttggcttctgatttctcaaactgctccagcagactggacaggtccgatgcctcaattccaatctcactgatgaaagcctgtaccacatcttcagaaccctgagtacgtggggtaggcaggaaggacagcttccttagacgggctgggtggacagcaggcagcttggggacagtgctctgccttggtgtgggaacagccttggtagcaggcaaggggggcttctccctgggcctggtctcttgggtctcaggctttagcctctctgatgcaggctcctcaacagtcacaccttcagcagacacacatgctagagccttcatctggggactttgcaccagggcagacaccttgtgtttcggatggggagatgcaggcactggcttgacctccaccttggtaggctctgtctgaggagctccatggccaggtagcccaagactgaggggaggagccatcgacaagggaagtacattttcaggagggccagctggagtgcccctagactccattttaggttggggaacagctctcccaatggaggctggaggcaaaggaggtgggggaacagtagaccagaatggagcatgttgaggccctgggccccatcccaagggcccataggtacatgtggaactgtaaggtgagactggggcaggagggggtgcccaaggcacactgcaagtgggaggcacggcataggcaccaggagtaccagacactaggggcaccgttggtggggggggcaggcaaggatagccagaaggggacacatgaggataacaaggccaggatggcaagggggcatagtgagtaaacggatcaggtagtactggccccatagacaatggaagactaggaggctgcaagggaggtgggggcagactggggggcatgccaagcccacctgcagggaaaggcagggcagcagacatcgagggaggtgtgggcacagcaggggacacagactgcacaggaggggaaggtctcgccaacagtggcatctcctgggatggcacctgctcagtgggagatgaggccacaggtttgcttacaggtggctcaggactaggagaagcagggctgggacctacaggcacaaggcaaatctcaaggggtgtttcagggcttctctgcagagctgtcttcttggctggggctggtgggatgacaagacaagggatgtctgccagccctgtgggagtctctggaaggctaggccacttcccagttgggggctgtggacttctctcttctgtttctgcttggcgttgctgccttcgtcccaa

SEQ ID NO: 189621 - DNA, 865 bp, Homo Sapiens
ttgggtcggctgtctccagcctgctgcgcgcccaggggtcccgcgggttttcgggcgcagggtggcgcccgcggcaggcggcggccatgaacttctccgaggtattcaagctctccagcttactctgcaagttctccccggacggcaagtacctggcttcctgtgtccagtaccggttagtggtccgggatgtgaacacccttcagatccttcagctgtacacgtgcctagaccagatccagcacatcgagtggtcggcagactcgctcttcatcctgtgcgccatgtacaagcgagggctggtgcaggtctggtctttagagcagcccgaatggcactgcaaaatagacgagggctcagccgggctggtggcctcgtgctggagcccggacgggcgccacattctcaacaccacggaattccatctgcggataaccgtctggtccttgtgcacaaaatccgtgtcttacatcaaatacccgaaagcttgtctgcagggaatcaccttcaccagggacggccgctacatggcgctggcagaacggcgcgactgcaaagattacgtgagcatcttcgtctgcagtgattggcagctcctgcggcattttgatacggacacccaggatctcacagggattgagtgggccccaaacggctgtgtgctggcagtgtgggacacctgcttggagtacaagattctgctgtactcattggatggccggttgttgtccacgtacagcgcttacgagtggtccctgggcatcaagtctgtggcctggagcccccagcagtcagttcctggcagttgggagctatgatggaaaggtgcgcatccttatcacgtgacttggaaaatgatcacgga

SEQ ID NO: 189622 - DNA, 1675 bp, Homo Sapiens
ttggggcagctttgtgccagcagaggaggccgaaattggggcagtagacgccatcttcacacgaattcatagctgcgaatccatctcccttggcctctccaccttcatgatcgacctcaaccagcaggtggcgaaagcagtgaacaatgccactgcacagtcgctggtccttattgatgaatttggaaagggaaccaacacggtggatgggctcgcgcttctggccgctgtgctccgacactggctggcacgtggacccacatgcccccacatctttgtggccaccaactttctgagccttgttcagctacaactgctgccacaagggcccctggtgcagtatttgaccatggagacctgtgaggatggcaacgatcttgtcttcttctatcaggtttgcgaaggtgttgcgaaggccagccatgcctcccacacagctgcccaggctgggcttcctgacaagcttgtggctcgtggcaaggaggtctcagacttgatccgcagtggaaaacccatcaagcctgtcaaggagttgctaaagaagaaccaaatggaaaattgccagacattagtggataagtttatgaaactggatttggaagatcctaacctggacttgaacgttttcatgagccaggaagtgctgcctgctgccaccagcatcctctgagagtccttccagtgtcctccccagcctcctgagactccggtgggctgccatgccctctttgtttccttatctccctcagacgcagagtttttagtttctctagaaattttgtttcatattaggaataaagtttattttgaagaaagatattgtttctttagtctcaaaacaagagactaggaaagatccaaaacacagagcaggagtccacaggggaacctgccctgcctcagtaaaaatacagtgttgttgctgtaggaagactcccggattctaccccaggatacttcatgagaacgaaccccttcagagaggccctacaaaacagattagagggaagacagaggggtccaagggagatggtctctcttctcaagtaggaacaccccagcctcagacagacacagcaggaaggggcctgagaggctgacagaggcaggatgggtgcaaggcaggggtggaggggagggaccagcccgggctgcaccagtgggagtggctccacccttcccacctcagagccatggggagccagggctctggcggggtgcccttggtgcaggctccctacacagtcctgctgctgccgctggggacaagccgccaagacccaggggcccagagcttcttcctttggctacgcaggatgcaggctctggagagagaacaggatgccctgtggcagggtctggagctgctacagcatggccaggcctggtttgaagaccatctgagggaggcacagcgacagcagctgcatctaggggcccttggtgagaattttctaacagatttacactcagagcctggtcgccctccgttagcccagattcaaaaggtgaacatctgtttgcagaatctgattcatgaaaagttctctcaagtccactgaacaaggctagctcctgcaccacccaagaatccaaaggaaagacgaagggagcagacctgtggcagcaacaggagttgtcaaggcagcagaaaggagtcacctcatccaaagga

SEQ ID NO: 189623 - DNA, 591 bp, Homo Sapiens
tacaaataagttggcctggaaggacaaaaggtgttcttaataaattatattcgcaaatattggatttaatcctaccagtaatgaagcagtcagttactttctagatgtgcagaaatacgtaatgaacaaaaaaaactaattcctattccattttttattaggtccacagttatttcacttctaaataaatatgtttttttaaaagtggcacgcggtggaatgtaattgagacaggatggagttcctagagaaattttacttcctcaatctgcactccaccttacttaaaatacagtcttgggtctgtaattcccttatctgactctcaaggaaatgacaaagtaatgcctagattggactaaacctcatttaacttcaagactgacctttctcaaagttgaaccttcgtcttgtgaggaacagaaagatcaagaactctgaagcacctcgactttccacctgtgaagatgtgttcaaatttgcaacgtgcggccacacctatgaggttgaactttatacaattggtttctttataggtttagatggttgaatttaagttacccccactgccattattattattttgagaca

SEQ ID NO: 189624 - DNA, 1019 bp, Homo Sapiens
ttggagcagtcccagcccagggaagctcggaagatgcctaggagggcctcaaggctcatccacaacatggacctgcgcacaatgacacagtcgctggtgactctggcggaggacaacatagccttcttctcgagccagggtcctggggaaacggcccagcggctgtcaggcgtttttgccggtgtacgggagcaggcgctggggctggagccggccctgggccgcctgctgggtgtggcgcacctctttgacctggacccagagacaccggccaacgggtaccgcagcctagtgcacacagcccgctgctgcctggcgcacctcctgcacaaatcccgctatgtggcctccaaccgccgcagcatcttcttccgcaccagccacaacctggccgagctggaggcctacctggctgccctcacccagctccgcgctctggtctactacgcccagcgcctgctggttaccaatcggccgggggtactcttctttgagggcgacgaggggctcaccgccgacttcctccgggagtatgtcacgctgcataagggatgcttctatggccgctgcctgggcttccagttcacgcctgccatccggccattcctgcagaccatctccattgggctggtgtccttcggggagcactacaaacgcaacgagacaggcctcagtgtggccgccagctctctcttcaccagcggccgctttgccatcgaccccgagctgcgtggggctgagtttgagcggatcacacagaacctggacgtgcacttctggaaagccttctggaacatcaccgagatggaagtgctatcgtctctggccaacatggcatcggccaccgtgagggtaagccgcctgctcagcctgccacccgaagcctttgagatgccactgactgccgaccccacgctcacggtcaccatctcacccccactggcccacacaggccctgggcccgtcctcgtcagctcatctcctatgacctgcgtgaaggacaggacagtgaggagctc

SEQ ID NO: 189625 - DNA, 1896 bp, Homo Sapiens
ttgggacaaatcggtggaggacggctggggtccggccccgggagggggcggggcgcgtttaagagctgcgggccgggtgcggacggcggaggcggcgggactggtccctgctcttcagtgggtcatctgtgtgtcacagcctcagaagaccagcgagatggctgccaacaagagtaagggccagagctccttggccctccacaaggtgatcatggttggcagcggaggcgttggcaagtcagccctgacgcttcagttcatgtatgacgaggaatgtttcaaaatcattggcatatgacaagaaaaagtatacagcaaacaaaaaagtagaaggtattctagagtttgtagaagactatgaacctaccaaagctgacagttatagaaagaaagtggttcttgatggggaagaagttcagatagatattctggacaccgctgggcaagaggactacgcagccattcgagataactactttcggagtggggaagggtttcttcttgtgttctcaatcacagaacatgaatcctttacagcaactgccgaattcagggaacagattctccgtgtgaaggctgaagaagataaaattccactgctcgtcgtgggaaacaagtctgacctagaggagcggaggcaggtgcctgtggaggaggccaggagtaaagccgaagagtggggcgtgcagtacgtggagacgtcagcgaagacccgggccaacgtggacaaggtgttctttgacctaatgagagaaatcagaacaaagaagatgtcagaaaacaaagacaagaatggcaagaaaagcagcaagaacaagaaaagttttaaagaaagatgttgcttactatgagtgtcaaggtgacggatgaagccagctgctcctaaggacacagggctgggttggtaaagagaaggctatggttgacttcttgcttgtgcttcccactctccccgacttcattcactcaaacttctttaaatggggaaaaatatttgtgactcagtggctggcagaagaaataagcccatgcaagtggaagggctgctttgtcaggaggttgtggaatttctttcttctccccttcttccctcccaaaagcttagctatgtataaagtgccacagataggaaacagctgttaattacaaagagaaagaattgtcatagcatcttattttgttcctagttttataacattaccatccttcgttttgaactacagatgttgtagtgggttttggaggagggagtggagtaagatgccctcccacttttatcagtttagtagtagtactgagaaaaatcccttcagctctaagaacactgaaaaatccaccgattttttgggtaagcttcttggcaataccctgtggatctgaaacagctaaaaaaatgaatttgaattgcgccagataggtcaataccaagcttctgattcctcctcacatatgaaaagtgaaagttgtgagttgttttcctcttatttaaacattggcctattataatctgtgttggttatttttctcctgtaagcatcctgatttttctgtaggaacttttctttggcagaccaagtgaagactcaggaatggtgtgcattataaatgacacacattgccacttgtgtagatatttttaagttctttggctaagtcctctcctaactgcctgtcctctggttaggcccctccctctccactagtggtgaatgcatgtgtctgtctgatcagcatcactgcacacggaggtctagtgagcctctttgctaagtgtcacacacactcttccaaagacgtgatgagttaaagttgtattctgaaatcatgaagccagagcctgtgccagaccttctgctacctctcatagaattgctctgtatttctaaatttaaaatt

SEQ ID NO: 189626 - DNA, 1640 bp, Homo Sapiens
  misc_feature (323)..(386): n is a, c, g, or t
  misc_feature (404)..(449): n is a, c, g, or t
  misc_feature (644)..(672): n is a, c, g, or t
  misc_feature (993)..(1124): n is a, c, g, or t
ttggattctgctcagctacaagcaccccgaagtctccttcagcatggagcaggcaggcgtgtaacaagaaacagagagttttgtgtacagcttgggaatgaaaaggttgattgtaaacccacagtatctagcagcgttgtgccaaattgcccttgtgtttctctccacccaaaatatcacagctgctttcctcacatttggttcatccgtgtgctgttcttttgggttctgagagggttttgccatgtttgcttgtatgaccaagtcaccaaggaaataaacaggaaggaaatccatgttctccatcttttgtgaaagtatannnnnnnnnnnnnnnnnnnnnnnnnnnnnnnnnnnnnnnnnnnnnnnnnnnnnnnnnnnnnnnncttccagaggtgatatannnnnnnnnnnnnnnnnnnnnnnnnnnnnnnnnnnnnnnnnnnnnngaaacaggagagcaaagcagttagagttcagaggccagcggcctcagggccactccctccctagccttcatcagcagagcaccctccatccccctgcattgctcttctgtgaaagcaaatactaaaggatgccatcctctggaatcctaatggcaggcaaagggagagaggaagggtgacggcttctggcacttnnnnnnnnnnnnnnnnnnnnnnnnnnnnncccccaagcctggaacgcagagaggtctttactgctgggatccacggaaaacatgtctgtcctagccaagatcatatgaagagtttggcacggaggctgagaatgacctggcatagatggtttgccagttaggatgtctcaatttgagcctttgcttttggtggataactcagctcccctcttgtaacctggaaagttggttgcctttatcatcctgctggttttatccatggactgaacacccaacagcagtgcactatgctttctatggcatctttcattctcattttatattgtgctataaaaaggattgtttctccnnnnnnnnnnnnnnnnnnnnnnnnnnnnnnnnnnnnnnnnnnnnnnnnnnnnnnnnnnnnnnnnnnnnnnnnnnnnnnnnnnnnnnnnnnnnnnnnnnnnnnnnnnnnnnnnnnnnnnnnnnnnnnnnnnnngctctcctctttcagcctctttgtcacagggaagaagtgtaggaggttgccttgggccctgcctctctcctaacctcctcttccccactgggtaccctcagcccctatattttaattcttgatcatgtagaaattgtttttggtaaatgttgatattattgttattatcattattaataaataaagagaaaaggaatttttgtttaaatgagaaatgtttaaccagattctgttctatttgaattgtgacttgcaccttttgttcaaagtatttcctttaggcattgtaattgtgaacagctcttacttgtgccagtgacagatgcagtggtctcctttccccagttgaagcagtgcatacgcagtagctattatttgtgttatctttatttctcttcattgttagaaacaaagtcttctctgctggctggggctgagagagggtctgggtttatcttctttctgatcctcaaaaatagaagagagaccttgaatacactggacttctttccaccc

SEQ ID NO: 189627 - DNA, 1093 bp, Homo Sapiens
  misc_feature (243)..(548): n is a, c, g, or t
gcaacacagagtaaaactttaatggagcaccagcagcatataaaacatatataggtagaaaaataaattcaaagtactgcaaagaatccaaaagtccgtgctctgtgtagcattgagctgaccacccttgagttgaggttgattttcagatcagtccatccataatctggtagaatgttacatctaccagatgtaacatctccattcttattcctcattttaagtatttctgtttctcacaannnnnnnnnnnnnnnnnnnnnnnnnnnnnnnnnnnnnnnnnnnnnnnnnnnnnnnnnnnnnnnnnnnnnnnnnnnnnnnnnnnnnnnnnnnnnnnnnnnnnnnnnnnnnnnnnnnnnnnnnnnnnnnnnnnnnnnnnnnnnnnnnnnnnnnnnnnnnnnnnnnnnnnnnnnnnnnnnnnnnnnnnnnnnnnnnnnnnnnnnnnnnnnnnnnnnnnnnnnnnnnnnnnnnnnnnnnnnnnnnnnnnnnnnnnnnnnnnnnnnnnnnnnnnnnnnnnnnnnnnnnnnnnnnnnnnnnnnnnnnnnnnnctgtttctcacaattaaaacatgatcttattttagtgatataaaaggctgaaaattacactctcagtggccaacttctgaaaacatcatgaaagcctttataaggcagtgagttcccaaatggagtatttttgccaagacagcctttaaaatgtagctctgtggtggctaagtccaggttctgggagttctagatgtggggctggctcagatggtcttggcccttgtttgctgccctgatccctcagtgaggcagatgtgagatggagtacgtcactgtgcccagccgagtgtgtttccttctcagagcctagctttggggcccctgcccaggcggggtcccgaggatgcagctgtcaccaggattctgcttgccgctctcagagtcttctgcaatgacatttagattgtcaaaaacatcattctcatccgacaatggaaaggagaaaaacagaagtgtgttatgatgaggatggcccaaaaactctttcaggtgctgtggaagagaattcctaggggagaaggcgtactttgtattcttgccaa

SEQ ID NO: 189628 - DNA, 1042 bp, Homo Sapiens
ccggtcttcccgagcacaccccgatggaggggcgagtcgcccctgggctagaggcgccagaggggtccttgcggctctcagggccgaccctgggcgacgctgcccccgctaccgctccagcccccgccgccggccccggctgcttctcgcacttgaagcgcttctggcggcgcaagtagcagccgttctcgaacatgttgccggagtccgggtgcagcgtccagtaggagcccttgcccggcttgtccggggagcgtgccaccttgacgaagcagtcattgaaggacagcgagtggcggatggagttctgccagcgctgctggttctgccggtaataggggaagaggtccatgatccactggtagatctcgctcagcgtgagcatcttgctgggcgcctgctggatggccatggtgatgagcgagatgtacgagtagggcggcttggcgtgcgggtagctgcgcttgaacgtcttggcgtcgccgccgccgcccgcgcggctgcggcccaggttggacggcgcgtacgccatggggctcatgcacgggttcatggcggccgcgtaggggcccaggccattcatggaggccgcctgctgcgcacccatggcgcccatgccgctcgggctcagcgccgtacccatggccgtcacgccggccgcagtcatgctgttcatggcgcccgccgagccccccggcatgccggttactgcgccgggactcaggccggcccctaggcccgggttggcataggacatgttgaaggacgccggggtcatgttgccgctcgtagtcatggtgttcatggtcatgtaggtgttcatggagttcatggagcccaggcctgagttcatgttgctgaccgggacggaggagtaggccttggggctttattttctttccctcttcccaagattatccaaggcagttccaatacgcgttttcaataatggtaattaaacttttggagggtaatcgccagctgtttccagaaaaatacttttaataggtggtagtcctccctgtaactggttttcccccaa

SEQ ID NO: 189629 - DNA, 918 bp, Homo Sapiens
ttggcccggtgtctgtgagcccctgtcagccagactcaggagcctgccaggtggcaaaaagtgatgagaagacttggaacttgggtctgagtaatgcgaagctttcatattatgatgggatgatccaactgaactacagaggcggcacgccctataacaatgaaagacacacaccgagagctacgctcatcacctttctctgtgatcgagacgcgggagtgggcttccctgaatatcaggaagaggataactccacctacaacttccggtggtacaccagctatgcctgcccggaggagcccctggaatgcgtagtgaccgacccctccacgctggagcagtacgacctctccagtctggcaaaatctgaaggtggccttggaggaaactggtatgccatggacaactcaggggaacatgtcacgtggaggaaatactacattaacgtgtgtcggcctctgaatccagtgccgggctgcaaccgatatgcatcggcttgccagatgaagtatgaaaaagatcagggctccttcactgaagtggtttccatcagtaacttgggaatggcaaagaccggcccggtggttgaggacagcggcagcctccttctggaatacgtgaatgggtcggcctgcaccaccagcgatggcagacagaccacatataccacgaggatccatctcgtctgctccaggggcaggctgaacagccaccccatcttttctctcaactgggagtgtgtggtcagtttcctgtggaacacagaggctgcctgtcccattcagacaacgacggatacagaccaggcttgctctataagggatcccacagtggatttgtgtttaatcttaatccgctaaacagttcgcaaaggatataacgtctctggcattgggaagatttttatgtttatgtctg

SEQ ID NO: 189630 - DNA, 1440 bp, Homo Sapiens
ttggcacccgggccgtgccgccagcgtccgtcgggagagtgaaggctcgcaacgccttgcccgggggaaggtaacgcgccgcgcccggggctgcgcggtttgcaccgccaggccgagggctgggggccagaagacaagagagacggcgaggcgcgctccctgcccggcagcgactcggaggtaggtgatgctctgatgctgctgcctcttatgaattgacgacaggtgcagagagagaataaactgtgtctaagactggaccagagagtgagtgtgctggaagccaccataggaacaagcgacctgtttggcaaggaatacagcatccttctgagagcctcttctcgacactatcccacagaccaggacttcctcatgggaaagagcacttaggatcttgctatcagctgccctaaacttttgctgagccaaaataagactttgatgcagaactgaacaagatatttcatttttgtgtgttttaatcttcctggttgcagtcttagttgttcagccctgagaattttgagccacatttgttgctattatttttgcatgcacttttcaaaatgattgacttaagcttcctgactgaagaggaacaagaggccatcatgaaggttttgcagcgggatgctgctctgaagagggccgaagaagagagagtcagacatttgcctgaaaaaattaaggatgaccagcagctgaagaatatgagtggccaatggttttatgaagccaaggcaaaaaggcacagggacaaaatccatggcgcagatatcatcagagcatctatgagaaagaagaggccccagatagcagagctggctggcgttgtagaagagccagaagaggatgcagcaccagcaagcccgagttccagtgtggtaaatccagcttccagtgtgattgatatgtcccaggaaaacacaaggaaaccaaatgtgtctccagagaagcagaggaagaatccgtttaatagctccaagttgccagaaggtcactcgtcacaacaaactaaaaatgaacagtcaaaaaatggaagaactggtttatttcagacttcaaaagaggatgaattgtcagagtcaaaagaaaagtcaactgtcgcagatacttcaatccaaaagttagagaaatcaaagcagactttgccaggcctttcaaatgggtcccaaatcaaggctccaatccccaaagccaggaagatgatctacaaatcaactgatttaaacaaagatgataaccagtcttttcctagacaaaggacagactctctgaaagcgagaggggctccgagagggatcctcaagcgcaactccagttccagtagcacagactcagaaacccttcgttataatcacaactttgaacccaaaagcaaaaattgtgtcacctggccctaaccatcaatgagagaatttctgagaaggagcattc

SEQ ID NO: 189631 - DNA, 1536 bp, Homo Sapiens
ttgtacaaaaaagttggatacttggaacattacacaaggatagcattaaaaacaaagtactactgaacaaagtgataaatacattttcttaaatctttcttttctaaccacaggaacatttaaacttacaatagaattcactgaagaatatccaaataaaccacctacagttagatttgtctctaagatgttccatccaaatgtctatgcagatggtagtatatgtctggacatacttcagaaccgttggagtccaacctatgatgtgtcttccattctaacatccatacagtctctgttggatgaacccaatcccaatagtccagcaaacagccaggctgctcagctgtaccaggagaacaaacgggaatatgaaaagcgtgtttctgcaatagtagaacaaagctggcgtgattgttgaccccgggtacagtttaaagaagctggccataagaaaaatatatattgatgtgtttgtcacctccctactcctgtcattacatttactttattaaaagcaaaataactgttgtgctgtttccatcttccttgccaagttttcctaccccttctaccctctccttaaacatcagaaaacaccctctatgaaatcaaatgtactgtacctgggttacttgcaaaaattactaatgcttcagtttttctgttgtatttcatttccagttttcaggcagttatttttattattgtactttaagcttttaagatgaattgttatacaagaggtgcttatgcttagcttgatgaccaggatgttatttttaacaaaatgattgctgaagtgtttcatcctggctggtccttcacttgtgttggatttagaagtgaatgtgtttggaatatggcctacagagaatagaaacaaatccatgtaaacaattttgaaggaggcatgggagctaaaaatcctgtgatactaagatctcagtcatatgaattacaacgtagtatttactggcaagaaggagaaagttgaaggactcagctaaaggagtacagcaattgtagtaactgacacatcctctctttgcaagctgctgactgggcacactcatgccaagtttcagaattattggtcttctgggtttttgctttttaaaagaggtgtgggagcagaggaatggaaacaatcgtgagtttttgagctagggaaagttggagctcctttaatctttttaaaggatcagtgctgccctaagtgaataaactcaattgtccatctttattttagagttttaatgaattcaaggaagggagcatagcatatctgtggcaaactattttccactcaaatcctgagttattgctgcatgctttaatttcttccctttcagcatctgagaaccttaaagccaatgtctgcgatcttttttttggatatttatacttttagatatatagtacctttaagtagcagtatgggacaaggcttgtaaatgttttgtctaatgttctattgtcaccttttatgcatttatcacttccaaatctaacttttgcacaagtaacccatgt

SEQ ID NO: 189632 - DNA, 937 bp, Homo Sapiens
ttggaaaaggaatacatcgttgtacaaaatgcaggctgcagtttttgacatgcaaggagaaaatggatcataagactcaacaccatcgaacatttataaaacctaaacaactagaaggattgcctcctggaacaaaagttactattcgagcttcagttggacctctgcaatcaggagcttcacctacaccttccattagtgcaagtgcttctacccttcagctctcacctccaaggactaaaaatataactgctaaaaatcctgcaaaatctaatacaagtaaacctaatacaatcaaatccaacgcaagtaaacctaatacaagtaagcctaatggaagtaaatctaaatacaaaccaaaaatctctaatatgcaaaagaaacaaagcacattggctagtagcaataaaaaaagtaaagtcaatacagcattgaggaatttaaggtatcgtcggggcattcacaaatgcattgagtgttgttccgaaataaaagattttgcaaaccactttcctacgtacgtccactgtagtttttgcagatacaacactagctgtagcaaagcctatgtaaatcatatgatgagctttcatagtaaccgtccaagcaaaaggttttgtatttttaagaagcattcagaaaatctccggggcattactctagtgtgccttaattgtgatttcctaagtgatgtttctggcttagataatatggctacacacttaagtcaacataaaactcatacttgccaagttgtaatgcagaaagtttctgtttgtatcccaacttctgagcacctttctgaattaaaaaaagaagctcccgcaaaggaacaagaacctgtgtctaagaaattgcagacctacatggctgaaagagaaacaaaacatcaaattctgaagtaaacaagataaagctgcttcttcaaagaaaaaaa

SEQ ID NO: 189633 - DNA, 831 bp, Homo Sapiens
ttggcttgtccagctcatctatggaaaactactcaggtggtatgctgtttgaagcctcatcttcctacatgaaaattatgggcatttgtcccaatgattttgtttcagctgttctgtaggctgcataaccactctgatatttaggtatctgctattttattatcttaaaagacaaattaatttaattgcatgtgctagggaaaagctaccatgtacattcaccccaagtaaatagaatcctagatgaatcctagaaaaataatccctaagcagataggtagacagaggtaaacattcacatgatttagctctctagctcttgcactctgaacattcttgctttggttctgacttctgggaactgctttgcatttctcctatagatctgtagttaagggaaccaaggggtcattggggcaaaagcattgtttctcaaagctccttgattaagagaaagaacagaaatttgcacagaagatagtgtcaaggagtgagaaagtttgtttgagggcagtagctcagtgtggaagaaaatcctgaagtttctgttgaagccatacaatgttctatggggttactctctaagacattctctgaggtgtgtgaggaagtcactactcctagcctttgttaagatgtaattttaaatattcagttatggtactatgtttgcaactctcgtcttatcacaatgcctcagtagtttgttcccttagaaacatttagatgtgcacaaattaatcttttatatatctaaaggtttttctatcatgcattggattgctcagaataaagtgtctgttagacttcgttttggtaaataaattccaa

SEQ ID NO: 189634 - DNA, 1149 bp, Homo Sapiens
ttggtaatttttcattgtgatcagattaaaattactatttgtgcaaaacaaattccacaccacatgtactgtatattctaatctgctgagaaaggtggtcaggcccttctaaatgcttaaccaaaaacaaacattattggagtttcagtgtaaaataaaattaaaattggagggttggttagattgatttcagatggatactaacagtttgaggggaggtccagatatttccaaggcataaattcttgcctggaaactttggagcaattaattaaattaggttaagttttccctcagcaacctgtgtgttcaaaggttaggcacaccattgctgttactaaaatacatgcactgctcattcttgacatagcttgggtgtgggttcctcttgttttggttattttgtgtagcagtttaatcagtggataactgagcctgtttcctcttagctttctagacttcttaacagaaaaaacagtttgggttcaatagcattttatgattctacaatattttgtcacctagctggaagttgcaataaaaattccttatgaaatatatggttttcatctgtaattgaaggaaatcatagaaagtttgctgaaagcaaagggctaagcttatgaaggaatgcctcctttgttacacactcaagaatttgtcagcacacaattaattgcagccatagtacctttttgcgtaatgtttgggatattcagtagcccaggattgctacaaaaaggtcctttgagaaaattaatttgtgcttgcttttatcccctctcagaaagacatcactaaaggcccattaaaaatctggccctaaaagttcaacttttgtagagtttattgttcagagaggtttaatcctatgtggtagtctatataagtgatgtatgagttgagttatgtaaattttgtcattgtagtgtacatggagtgatcattttactaacataaatattttctatgtgtgttttcagtggatgacaatcgagcagcagaagaatggtgtgcctaccctttaatgctgcagtttaagagaacttgtattgtgtcatttcagattgtaggctgagagtttgtaaatagtgaaaaatttgagtacttctattatttgttttgttagaaagtgaatttaaaaaacaa

SEQ ID NO: 189635 - DNA, 452 bp, Homo Sapiens
tgcaactttaaaaatatctcagatatcacaataaccagcatagtgctttacattttacaaagtccttttgcacatactatttcacaagtacatcacatcagctttcatatagctttatattattttacatcagttttacactgatggagaagctaaggttcagaaaagtgaccaactcaaagtcgtaaagtgtagtaggatttggcctcagatctttgactccgttgtgtgcagattctgctgtattagtgttccttctaaatattgtatgcagttttcccagtgttacgagattggtgttgctatccatttgttgtgaatgaagacttgtcctatagtacatgacagggctgagagtggactgtagttcttagctgaaccctttctactgtttaaaacaatcatcaggcctatcctctgctcccaggggaatgtgggagagaaaagggttc

SEQ ID NO: 189636 - DNA, 950 bp, Homo Sapiens
aaaaaagttggctttaactctcagacattcagcattgaatatctttgttaacctatcaatgagtgatttattgattattgaacattttgtttagaatgggctatatgacccagaatcttaaaacagagttagctttattttagtattgggtatatatgtaagggttccatattagcaactcagcttaaaggtaatgtatttgctaatgatcttcagattttatctttgtctacagaacaattagtaatacccaagtaatattttaattacttttgcagctgttacagttgctgcggcctgttcgaatagtgaaacatacacaaatggtttatgtggatcttttgcatataatataaatgtatagacatggtggtaggaatagcaactaatacaaatgccaatatgataataaaatacatttgtctataatcgtttaaagattagctttgcatgatcctttatgcactgtgaaggtctgaagtttataatactcacttgacccttgtaactgatgaggcaatgatgccaccacagtattctaatttacaaaaagaattggagttcaattagtggttgtaaagctcattttggggaggttgattgcaaaggaaatttgaaagataagatttattcttatttaatacttcagaaaatttctgcagagccctgccctggcacttaaaatagcttccaataagtaacttagaccaaaaggaaaaatgaagtgccccaggagaagatacttcagaagggctgttctgaaattcctaacgaggaattcttagaattcctaaggagaaacagagtgaggcctttttaacctgagattacagatacttataaaaccctctataaatagattacccaaggtttttcagtgagaatgaaacataccaccttggttggctctaccactttaattaatatcactataacataactgataggaa

SEQ ID NO: 189637 - DNA, 930 bp, Homo Sapiens
ggggtaagtagaacctgaagaccccgagaaagactgcaagaaacaggcatgtctccactccagtcaattggtccattttctgctttctgtactccagatattgcaccagaaggctttcctgtaattattttatacatcacttctttattctacgaggcccttcaaagggtctaaatggcagtgatccagtagctgcatggtaaaatgttaccccaatgctccaaagatcaactgttgctccatatttcttctgatgatcttttcttagcactgctctctcatacatatcagggtgcaaatattcttctgtgccatacagagaaacaaactgctcatcatcttctaattctctagctgcaccaaaatctgtgagtttgtacacagactgtccatcttcccctataacacgcatgatatttcctggcttgatatcacggtgcactataccattctctcgtagatgattcattccacccaccacatctcgcaaaacaattaagaattcagattctggtagtccataggcattagaaggttcttctaaaacagtgtataaactcccacatggacaaaattccataataagtactttatgtcttgttgttgtctcctcttcaatagcaaataatttgacaatatttttgtgattgagttttttcaacacttcaaattctctcatttgaacatccactggacgaaggaagcttatgttattaaatactttgatagcaaataaatcaccagttttcttatgtcttccacgaaagacatttgcagtagctccttggcctaaaatatcagataaaagccacagatgattagaagtgctctgcatcttggctggatcaggcaatcctcttgttataccagccgggtctccgccgcgccaccgccggcgggctcccgcggcctcctcgagactcaggccaa

SEQ ID NO: 189638 - DNA, 745 bp, Homo Sapiens
tgacatgctgctgctgggcactggagctcaggcgggctccggagttggtggggggcaggttttttatgcttgaaatactgcacaacttgttggggcagctccgccagcacagctttggccaaggtctcttttgctgcgttgcggaactctcgaaagggaacgaactgcacaatatcgcgggctgcctcctcccccgtgtgggagcgcagcatgcggctgtccccatccaggaactccatggcagcgaagtccgcattgcccacgcccacgatgatgatggacatgggcagcttggaagcctgcaccacggcatgccgtgtctcctccatgtcactgatgaccccgtccgtgatgatgaggaggatgaagtactgcgtggccgtccgctgttgtgtggcctgggccgcaaaccgggccacgtggttgacgatgggggagaaattggtaggaccgtagaagcggatgtggggcaggcaagctgagtacgcctgggcaataccatccacacctgagcagaaggggttggtggggttgaagttgatggcaaactcatgggagaccttccagtctgggggtaactgggccccgaatcccagagctggaaacatcttatcactgtcgtagtcctgaatgatctgcccaacagcccagatggccgacagatattcgttggtgcccatagggttgatatagtgcaaagaggaatgttttttgaaggggattcccgccaacttttttgtacaaa

SEQ ID NO: 189639 - DNA, 1094 bp, Homo Sapiens
  misc_feature (748)..(800): n is a, c, g, or t
  misc_feature (951)..(991): n is a, c, g, or t
agcacactgttcaagaggaagtctcgtcgttcgcagcacacaggttgaatcgcccccgcaccccacccggggccctaccccaggcctgagaaactcctcctgggatggggagaagttatgagagggggaaatacggggatgaatggggtggctccccagcggctccccacttttttattacgagagaaaaaagcacaaatgagaaagtgggggagaggtgatggacagctgacagctaagctggaggaggggcgcccaggatgggggaggcggaagctggtgggtgagtaaaacaggcagcccctccccagcagctctagccttgaaccccgggccgtggcttggggggacttggcctcttctgttcccttttgcagggatgccctccccactcagctgagggaaggctggacgttaaaatctagcggagaataaaattaaggagttggggggaaacgctgctgggaggaaagacttgggcttggggctccccctctgtctttttgggggatgactcctctttggcagggagaggggcagctgctttgtctggctttcaaagcccaagggtgaagacaggtctgttggggaaaaagagagcggaggcttcctaaaggggcctagaccctcgcaggattggcagagaggattccccggggaggggcccaggggagattagcagcggggaggttcaaaccccagcgcctccctttccaaagtcagtctgcttctctttaaaatggatttnnnnnnnnnnnnnnnnnnnnnnnnnnnnnnnnnnnnnnnnnnnnnnnnnnnnnactggtggaacttaaataagattttaaattgttgtttttttaaaaaaattctagcaagcaacccactgaacatgtcactaaaaatctctccttcccaggcaggattactccgaaaggaaggttggcgcttcgttcatttgcccttagcaannnnnnnnnnnnnnnnnnnnnnnnnnnnnnnnnnnnnnnnnctggagttaagcgtgagcccctctttccataccctgtccctggatacaccagcaagacctggtctgactggagttgagaaactcgtttaaaacaggcagaagt

SEQ ID NO: 189640 - DNA, 842 bp, Homo Sapiens
ttggctaaggatgttgaagatgcccactctggactgcttaaaggaaatagcagacagacagtatggaggggctacttgacaacagataaagaagtccctggattagtgctaatgcaagatttggctttcctgagtggatttccaccaacattcaaggaaacaaatcaactaaaaacaaaattgccagaaaatctttcctctaaagtcaaactgttgcagttgtattcagaggccagtgtagcgcttctaaaactgaataaccccaaggattttcaagaattgaataagcaaactaagaagaacatgaccattgatggaaaagaactgaccataagtcctgcatatttattatgggatctgagcgccatcagccagtctaagcaggatgaagacatctctgccagtcgttttgaagataacgaagaactgaggtactcattgcgatctatcgagaggcatgcaccatgggttcggaatattttcattgtcaccaacgggcagattccatcctggctgaaccttgacaatcctcgagtgacaatagtaacacaccaggatgtttttcgaaatttgagccacttgcctacctttagttcacctgctattgaaagtcacattcatcgcatcgaagggctgtcccagaagtttatttacctaaatgatgatgtcatgtttgggaaggatgtctggccagatgatttttacagtcactccaaaggccagaaggtttatttgacatggcctgtgccaaactgtgccgagggctgcccaggttcctggattaagatggctattgtgacaaggcttgtaataattcagcctgcgattgggatgggtgggga

SEQ ID NO: 189641 - DNA, 863 bp, Homo Sapiens
ttggattcccaaacctccattagtccaagagtttctacatcttcctccccagcaagaggcaacgtcaagtgatgaatttcccccctttactctgcctctgctccccatttgctagtttgaggaagtgacatagaggagaagccagctgtaggggcaagagggaaatgcaagtcacctgcaggaatccagctagatttggagaagggaatgaaactaacattgaatgactaccatggcacgctaaatagtatcttgggtgccaaattcatgtatccacttagctgcattggtccagggcatgtcagtctggatacagccttaccttcaggtagcacttaactggtccattcacctagactgcaagtaagaagacaaaatgactgagaccgtgtgcccacctgaacttattgtctttacttggcctgagctaaaagcttgggtgcaggacctgtgtaactagaaagttgcctacttcagaacctccagggcgtgagtgcaaggtcaaacatgactggcttccaggccgaccatcaatgtaggaggagagctgatgtggagggtgacatgggggctgcccatgttaaacctgagtccagtgctctggcattgggcagtcacggttaaagccaagtcatgtgtgtctcagctgtttggaggtgatgattttgcatcttccaagcctcttcaggtgtgaatctgtggtcaggaaaacacaagtcctaatggaacccttacgggggaaggaaatgaagattccctataacctctgggggtggggagtaggaataaggggccttgggcctccataaatctgcaatctgcaccctcctcctagagacagggagatcgtgttctgcttttta

SEQ ID NO: 189642 - DNA, 909 bp, Homo Sapiens
ttggcaagtgcctgggtcctctggtggccaaagtgaaggagtaccaggtggagaccattgtggacaccctgtgcaccaacatgcggtcagacaaggagcagctgcgagacattgccggcattggcctcaagaccgtcctctcggagctccctcctgcagccacaggctccgggctggccaccaacgtgtgccggaagatcacaggccagctcaccagtgccattgcccagcaggaggatgtggctgtgcagctggaagccctggacatcctctctgacatgctgagcaggctgggtgtcccgctgggcgccttccacgccagcctcctgcactgtctgctgccacagctgagcagcccgcgcctggcggtgcgcaagcgggcggtcggagcgcttggccacctggcggccgcctgcagcaccgacctcttcgtcgagctcgctgaccacctactggaccggctgcccggcccgcgggtgcccaccagcccgactgccatccgcaccctgatccaatgtttgggcagcgtcggccgccaggccggccaccgcctcggggctcacctggaccgcctggtgcccctggtggaggatttctgcaacctggatgatgatgagctccgggagtcctgcctccaggcttttgaggccttcttgaggaagtgccccaaggaaatgggtcctcacgtgcccaacgtgaccagcctctgcctccaatacataaaacacgaccccaactacaactacgacagtgatgaggatgaggagcagatggagacagaggatagtgaattcagtgagcaagagagtgaagacgagtacagcgatgacgatgacatgagctggaaagtgcgccgggcagctgccaagtgcatcgcagccttgatcagctcgcggcctgacctgctgc

SEQ ID NO: 189643 - DNA, 912 bp, Homo Sapiens
aaaggggcagggaaaggtgggggctggactgcaaactggtgctggagtccacgggcacagcaggcactgtgaagctggcgtggggaggtgccgggggtgctgccacagtccctggcgctggaaacacgggcagtgaataagctgctggcactggggcgggaaagggcacggctgggcagctggactgggacgtgtctgagggtgatcaggctgtggcgttcaagcccaccagcgggggccgggcggacacgggccccccagatccggtgctctcagatgagtctcgaggtttgacccgcttggacttcaattttctgttctttcctgtttttttccaaggtgaatctattccggaagtatttcttagtccaggggcagttcgttcacttggctgccccttggatctttcttgcaagtagtaatggcagtgggactggaaaatgctgagttttcttatttctttgaacttctgcaggaagctctgctcctccttctgtgtgtgtgcagcgagtacctccttggtgaggcccagcttcttgaagggctccttctcttggctgagaccacaggccagggcagggcccgccaggcagtccagggattctggcccactcgcagcatcttccaccatctctaactccggctgcggcttcttgtctcccacatggacgatggtgctgctgtagctgcactggctggtgagcgatgccacactctctgccttgcccggcagtgccagcgaggtcaggtgcgtacctactcccgtgcggctgttcaccctggagggcggctctgcctctccagcgtgtggccctgggctgactgtggccttccgcttatcactggaccttagcgctgggacgtttgctgggaactcgcatttcctcttcagggtggcagcctcattgccaa

SEQ ID NO: 189644 - DNA, 847 bp, Homo Sapiens
tggtttccggcggccccaagggcgaggtagccagccaccaagccgtcgcaggaacatggctggggtgtgtaatgggcccccaaattctgaggctgcttcctggcactactcagactctcaggatctcctcagaagccagagtctttctggctcagaacaggtatttgcctggtgatgcagtcctactctgaattcagaagtggctcctcccttctctgaatagtcatgcagcctcaagtgtggcaagtagtttgcttcctcttcagttctggggtaaaggggggcatacccaaattcattcaccatccacacccccacaatctgagattccaagaatctcagatctgacaaggcctgggtcaccaccagagagtcctctctgcgtttccggatttccttcccagcaggcagcaccccaagtttcactcaccaaggccacaccccaaggtgtcccagaaactggggaggcagtgctccatccaataaagcgggcaggaaggtggccccaggtcctaggtgctcctggatcgtgtagtctttaactgctgccccaagggacctcaaggaataggaattctctttgttaggaggtggaatgaaagtgtccagcaaactccagccagcagcgttcgtcccttgatttagagggctatgatttctacaaagtggcccgactggcccgcgaacacgcagcagagacgcggcctccacaaggtcagaactaagatgtcctcagagatccccagttacgaagcaaagcgcgggcctacttcgggacctacgcgtccgggcgctgtgcgcggggaccgctcccgggcccagcgtcggggccgcggccttgggccaa

SEQ ID NO: 189645 - DNA, 889 bp, Homo Sapiens
ttgggcagaatcccatggtagccaggtgggtgaaggggagcgaggacgttctacctgccttgaagaagacacctgacctgcggagtgagtgaccagtgtttccagagcctggcaatggatgccattcacatcggcatgtccagcacccccctggtgaagcacactgctggggctgggctcaaggccaacagaccccgcgtcatgtccaagagtgggcacagcaacgtgagaattgacaaagtggatggcatatacctactctacctgcaagacctgtggaccacagttatcgacatgaagtggagatacaaactcaccctgttcgctgccacttttgtgatgacctggttcctttttggagtcatctactatgccatcgcgtttattcatggggacttagaacccggtgagcccatttcaaatcataccccctgcatcatgaaagtggactctctcactggggcgtttctcttttccctggaatcccagacaaccattggctatggagtccgttccatcacagaggaatgtcctcatgccatcttcctgttggttgctcagttggtcatcacgaccttgattgagatcttcatcaccggaaccttcctggccaaaatcgccagacccaaaaagcgggctgagaccatcaagttcagccactgtgcagtcatcaccaagcagaatgggaagctgtgcttggtgattcacgtagccaatatgaggaagagcctcttgattcagtgccagctctctggcaagctcctgcagacccacgtcaccaaagagggggagcggattctcctcaaccaagccactgtcaaattccacgtggactcctcctctgagagccccttcctcattctgcccatgacattctaccatgtgctgg

SEQ ID NO: 189646 - DNA, 1507 bp, Homo Sapiens
ttggccctaaggagcctgggatgatgttggtcaaatgacctagaaacaaggattctacctgaactgaaaggactgtgtgacctcccccaagccaaccactttcacctgggatgactttcgattatgctttgttttggggctgtatttttgaaatactctacaagaaagctgtggctcaacacatgagaagaagcacgaagcagttaggctgtacatcagacagaagggtaatgcgtgcagttcctgctgcctgcaggcagacgaggcctttgctttacagcactgtatgtgttgcacgatggatccgtgacagcactttcctgttgcactgaaactcttggccatgtagaggaaaagatatggagttatgtggatttcatcactagtatgtgtgcgtgagctggtcagttgccaaaggaggaaataaggttagaagcctgaaccgttacaaaagaagagctcactatggtcaaaaagtgatggctttcaggacttgttttttatcctgcctcacagttgttaaagtctgttccaaggcatcaccttccttctctacccaacaaccctgtgtaacaactaaagtagaattatctctcatttgttgttgtttttcctcaaaattaccaaacaaagcaaaaaatacccttgttttttatagttgagatgtcaagaagttaaattgaggcttaatgagcataggtagcttgtccaaggtctcatgaccagtcaagggcaagctggagttaataatctatatttatttgactcagcactgttttcatcacaacttgttttcccagcatcatgtagtgcatttagttttgtctttctcagggtatagtcaatatgcctgcaggagtttctatagcgagacatagaatagtattctgatcagttgccaaagaatctaggaaattagttgtattttgtgcaagctaatttaaaaacatgatgggctgttttaagaccagagtggaaattcatgagaggaactatactaccaaaagagcccaaatgaccaaatccatggataattgcttcacagccttggccatcctggctcagctctcaatttagtataatatgcagttcctgtgcctccagactatgcagctcatcaccctaggttctacaggaaatacagagatgaacaactttgccttcaaaaatgtgctgcctagaaacagacctgcattcaaccaactgtaatgcaggattggaccatgaatgatatgctagaatagaagaaagagaagtgtttttttaattgagagcctctatgtgcaaggtgatatataatcatatccagtttaatcttcacaatatccaatgaagaaggtctcattatctccatgataaagatggggaaactaaagtcagaagggttaactcaactgtctattgtcacatgatgaataaatagatgaagtgagatacaaagctgggtttgattcaaagcccttactttcctaattaaaactatgatgcgtatttatttttctgcacc

SEQ ID NO: 189647 - DNA, 1973 bp, Homo Sapiens
  misc_feature (1178)..(1292): n is a, c, g, or t
  misc_feature (1374)..(1398): n is a, c, g, or t
  misc_feature (1553)..(1604): n is a, c, g, or t
ttggtaaaagggttgttaccattcttatctgagtagttgggaggaggggaataccactttagttcatttggaaaatatagacatatttcttttgctttcttaaaacagcttaaaatgatgaacttttataattttaatttgaagattgaataaatattttttataaagattgttttgagtgctgatttgtttactttttgtagatttgctttatccatgatattcagtacaactctgtcatttctttgtaatatttaaaaaatattagtaaaggagtgaattaataaagtagtaatagtaaaatgaaaggaacttgactgtacagtttgtagccaggttaagcatttggtattgtttcatttacaatttgggactaagatggaaacactttttttataagtttttaattcatagtcactaaagagataaatgtttcttatatacatttgtgtatttttatggtgttatttattccatggcttagcttccttcaaatcaaaatttggacacacactattaagagaagccattaaaattttactaaaattgtgcatgtaaattaattgtcagcattccatgtctcaagattttcttaatttagttcgctgtttaaattaattcatgtcctgtaaagttctgaccttgataacaaagctataaatatttaagtttgctaatatgcgtaagtattatcggtaagttacaagatggaagaagaataacagtagggcacagtcattctgtgaatccttttacttatcaaaatttggtagctattctaaggcttttgcagaaaaataagtgttcaatgtttgtagttcttcaaaagcatgttgcagtagccagccatactatgtgtattcccagtatcatgtacgcactaaaaaaaacgtgtgcttgctgctgctgtgagtgaaccattgcttaagataaaaaacttaactagatctgtaaatgtacagaatagcatcagatgtttctgagagattagaaaatgttttgaatttataaaattaatgtttttctttgtaacatttatatatattttttaacattttaagtttaacagattgtattcctttcaagtttctatacttgcttaagcaatcttgatttgagtaagggtcttgatttgtgctattatgttctgttagttttggcatgaatatactaaagcnnnnnnnnnnnnnnnnnnnnnnnnnnnnnnnnnnnnnnnnnnnnnnnnnnnnnnnnnnnnnnnnnnnnnnnnnnnnnnnnnnnnnnnnnnnnnnnnnnnnnnnnnnnnnnnnnnntcctgtcttcattgtttcaggtatttctttacccctctggattccccacgggctggatcgagatggtccagttatgcccagnnnnnnnnnnnnnnnnnnnnnnnnntggtaaagcactcttgcgatgctgacactgccaacctccagtatcctcaccctcgcaaacgatatctctctcggcctcttaatcccttacctgagaatgaagggatttaaaacactgatttaacattgaaaggccttattcaagtgcttgtaaannnnnnnnnnnnnnnnnnnnnnnnnnnnnnnnnnnnnnnnnnnnnnnnnnnnctaacttagggtctgtcttgcatgtattacaaccagaatacagtgtttggaacctaaatctgtttgtgcgtctgcatcaaaggaacatttgcttcactgggtgataacctttgatgaaatgagatatgtccaagtaacgttaactgtgaagttacacacagtacctgacttcaaagtgcctgttctgtaaattttattttaaactgttaccatagtcttaagttgtttatgctttatcaaactggctaatgtgaaagcataatattatgaagtttattctgccttatgagacttaaaaaatgggatttcattttacaggctaatgttgtaactgactagtatgtaaaataaatcattcctgtgtataaa

SEQ ID NO: 189648 - DNA, 1622 bp, Homo Sapiens
  misc_feature (575)..(638): n is a, c, g, or t
  misc_feature (1337)..(1353): n is a, c, g, or t
ttggcttatgatgatctggaggtttcaggccccccagcacccattgatccccccaaacacatccaggagatgaagaagaatgccctcctgctcttcaaagggtcctacatagaagagtcggactttcaggatgatgtgatggtgtacaggctgtgtgctgagaaggactccgaggacatgaaggattctcaggaggaagctgctaggccaccagctgaagcccaggctgaagttcagagtgtccccatcaacaacggccccctcctcagcacccagccagagacagattcagaggaggagtggaatagggacaattcagacccgtttcacagtgagcccaaggagccaaagcaagagagggaacctgaagcagccccagaatccaactcagagttagcatcccctgcccctgaggcagagcacagctctaacctgacagccgcccacccggagagcgaggagctcattgcccagtatgaccaaatcattaaagagctggattccggcgccgagggcttgatggaacagaattaccccacacctgatcccttgcttctcactaaggaggaagaagnnnnnnnnnnnnnnnnnnnnnnnnnnnnnnnnnnnnnnnnnnnnnnnnnnnnnnnnnnnnnnnntgactttgactcttttatagcggagatgcctgctgtagagactgtgccttccccatttgtggggagagatgaggctgcctttgccagtcgccatcccgtgaggactcaaagcaccccattcacaggcccattcatcagcgtagtcctgtcaaagctggagaacatgctggagaactctttacatgttaatttgctgcttatcgggatcattactcagctagccagctacccccagccactcctgcgctcctttctgctcaacaccaacatggtcttccagccaagcgtccgctctctctatcaggtccttgcatctgtgaaaaacaagattgaacagtttgcttctgtggagagagacttcccagggctcctcattcaagctcagcagtacctgctcttccgtgtggacatgtctgatatgacccctgcagcactaaccaaagatcccattcaggaggcttccaggacaggaagtggcaagaaccttttggatggacctccaagagtgcttcagcccttcctgacccacagaaccaaggtggctgaggcaccccccaacctgcccctgccggtgaggaaccccatgctggctgctgccctcttcccagagttcctgaaggagctggcggccttggcccaggaacactccattctgtgctacaagatcttgggtgactttgaggactcctgctgttagcnnnnnnnnnnnnnnnnnaatagaggttcttgttttgtaaggttttagtgtcttgactgaatgttaaatgcaaagctgcttacaaagatttctactttaatgtttcctgacaatacttgatttgtggggaggggaattttctgtatctttcctctctctctctagccgggcctttccaccttatgttatatatagaatgtaagtctcataagctggttgctcccttggcagttttctttgctctgtttttcctccttatatttttttggttgtcattctcctatccc

SEQ ID NO: 189649 - DNA, 1540 bp, Homo Sapiens
ttgggaaacctttcaagaaaaatatttgtgcaagtgatctgggaaaaaaatgcagtgaaggagcagaataggaccttatatggagcctagggaccctggctttaatgtgagagttatgtggaatggtaggaagaacaccgagatccatcgagttgggggaacagagccttctaagattgggaaaatcttcgcttaatacttgctggggaaggggcagtgtctgacagagagtgggaagccactggcttgtgtgccaagagtccatcgcagcaggcagggagtgggcatttcctttatttctctccctttctcttcacctctgacttctctgtttttctctcccccgccccccgccatttcccatctcccttcctcccatccataacatccttccacagctcccttccccgctctgaggagagtcgatactaacagctaccctctccctgccctgggagacctggggtgggcagggaacccctccctgagaacctcagacccactcttccattgcatcctgtaggacccagtggaacctgacagagcccataggattccctcttctactttcttagacagcagggatgtcagggtctcaaactgcctaacactttgtagcttttcttaacacaaaagcaccccttctctcctaacttgggctctgaatactttcccaacaggaagtctgatctgttgccagacttcttggttagatggctcatacatttatctagagaagcacactcttgcttgctgtcaaactttagaccaccatggaaggtctaagggcatcctgtgccagggaaactttttaaggaattttatctatgggataaaccccatattccctctagtgtctactggtggctctaatactgctttgtgctgcctgccacacttgccctttgagcctgcgaatggccgctagtgagcaagctctgcttcagagcagtctagttaggtagaacagggacttaccagcttcccaaagggatctactcaccattgccaaactcttcatttccacattttgtgtaggtgtcagggaaccccaaactggtgttgctttggggtctctaaaggagattggctgacaccaccatttcccccagatccagattctctgagggaggttgtttcttgagagtagatccagagtgtcaaggatctgttagatcctggaatcccttcttgcatccatccctccctggtagctaggtcccgatatactcctgtcttgtgagattgtcgagatgagatgggggaccactcttcctctgtccttcctctctcctttcctccatagcaaggacgaccttccctgctccatgcccagagtatagctagatcccttcccctccctaccctctgaatgtgtgctagatcaggtgccccactgtgtttcctgaaatccttgggagccggatctccccatctcccctactcactcttcccttttcttctctcagtgttgtctgaataaagtgtgaaatcttttgtgttttctaaattgacatttttcaatgaaaaaaagaatcac

SEQ ID NO: 189650 - DNA, 562 bp, Homo Sapiens
ttggcttactttgaagaaaatgctgaatagctcttgttagtcaaataaactgataaaaattggtagggcctggctatcaattagccctgggaaatgaatttttagattaaaaaggtttttttgcatcatttggtttgtgcatttttatatttgtttataaataattgagttgctaattacttctaatcttctccaatcagattttcaacaattttagacatgggacacacgtgtgtgaagtctttattttaatgtaataatctcattacccccacccttactcccttaacttccatgtacttagactcctttatttgttaaataaactagagtattgtcttcttcattagaaggacctaggatgacaatgcggagagtcttggtctgaatctagtgcgactaccacctgccagcttttggggggtatggaaatactatctaaaagttggactgcatgggtcaaatcattatgagacttataaactaaaactttagatacccatatagaaatgtctttgaggcaaaaacaaacctaaagaatgaaggctctttcccttctctg

SEQ ID NO: 189651 - DNA, 916 bp, Homo Sapiens
ttggctgagataacgaggaaatattctgaaatggatcccaaatatttcatcttaattttgttttgtggacacctgaacaatacatttttttcaaagacagagacaattacaacagagaagcagtcacagcctaccttattcacatcatcaatgtcacaggtattggctaattctcaaaacacaacagggaatcctttgggtcaaccaacacaattcagcgacactttttctggacaatcaatatcacctgccaaagtcactgctggacaaccaacaccagctgtctatacctcttctgaaaaaccagaagcacatacttctgctggacaaccacttgcctacaacaccaaacaaccaacaccaatagccaacacctcctcccagcaagccgtgttcacctctgccagacaactaccatctgcccgtacttctaccacacaaccaccaaagtcatttgtctatacttttactcaacaatcatcatctgtccagatcccttctagaaaacaaataactgttcataatccatccacacaaccaacatcaactgtcaaaaattcacctaggagtacaccaggatttatcttagatactaccagtaacaaacaaaccccacaaaaaaacaattataattcaatagctgccatactaattggtgtacttctgacttctatgttggtagctataatcatcattgtactttggaaatgcttaaggaaaccagttttaaatgatcaaaattgggcaggtagatctccatttgctgatggagaaacccctgacatttgtatggataacatcagagaaaatgaaatatccacaaaacgtacatcaatcatttcacttacaccctggaaaccaagcaaaagcacacttttagcagatgacttagaaattaagttgtttgaatcaagtg

SEQ ID NO: 189652 - DNA, 1629 bp, Homo Sapiens
ttgggtcgtcgcggagctcgtctcctcgctgctggggttgtggctgttgctgtgcagctgcggatgccccgagggcgccgagctgcgtgctccgccagataaaatcgcgattattggagccggaattggtggcacttcagcagcctattacctgcggcagaaatttgggaaagatgtgaagatagacctgtttgaaagagaagaggtcgggggccgcctggctaccatgatggtgcaggggcaagaatacgaggcaggaggttctgtcatccatcctttaaatctgcacatgaaacgttttgtcaaagacctgggtctctctgctgttcaggcctctggtggcctactggggatatataatggagagactctggtatttgaggagagcaactggttcataattaacgtgattaaattagtttggcgctatggatttcaatccctccgtatgcacatgtgggtagaggacgtgttagacaagttcatgaggatctaccgctaccagtctcatgactatgccttcagtagtgtcgaaaaattacttcatgctctaggaggagatgacttccttggaatgcttaatcgaacacttcttgaaaccttgcaaaaggccggcttttctgagaagttcctcaatgaaatgattgctcctgttatgagggtcaattatggccaaagcacggacatcaatgcctttgtgggggcggtgtcactgtcctgttctgattctggcctttgggcagtagaaatggcaataaacttgtttgctcagggcttctgcagcatccaaaagcaatcttatatctggctcagtaatgtacatcgaggagaaacaaagaccaagtacacaggaaatccaacaaagatgtatgaagtggtctaccaaattggaactgagactcgttcagacttctatgacatcgtcttggtggccactccgttgaatcgaaaaatgtcgaatattacttttctcaactttgatcctccaattgaggaattccatcaatattatcaacatatagtgacaactttagttaagggggaattgaatacatctatctttagctctagacccatagataaatttggccttaatacagttttaaccactgataattcagatttgttcattaacagtattgggattgtgccctctgtgagagaaaaggaagatcctgagccatcaacagatggaacatatgtttggaagatcttttcccaagaaactcttactaaagcacaaattttaaagctctttctgtcctatgattatgctgtgaagaagccatggcttgcatatcctcactataagcccccggagaaatgcccttctatcattctccatgatcgactttattacctcaatggcatagagtgtgcagcaagtgccatggagatgagtgccattgcagcccacaacgctgcactccttgcctatcaccgctggaacgggcacacagacctgattgatcaggatggcttatatgagaaacttaaaactgaactatgaagtgacacactcctttttcccctccctagttccacatgactatcagtggcaaaaaagaacaaaatctgagcagagatgattttgaaccagatattttgcattatcattgtttaataaaa

SEQ ID NO: 189653 - DNA, 970 bp, Homo Sapiens
gagcaatgcttttttttaatagccaactttgtacaaaaaagttggccatcctgtcgcggctcgaaaggaatggaaaatggcggcctagacgcggagtttcctgcccgacccgcggcggctccggcggcgccatgacgcgctgggtgcccaccaagcgcgaggagaagtacggcgtggctttttataactatgatgccagaggagcggatgaactttctttacagatcggagacactgtgcacatcttagaaacatatgaagggtggtaccgaggttacacgttacgaaaaaagtctaagaagggtatatttcctgcttcatatattcatcttaaagaagcgatagttgaaggaaaagggcaacatgaaacagtcatcccgggtgacctccccctcatccaggaagtcaccacgacactccgagagtggtccaccatctggaggcagctctacgtgcaagataacagggagatgtttcgaagtgtgcggcacatgatctatgaccttattgaatggcgatcacaaattctttctggaactctgcctcaggatgaactcaaagaactgaagaagaaggtcacagccaaaattgattatggaaacagaattctagatttggacctggtggttagagatgaagatgggaatattttggatccagaattaactagcacgattagtctcttcagagctcatgaaatagcttctaaacaagtggaggaaaggttacaagaggaaaaatctcaaaagcagaacatagatattaacagacaagccaagtttgctgcaaccccttctctggccttgtttgtgaacctcaaaaatgtggtttgtaaaataggagaagatgctgaagtcctcatgtctctatatgaccctgtggagtccaaattcatcagtgagaactacctgggttcgctggtccagttcaagaattacctaaagacatagacagattacataatttgcga

SEQ ID NO: 189654 - DNA, 1539 bp, Homo Sapiens
ttttcttttgttttagaagtggtgaaagcctcatcatcactggcatctgaatgtgttcttctatagtatgacttggctttactaaacaaggttttagatttatatttgtattttgaaggcctccgttccccatgactttttgaggttctatcagaaaacccattttcttcatctccttgggtgttatttacaaatgagtttcgaattttaatacgattttgactatcatctgggacaacataaatctcatcagaatagcccttctgtttgaaaattgtatcaatgggttccgcatagttatctgaaggatccatatcttcaggatgtgccaaaggcacccgggaagtctgctttcttggatttttaccaataccagcttcaattgtttttaaaaggtttggatcgagttttttcacatttgtcttaggtacaactggtttaggtttaataggtggaggcactttatggttgcgttcatggtcatgacagtttggggtactatgaataggatactcatttccttccaaatctaatctatatctggaacggtcactaggtgttggaagcaactgtacatcatccccaattggactataaggaggtggtgcttctgtgtcatcatctgaatcagggtagttattatagggaaaacagtctctgggagatggtagaaaaacatcttcactttgatgggttgattcccttgtattatcagacaaataagaattttctatcatattttttttctctagaacatcactaaaaaacagagtaaagacctcagtttgccgatgatactgagataaagaatacagtgctgtaaatttagcagtgatctcagttgcaatgtgttctccttcagtcattaactctttgatagcctcattttcaaaaaaatctgcttggctgtcagtaactgccaccagctgtacaggaatggtgtcttgaacttctgatagaaatgctcgaagcattcccatcgaagctttccgttttgcagagtaaactaatatatacccatgaactagttcatcttttcttactccaattgaagagtggtatgataatattgtgatctgtattcgcctccttttttcaccaatgattttatcaagcattagggaattattctgtccagcttgagcagcactgcaagaatgagaatcaaggaagggtgaaagaataagatccacactaaatggatctccacacatggcgcacatgacaattctcaagtcagcttctgataagtccttattggcaggaattgggctcaccacatccaaattgtgtttaactgattccaatactcctctgagagcttgctttatttgggtttcattaaatttacgaggatatgtaccagcaggtacatctacaaaaggacattgcaacttgtttgccaactgctgcccttggtgcctgagaattggtagattcttactaatggaatctctctgattagccagaattaatgtaaatggaagattagccatgtatttatcttttctgatctgagaagcttcagttcttatccaa

SEQ ID NO: 189655 - DNA, 2350 bp, Homo Sapiens
ttggcacctccaccacctccaccaccccccgttatacctcatccagctgccccgtctgctgctcaagcaaatgctatcttggctccagtaaaatcaaacccagttgtatctcagactctcagccctggcttcgtgggtcctaacattttgaacccagtgttgcctgtagccatcatggcctcagcacagccagctgccattccttctgatgagacagctcctggggtgagtgagagtgaccgagaccagaccctgttctctgtgttagtacgtcctccaccacccctctcaagtgtgttcagtgaacaagccaaaaaattagagaagcgaaattcatgcttagccacagccaatgctaaggacctgtatgacatattctatagtagtggtggaaagggggcccctgagactaagggggcccctgagactaagctaagtggtggtccattggccaatggggaaaatagcaacctctctagaaccaaaagttcagacacctcttctacttctcctttgaacagcagtgcatcccaagaggagttgcatcaagatgagggtttggtcgctgctcctatagttagcaactctgaaaagcccattgcaaaaactctggtggccctagggaaatggtcagttgtagaacatgtaggcccaaaaagcacaggcagcacctatggcttcctacagcctctgacaaggttgtgccaaagcaggccttatgaaacaattaccccaaagacagacactttggccatatggacctctagttccttccagagtgacactagtagggatatatctccagagaagagtgagcttgacctgggagagccaggaccacctggtgtagaaccacctcctcaactgttagatatacagtgcaaagaatctcagaagttggtagaaatccacctcagagaatctgttaaccaggataaggaaagccaagagctccgtaaatctgaggattgtagagaaagtgagatagagacaaacactgaactaaaagaaagggtaaaggagctgtctgaggggatagttgatgagggagcaagtaccagcattggaccccacagcatagatgattctaatttgaaccatggaaacagatacatgtgggagggagaagtaaaacagcccaacttgctaatgattgacaaagaggctgaacagtccaataaattgatgacaggaagtgaaactccaagtaaagtagtgatcaaattgagtccacaggcttgctctttcacaaaggcaaaattagactcatttttatcagaagctaggtctttactcaacccacaagatacacctgtgaaaatttctgccccagagttgctgcttcattccccagccagatcagctatgtgtttaacaggtagtccacaagagcaaggagtttcagttgttagtgaggaggggctagagaattcagctccagaatcagcttctagaacttctaggtacagaagtctcaaactcaagagagaaagatcaaaagactttcaagttaaaaagatctatgagttggctgtttgggatgaaaacaagaagaggccagagacctgggagagcccagagaaaccaaaaacagaagcactggagctacaagatgtccatccagagttaacagtgacaatagaaagcaaggccctagaagactttgaagctacagacttaaaggtagaggagcttactgccctggggaatctgggggatatgcctgttgatttctgcactactcgggtaagcccagcacatagatccccaactgtcttgtgtcagaaagtgtgtgaagaaaattctgtatcacctatagggtgtaattcctccgatcccgctgacttcgaaccaatcccatctttttctgggtttccgttagattctcccaaaaccttggtgcttgactttgagacagagggtgaacgaaactcacctaatcccaggagtgttaggatcccttctcctaacattttgaaaactggacttacagaaaatgttgaccgtggcttggggggcctagagggaacacaccaggcccttgacctgttagcaggaggaatgatgcctgaggaagtaaaagaatcttcccaattagacaaacaagagtcactcggattggaattaaaaacaattaattctgcaggccttgggccatctccttgccttccagaccttgttgactttgtcacacggacctctggagttcaaaaagataaactgtgttctccactctctgagccaggtgacccttctaaatgtagttccctggagttggggccattacagctagaaatatcgaatgcatccaccacagaggtggcaattctgcaagtagatgatgacagtg

SEQ ID NO: 189656 - DNA, 1650 bp, Homo Sapiens
ttggcttcgatctccctgctgggctgatggcccccctcgtgaagctggaagatcacgagtacaagcctttggaccctaaagacatccgcctcccaccccccatgccgcccagcgagaggctgctggctgcagtggaggccttctacagccccccgtcccacgacaggcccaggaacagtgaaggctgggagcagaacggcctctatgagttcttccgagcaaaaatgcgggcccggcggaggaaaggccaggagaagaggaacagcggaccctcgaggtctcggagcagatccaagagtcgagggcgttcttcctcccgctccaactcaagatcctccaagtcttcaggctcgtactcaaggtcaaggtcgcgctcctgctcccgttcctactcccgctccagatctagaagtcggagcaggtcgcgctcctccagaagccgctcccggtcccagtcgcggtcccggtccaagtcgtactccccaggaagaagacgccggtcacggtccaggagccccaccccgccttcctctgctggtctgggttctaattcggcgcctcccatccctgactcaaggctcggagaagagaacaaaggccatcagatgctggtgaagatgggctggagcggctcaggcggcctcggtgcgaaggagcaagggatccaggaccccatcaagggcggggacgtccgggataagtgggaccagtataaaggcgtgggcgtggctctggatgacccctatgagaactaccgcaggaacaagagctactccttcatcgcccgcatgaaggccagggacgagtgtaagtaggcgcccatgccgggagccgcgccggtggccagcggtgccggctgtgggaccttcctggctgactggcagaggaagattgcagtgacagctcagttcttacaccgtctccacttgtggagagccacaggaagagaaggaagaccagcgcatgcccagtgggaacgccgtgctccatggcgtggagggcacgggtgccacccacaaaccacaccaggaggcgctgcagccaccagggccccaggctcgttttcctttatagcgaagcaaaaaacacaagaccctccgcccgagtaaattcttcagccacgaagggatggatgtgcatctgccctaagtcagattgaagcctcctcctaggctccaggaggagcatgtgcaggaagggttggcctgagccagagccggcaccccagctccttcctccagctccccgcacccaccggccctgacctggcttcccctcggctgtgtagggacaaagccgaagcccagtgccatgactgcccgcggattgaaaaacagaaacacaaaactttgacttgacttgcgaagtgaagcagggttttcatttttactctccttggtttaggtctagaaagaagaatactgacctgagaggaggcccagtgagattctgaaaccctaattcttcgaaagcgtactggcccttagttcagttattttagtttgtataagttgatattttttttctggaatgtagcccattttgctgttatctgggaaacaagattctaacaggaaaacagcctaaaacacttcaagtttgagcgctgcctccgagtctggtgcccgtcgcgtcccctgcttgagtttt

SEQ ID NO: 189657 - DNA, 916 bp, Homo Sapiens
ttgggaaggacccagcccagttcctgcaggtacatggccgagcttgcaaggtgcacctggattctgcagtcgccctggccgctgagagccctgttaatatgatgccctggcagggggacaccaacaacatgattgaccgattcgatgtccgtgcccacctggaccacatccccgactacaccccccctctgctcaccaccatctccccagaacaggagtcggacgaacggaagtgtaactacgagcgctacagaggcctggtgcagaacgactttgccggcatctcagaggagcagtgcctgtaccagatctacattgatgagttgtacggaggcctccagagacccagcgaagatgagaagaagaagctggcagagaagaaggcttccatcggttatacctacgaggacagcacggtggccgaggtagagaaggcggcagaaaagccagaggaggaggagtcagcggccgaggaggagagcaactcggacgaagatgaggtcatccccgacatcgacgtggaggtggacgtggatgaattgaaccaggagcaggtggcagatctcaacaaacaggccacgacttatggcatggccgacggtgacttcgtcaggatgctccggaaagacaaggaggaggcagaggccatcaagcatgccaaggctcttgaggaggagaaggccatgtactcgggacgccgctctcgacgccagcggagagagtttcgggagaagcggctgaggggtcgcaagatcagcccacccagctatgcccgccgagacagccccacctatgacccctataagcggtcaccctcggagtccagctcagagtcccgctcccgctcccgctccccgaccccgggccgcgaggagaagatcacgttcatcaccagttttgggggcagcgatgagga

SEQ ID NO: 189658 - DNA, 918 bp, Homo Sapiens
ttggagttgggagcggatcctcacacgactgtgatccgattctttccagcggcttctgcaaccaagcgggtcttacccccggtcctccgcgtctccagtcctcgcacctggaaccccaacgtccccgagagtccccgaatccccgctcccaggctacctaagaggatgagcggtgctccgacggccggggcagccctgatgctctgcgccgccaccgccgtgctactgagcgctcagggcggacccgtgcagtccaagtcgccgcgctttgcgtcctgggacgagatgaatgtcctggcgcacggactcctgcagctcggccaggggctgcgcgaacacgcggagcgcacccgcagtcagctgagcgcgctggagcggcgcctgagcgcgtgcgggtccgcctgtcagggaaccgaggggtccaccgacctcccgttagcccctgagagccgggtggaccctgaggtccttcacagcctgcagacacaactcaaggctcagaacagcaggatccagcaactcttccacaaggtggcccagcagcagcggcacctggagaagcagcacctgcgaattcagcatctgcaaagccagtttggcctcctggaccacaagcacctagaccatgaggtggccaagcctgcccgaagaaagaggctgcccgagatggcccagccagttgacccggctcacaatgtcagccgcctgcaccggctgcccagggattgccaggagctgttccaggttggggagaggcagagtggactatttgaaatccagcctcaggggtctccgccatttttggtgaactgcaagatgacctcagatggaggctggacagtaattcagaggcgccacgatggctcagtggacttcaaccggccctgggaagcctaaaagggggggtttgggggatcc

SEQ ID NO: 189659 - DNA, 1877 bp, Homo Sapiens
ttggcttttatatagatagaggaagacagctctttcgggataaccacctgatacctgcagaaacccccagtcctgttattttcagtgattttccatttatctttaattcgctatccaaaattaaattattgcaagctgattcacatataaagatgcagatgtcagaaaagaaagcatacatgcttatgcatgaaacaattctgcaaaaaaaggatgaatttcctccatcacccagatttatacttagagtcagacgaagtcgcctggttaaagatgctctgcgtcaattaagtcaagctgaagctactgacttctgcaaagtattagtggttgaatttattaatgaaatttgtcctgagtctggaggggttagttcagagttcttccactgtatgtttgaagagatgaccaagccagaatatggaatgttcatgtatcctgaaatgggttcctgcatgtggtttcctgccaagcctaaacctgagaagaaaagatatttcctctttggaatgctgtgtggactctccttattcaatttaaatgttgctaaccttcctttcccactggctctgtataaaaaacttctggaccaaaagccatcattggaagatttaaaagaactcagtcctcggttggggaagagtttgcaagaagttctagatgatgctgctgatgacattggagatgcgctctgcatacgcttttctatacactgggaccaaaatgatgttgacttaattccaaatgggatctccatacctgtggaccaaaccaacaagagagactatgtttctaagtatattgattacattttcaacgtctctgtaaaagcagtttatgaggaatttcagagaggattttatagagtctgtgagaaggagatacttagacatttctaccctgaagaactaatgacagcaatcattggaaatactgattatgactggaaacagtttgaacagaattcaaagtatgagcaaggataccaaaaatcacatcctactatacagttgttttggaaggctttccacaaactaaccttggatgaaaagaaaaaattcctctttttccttacaggacgtgataggctgcatgcaagaggcatacagaaaatggaaatagtatttcgctgtcctgaaactttcagtgaaagagatcacccaacatcaataacttgtcataatattctctccctccctaagtattctacaatggaaagaatggaggaagcacttcaagtagccatcaacaacaacagaggatttgtctcacccatgctcacacagtcataatcacctctgagagactcagggtgggctttctcacacttggatccttctgttcttccttacacctaaataatacaagagattaatgaatagtggttagaagtagtttgagggagagattgggggaatggggagatgatgatgatggtcaaagggtgcaaaatctcacacaagactgaggcaggagaatagggtacagagatagggatctaaggatgacttggacacactccctggcactgaagagtctgaacactggcctgtgattggtcaattccaggaccttcatttgcataaggtatcaaaccacatcagcctctgattggccatgggccagacctgcactctggccaatgattggttcattccaggacattcatttgcataaggagtcaaaccacaccagtcttggattggctgtgagccaattcacctcagtctctaattggctgtgagtcagtctttcatttacatagggtgtaaccatcaagaaacctctacagggtacttaagccccagaagattttgctaccagggctcttgagccacttgctctagaccactcccaccctgtggaatgtacgttca

SEQ ID NO: 189660 - DNA, 1552 bp, Homo Sapiens
  misc_feature (850)..(870): n is a, c, g, or t
aagaaattgagactcaggtctcatagctggtgaacagcagagccagtatttgagcccaggactgcctgactccaaaacctgagctcttccctcactgtgctgcctctcctggtgtgggcaaacaggattttaatgggagtaaggtctgccatgggttaggacatcacctttggcccagtttcaaaggaaggtgcagacttgaaggacagaagctcattagctgagtctctggggaccacgtttgcaatggtcccacctgcaaaccagatgagggaataaaattcagtccaccgcgcccagccagaacatctgtttttacacccagagagcgcccctcgttaggacagaaccacggtgcccagagccaggaagccgccctcctggcgcccagcatctgagcttctacacgtgatgggcgggctcaggagaggacagggagtcgtggtggaagttccacagctggccgcgtgggggggcccttgcaccgcactgccgcctcctgactgcccctatccccgcagcccctgtgccggatttcatttccctcctctctcccagggtacctggccccagcactctcccatctgttcttcaggaaccgactcctctccagttgcaacaccagggagaaaggggcctccacatgcccaagtacccctgcaggatgaagggcaggccggcccttgatgtgccatttctgaataatagtcactgccgccgagtctaggatgtcctgttctaactcagccctgcctcggatgcaccaccgatctgtgcagagtgggtgtgggagtgtgggtgagggtcgaaatgccaaaggtctactttccagaatcaagtgcctatctcnnnnnnnnnnnnnnnnnnnnnggaaagagtgatgacaacagcccagggagcagccccgctcagaacccaagtcccaagttccagcactgtgttcccaggcaggctgtttgcctcttcctggtctggaagcccttgggtcctatggtggcggcagctcccacagtccaggttccctggtggggaccaatgattccatccgcatggaagcccacgtgtgcacttaggggcccataaatggcagaagggcccctcctttgggagaccttgtcagtcagcatctctagggcaaccgtgattgccatttgtagaggggaaggaatcaagggactttaagctagatcaaaatctggggacaaattctcctgctaactgcaagttaaaataggcccttcttactgaatttccctgtttgtttctctgcagacaatgctttagccctactcttgggcccccaagttagcagagtaatcaaagcttcctaccgtttggcctactattccagactagtccctcgaggggttcccttccaaaatatgcaaggctcaggctcccaattccgggcctgtctgctttgcttgtgtttctcctgtccctgttctcccggagggcccaggtggaactcacgacagggagggagactcttcccaaaaaacctgcaggggctatttccctaaaattttggttttcaagtacaaaaactttt

SEQ ID NO: 189661 - DNA, 865 bp, Homo Sapiens
ttggctaccctttgtagctgagaacggcttgtttattgctacaaagactctattgacattggtagcttcagcggcagcagcttcttacggtataaagctgttgcttcctgaagaggctacaagcatccttccctaggactgctgtaagctttgagcctctagcaggagacatgcctcggggacgaaagagtcggcgccgccgtaatgcgagagccgcagaagagaaccgcaacaatcgcaaaatccaggcctcagaggcctccgagacccctatggccgcctctgtggtagcgagcacccccgaagacgacctgagcggccccgaggaagacccgagcactccagaggaggcctctaccacccctgaagaagcctcgagcactgcccaagcacaaaagccttcagtgccccggagcaattttcagggcaccaagaaaagtctcctgatgtctatattagcgctcatcttcatcatgggcaacagcgccaaggaagctctggtctggaaagtgctggggaagttaggaatgcagcctggacgtcagcacagcatctttggagatccgaagaagatcgtcacagaagagtttgtgcgcagagggtacctgatttataaaccggtgccccgtagcagtccggtggagtatgagttcttctgggggccccgagcacacgtggaatcgagcaaactgaaagtcatgcattttgtggcaagggttcgtaaccgatgctctaaagactggccttgtaattatgactgggattcggacgatgatgcagaggttgaggctatcctcaatttcacgtgctaggggttattccgcccctttaagtagatctgagccgacccttggggggtgtaaaa

SEQ ID NO: 189662 - DNA, 1014 bp, Homo Sapiens
ttggattcctgggccaatggagggaggagcccaagatgcctctgctgctccttggagagacagagcctcttaagttggagcggggctgccggagcccagtggacccctgggctgctgccagccccgacctggcacttgcttgcctgtgtcactgtcaggatttgtctagcggcgcattccctaacaggggtgtgttggggggagtcctctttccaactgtcgaaatggttatcaaagtgtttgttgctacatcttctgggtccatagcgattaggaagaaacagcaagaagtagtgggttttttggaagcgaataaaatcgactttaaggaattagatattgctggagatgaagacaacaggaggtggatgagagagaatgttcctggagagaaaaaacctcaaaatgggattcctttgcctccccagatcttcaatgaggagcagtactgtggggattttgactctttcttctctgcaaaagaagagaatattatttattccttccttggtttggctcctcctccagactcaaagggatcagagaaggctgaagaaggtggagaaactgaggcacaaaaagagggcagtgaagatgtgggcaacctccctgaagcccaggagaagaatgaagaagaaggagagacagccacagaagagacggaagaaatagccatggagggtgcggaaggggaagccgaggaggaggaagaaactgcagaaggagaaaagagcctggagaagacgaagattcctaggccttttcatgcttcatttcttccacttctccagaaatggaagctatgaagcaacatttcaaatgtctctccacaaaccaaactcaacagaatactttggcttgaagccggcacacccagggtttactgaggacttatgctgcctgacctggttagatgtacatggaaggtatctccctgaatcatacaaaattaattgtgaaacccgtttatgcatacccttccatgttgccctgacagtcttggccttttgaaga

SEQ ID NO: 189663 - DNA, 1662 bp, Homo Sapiens
acagccccaacacagagaatggtcagaacagcactagtgccaaggctgagaaacccggtcctggagggggtgctttacccgtaagattctcaatttagcatgagcggaggcccttgggatttacagtcagatgaatgtgaatgccccacctcaagccctaacatgctaacatgccactgccatgttgagcagaagtccccaattatcccagagtgttccacaaatgtccagacagctgctggaggttcaaattccagccaatacaactccaaccttacatccttctgtctttctcttctgaaaagcctcctatttctttctcagagccagggctaccccgatggccactgccaggatggcaacagcagcagcccctccaaacagcagtatagacttgccctcagacagcggcatgggcttcatctcaccggcgggggacagtctagacttgccctcagacggcggcacgggcttcttctcgctggcaggggacagctcttccacaaggctctcttcccttgcgtttatctccttctcactcagcagcgtttctgtgggttccagtgcggggaccacctcctccacttcagtaggttcagttgttgctgctttcacctcttcttcatcaagttctacaaacagagatgtagcagggctggatttctcaactgtgatcacttctgtgtcaggttcccttgtccccagcagggaggtggcagtgatatgtggaagcaagggagctggggcttcaggaagtgcctcttgcagctcccgcgctggcaagaccacagaagccacagcagcctcttccatgccctcgggcacctcttctttctccacgtgcacaatgtcagaattagaggagttgttctcactcttctctccagctccgttgctgtctaagcttttcacttcttcaggatccattgcaatctgctgccaggactcagggcctagtgacactggcaggctttctgtgtgccaactctggctagctgacagtgacacaggtaagctctcagactgccaggaagtggtcacagttggagactctgggggactgacttgtccagagttgtcgctgggcaggatgtaaatgtcattgctatcttctgcagtgattccagggtattcctcctcctctgactcaagactaaacacagtgccccagccaccttgctgaatgatgtactctgccgaatagtcctccaggtatgtcacgccaaactgcagcagtgcgctcaaaggttcttgaccacgtcttgtcaattccaaaagcatttgtcgtagcaaaaccagaggcaccaaaattggctcaggagcatttgcaatgctttatggagaggctctttcagttcctgggacactttttctccaagatgggccaagcagtcttccattgagctttctggattggcagggctgaacactggagaagtgtgacggtcaaagcctgtgctggtgaaggcttcagaaatttctttgtccagagattttagctcttcttcaatttcagttttaacttttaataaaatttcttgatccagagattgtgaagctctatctagttgaacccctgtggtccagctactcaggaagctgagatgggagaattgcctgagcccaacaggtagaggctgtagggagctgtgttctctccaa

SEQ ID NO: 189664 - DNA, 976 bp, Homo Sapiens
ttggctccaataattctatattttctggcaagtttctatacgaagtatgatccaactcacttcatcctaaacacagcttctctcctgagtgtactaattcccaaaatgccacaactacatggtgttcggatctttggaattaataagtattgaaatgttttgaaactgaaaaaaaattttacagctactgaatttcttataaggaaggagtggttagtaaactgcactgtttctgtgataatgtgaaatgagaagtatttacattggagggccaatggctggtccttcaagtgctgttttgaagtgcagatttccattaaatgatgcctctgtttaatacacctggtacatttctgaagaggggctttataagcaggctgggcaggcccagcttataagttaaagggcatcacagtgagggtgtagtagataaattcaaggaaataagagatttgtaagaaactaggaccagcttaacttataatgaatgggcattgtgttaagaaaagaacatttccagtcattcagctgtggttatttaaagcagacttacatgtaaaccggaatcctctctatacaagtttattaaagattatttttattaccgtacatatttctcttgttttatgtaagcggatgtatatcctcttgttttatacaagccagttcccacttatgagggtacttttttggttttgctggcttaatattgtgtattggtcaatgaggccatttttacatttattacgttacagagttcatggaggttcacctttgtgactgattggtgataaaagatagccaagtgtcttacaagcagcctctgagtcaagtgttctaattttgggacaaagcagttttactgcttttccagacacaaaggctgctaaacaattaagaaataattactttctttcaagcaactaaaaatatatggcaatttaaaggtgtctgcttatttggttgaacatttaat

SEQ ID NO: 189665 - DNA, 1056 bp, Homo Sapiens
  misc_feature (454)..(469): n is a, c, g, or t
  misc_feature (550)..(558): n is a, c, g, or t
  misc_feature (751)..(851): n is a, c, g, or t
  misc_feature (882)..(907): n is a, c, g, or t
ttggcagagaatacacactggtgagaaaccctatgaatgtaaggagtgtgggaaggctttttatagtggctcaagccttactcagcatcagagaattcatacaggtgagaaactttatgaatgtaagaactgtgggaaggcttatgggagggattcagagtttcagcaacataagaaaagtcataatggtaagaaactctgcgaattggaaactataaattgaaattatgtgctgaaggaaggactctaaacatatgacttaagaaaattcatagtggtgaaaatctctacaaatagaactaaggtacaaatgccttacttatgcttcacaggttagtcagtctaagaatatttatacaggaaaaaaatcaccccaaataaaataaatatttgaagatccttatctatattcattccttcattacttttggaaaattcttacttgtgaatgttnnnnnnnnnnnnnnnntcatttatgatattttgcctcaactttaaacattggaaaactcatttctgggttaatcctactatattttttcaatggtcnnnnnnnnngtattatgcagaattactgattcattgaaaaattattttatttattgcaagtctaaatttatcctttttttctttcctgattatcctaacaccatttattcaataaccttgtccattttcatattttttttattgactatttgatggtaagttacatttttattcacataaagcttggatatcaggtcagtgnnnnnnnnnnnnnnnnnnnnnnnnnnnnnnnnnnnnnnnnnnnnnnnnnnnnnnnnnnnnnnnnnnnnnnnnnnnnnnnnnnnnnnnnnnnnnnnnnnnnngggtgacagagcaaggctctgtctcagaacnnnnnnnnnnnnnnnnnnnnnnnnnntgtcctacagaaaaaataataagattataaagtgtgagaagacaaatacactataaaatttgtaccagggtagaagtaaaaaaactagcagttttctccattgaaatccaaatattaattcagtactcatctgcatgattctttgctta

SEQ ID NO: 189666 - DNA, 878 bp, Homo Sapiens
ttggaaccagatcaacaaccccgaggtggaggtggacatcaccaagccggacatgaccatccggcagcagatcatgcagctgaagatcatgaccaaccggctgcgcagcgcctacaacggcaacgacgtggacttccaggacgccagtgacgacggcagcggctcgggcagcggtgatggctgtctggatgacctctgcagccggaaggtcagcaggaagagctccagctcccggacgcccttgacccatgccctcccaggcctgtcagagcaggaaggacagaagacctcggctgccagctgcccccagcccccgaccttcctcctgcccctcctcctcttcctggcccttacagtagccaggccccggtggcggtaactgccccaaggccccagggacagaggccaaggactgactttgccaaaaatacaacacagacgatatttaattcacctcagcctggagaggcctggggtgggacagggagggccggcggctctgagcaggggcaggcgcagaggtcccagccccaggcctggcctcgcctgcctttctgccttttaattttgtatgaggtcctcaggtcagctgggagccagtgtgcccaaaagccatgtatttcagggacctcaggggcacctccggctgcctagccctccccccagctccctgcaccgccgcagaagcagcccctcgaggcctacagaggaggcctcaaagcaacccgctggagcccacagcgagcctgtgccttcctccccgcctcctcccactgggactcccagcagagcccaccacccagcccctggcccaccccccagcctccagagaagccccgcacgggctgtctgggtgtccgccatccaggggtctggca

SEQ ID NO: 189667 - DNA, 684 bp, Homo Sapiens
agagtcccctcgcggcagcagatgtgtgtggggtcagcccacggcggggactatggtgaaattcccggcgctcacgcactactggcccctgatccggttcttggtgcccctgggcatcaccaacatagccatcgacttcggggagcaggccttgaaccggggcattgctgctgtcaaggaggatgcagtcgagatgctggccagctacgggctggcgtactccctcatgaagttcttcacgggtcccatgagtgacttcaaaaatgtgggcctggtgtttgtgaacagcaagagagacaggaccaaagccgtcctgtgtatggtggtggcaggggccatcgctgccgtctttcacacactgatagcttatagtgatttaggatactacattatcaataaactgcaccatgtggacgagtcggtggggagcaagacgagaagggccttcctgtacctcgccgcctttcctttcatggacgcaatggcatggacccatgctggcattctcttaaaacacaaatacagtttcctggtgggatgtgcctcaatctcagatgtcatagctcagtttgtttttgtagccattttgctttcacagtcacctggaatgccgggagcccctgctcatcccgatcctctccttgtacatgggcgcacttgtgcgctgcacaccctgtgcctggg

SEQ ID NO: 189668 - DNA, 1642 bp, Homo Sapiens
ttggctctgagatcctgaagcacgtgcctgaagacttctggccgccgcagcccaagctgtacaaggtgggcctgggcttgggctacctggagctgccacagatcaactacaagctctccgtggaacataagcagcgtcccaaggtggagctgatgccaagaatgcggctgctgcagagtctgctggacacgcgctgcgtgtacattctggactgttggtccgacgtgttcatctggctcggccgcaagtccccgcgcctggtgcgcgctgccgccctcaagctgggtcaggagctgtgcgggatgctgcaccggccacgccatgccacggtcagccgcagcctcgagggcaccgaggcgcaggtgttcaaggccaagttcaagaattgggacgatgtgttgacggtggactacacacgcaatgcggaggccgtgctgcagagcccgggtctctccgggaaggtgaaacgcgacgccgagaagaaagaccagatgaaggctgacctcactgcgcttttcctgccgcggcagccgcccatgtcgctggccgaggcggagcagctgatggaggagtggaacgaagacctagacggcatggagggtttcgtgctggagggcaagaagtttgcgcggctgccggaagaggagtttggccacttctacacgcaggactgctacgtcttcctctgcaatactgggtgcctgtggagtacgaggaggaggaaaagaaggaagacaagaggagaatgccgagggcaaagaaggcgaggaagcaaccgctgaggcagaggagaagcagccagaggaggacttccagtgcatcgtgtacttctggcagggccgtgaagcctccaatatgggctggctcaccttcaccttcagcctgcaaaagaagttcgagagcctcttccctgggaagctggaggtggtacgcatgacgcagcagcaggagaaccccaagttcctgtcccatttcaagaggaagttcatcatccaccggggcaagaggaaggcggtccagggcgcccaacagcccagcctctaccagatccgcaccaacggcagcgccctctgcacccggtgcatccagatcaacaccgactccagcctcctcaactccgagttctgcttcatcctcaaggttccctttgagagtgaggacaaccagggcatcgtgtatgcctgggtgggccgggcatcagaccctgacgaagccaagttggcagaagacatcctgaacaccatgtttgacacctcctacagcaagcaggttatcaacgaaggtgaggagcctgagaacttcttctgggtgggcattggggcacagaagccctatgatgacgatgccgagtacatgaaacacacacgtctcttccggtgctccaacgagaagggctactttgcagtgactgagaaatgctccgacttttgccaagatgacctggcagatgatgacatcatgttgctagacaatggccaagaggtctacatgtgggtggggacccagactagccaggtggagatcaagctgagcctgaaagcctgccaggtatatatccagcacatgcggtccaaggaacatgagcggccgcgcccggctgcgcctggtccgcaagggcaatgagcagcacgcctttacccgc

SEQ ID NO: 189669 - DNA, 1011 bp, Homo Sapiens
  misc_feature (186)..(281): n is a, c, g, or t
  misc_feature (792)..(822): n is a, c, g, or t
ttggcaccccagtggtttctgtggcaacgccgagtttactcagccagggcctccccttctcttccatgcccactgcctacaacacagattaccagttgaccagtgcagagctctcctccttaccagcctttagttcacctggggggctgtcgctaggcaatgtcactgcctggcaacagccacagnnnnnnnnnnnnnnnnnnnnnnnnnnnnnnnnnnnnnnnnnnnnnnnnnnnnnnnnnnnnnnnnnnnnnnnnnnnnnnnnnnnnnnnnnnnnnnnncctcagcaacagtcccacctggtccctgtatctctcagcaacctcatcccgggcagccccctgccccacgtgggtgctgccctcacagtcaccacccacccccacatcagcatcaagtcagaaccggtgtccccaagccgtgagcgcagccctgcgcctccccctccagctgtgttcccagctgcccgccctgagcctggcgatggtctcagcagcccagccgggggatcctatgagacgggagaccgggatgacggacggggggacttcgggcccacactgggcctgctgcgcccagccccagagcctgaggctgagggctcagctgtgaagaggatgcggcttgatacctggacattaaagtgacgattcccactcccctcctctcagcctccctgatgaagagttgacaatctcaccgcccgcccttccctgccccgggctcctcccgctcgacccccacttcctttcttgtgcttcgtgtcctgttgacggttacatttgtgtatannnnnnnnnnnnnnnnnnnnnnnnnnnnnnntttttaatttggattctcgctttggagagggggatgctctcatcccctctttctgtaccccccaccattttcactggctggggggctctctttttcgcgggaaggggggacactttgcacgttgtacacatatgctgcaggaagggggtggggggcccaataaggcctttgggaaaggacaggtgccga

SEQ ID NO: 189670 - DNA, 1446 bp, Homo Sapiens
tgtacaaacaagatggcagcccccatacctcaagggttctcttgtttatcgaggtttttgggctggtggtttcggcagccagttctggtgactcagtccgcagctatagttccagtaagaactaaaaaacgtttcacacctcctatttatcaacctaaatttaaaacagaaaaggagtttatgcaacatgcccggaaagcaggattggttattcctccagaaaaatcggaccgttccatacatctggcctgtacagctggtatatttgatgcctatgttcctcctgagggtgatgcacgcatatcatctctttcaaaggagggactgatagagagaactgaacgaatgaagaagactatggcatcacaagtgtcaatccggaggataaaagactatgatgccaactttaaaataaaggacttccctgaaaaagctaaggatatctttattgaagctcacctttgtctaaataactcagaccatgaccgacttcataccttggtaactgaacactgttttccagacatgacttgggacatcaaatataagaccgtccgctggagctttgtggaatctttagagccctctcatgttgttcaagttcgctgttcaagtatgatgaaccagggcaacgtgtacggccagatcaccgtacgcatgcacacccggcagactctggccatctatgaccggtttggccggttgatgtatggacaggaagatgtacccaaggatgtcctggagtatgttgtattcgaaaagcagttgacaaacccctatggaagctggagaatgcataccaagatcgttcccccatgggcaccccctaagcagcccatccttaagacggtgatgatccctggccctcagctgaaaccagaagaagaatatgaagaggcacaaggagaggcccagaagcctcagctagcctgatgacaaaaatgacttctagggtgaagcctgggtgatgaggctgctggaagctttgaagtctcccattcccctcatgctataaaaagaactacctttgttctctcccatcctgctcaggtcttttcagcagtctcatcatcagcaaccatgactgatgactgggccctagcaggtggcaggtataacatggccatggacactcttcttttttaaattttatgtctagcttctgagtctagatgaaagacagtatgtttcagagaacattggatatcagtttttcccacaccaaggactgtgagagacaaccagcagcatcctctttgtaatcacagggcaagggatcagagtttgaaatgaaatgttgtcagggtgttggaaaaattttggtgagttctgcacattttcccctggttcaagctgcgttggaccagccttcgatggcagagtggaaaatgacctacctgggaccgatgtgactttaaggaatgaaaacgggggaaaatattatgg

SEQ ID NO: 189671 - DNA, 1133 bp, Homo Sapiens
  misc_feature (126)..(138): n is a, c, g, or t
caactttgtacaaaaaagttggaataacccaaccaaacaattttgggttagccatctaatatagcaaataaaatagattttttaaagaaatccaaaattgtcttaaaggaatggaccccttgaagnnnnnnnnnnnnngttttgttcctcagttagaatgctcactagctcactagcaagaatttttattttcttgaaagcaattatatatattttggaaagttcatgttattggaattgaagttcaaattaagcaacttctgagcctagaactttaattactttttcctaaatgtcccaacacttacatacaaatttctttgaagacataactggacatggcagacactgctttgaacaaaaaccagcctagtgaattgactgagtacagtcctttaaggctgcccagttcattctattagatgactaaggaaaactagaaaaagaatacagttcacccttgtcaaggtgaaatgtgaaagacagaagtttatttaatgtagaggtaaatgaaggtgagctgttttcagcatcttagtttgaccatgaaaatgtctatagaattatgtgtagttgttccgtacgattttattttcttcatttatttatttacagtcttatttatgttctgtttaatatatagtttgattctggccattttaaatatttgacacagaagagactatattggaatatttacagctttataagtctttcatcagattagctgttgactttttgtaatacaaaaagtttcagacaagtattaaagaataaaatctgtctcaggctggtagttagcagttgtgaccaagatgcttttggttgttgtatttcacaaaatttcctcatttctaacatgagagatgaacttattttaatataatcctttttctacactttaaaagtcagcaatagtgttatgtatttataggcagcttttaataatcttgtcatatttgtactaacccaaatgattcacagtgacaaaacattttaataacttgatcacaaaaccatatggacaaatatgaattttaatattataaatactatttttaaaaatagaatttattcgcacacggtaaaagaatgtaatatttagttctcaagtttgaattatcagtatatta

SEQ ID NO: 189672 - DNA, 1485 bp, Homo Sapiens
ttgggtggcattgtttctgctgtggtgggaactggcagggagagggtcacctccactctggttggatgcggagctggtccctctggctgccatgctgtgttggggctctctgacctccctgcttgcattgggtctgggagagagagtggaatatttggtagggaccttgacagaagagagccctgggtgcttgtggtgcaaagatcttcatgcccagttccaaagtgaggtccctcccaaagttgttttcgtgtgaggcagagaaagccacactctgaatacattttatgtctcaggaattcacattccaggttcaggaattttattccaaagtcctttggtgcactcaccgtccaccgttccccaaggcagggagagggagtggcccgtccctgggaggctggcaaagtgctctccagggaggggtcagacgtccttgtgatctgcccagggtgtcacggaaggagattttctagctccacatctgtctgcacataggaaggaaaagataggactctaaacctagtcatcttggaataaaaagaagagctggtttgttttagagcagggcggggggtgggggagggaagcgggtgttggctgtttccaaagagagcacttaatttaatttttcctttaaatgacccagggctgttccgtctgatagatggaagggtaacattgccttaaaacagaaatatgcaggcgttggctatttttggcataagagcgtgtcttcattcccaaagtggttctcgtttaatggcagggtgcggtccttaggccccggcctggactgggaaatgggggtagggcaccaggagagaaatcctcctgggtactcctggccagaccctcctgaatcatctgcggcttaaactcatctcgcttgaagggcagggagaaacccatgaatctcaggcacggttcacaggggtcctcaagggcaggtttccatttcatcatgaagtgagggactcctgtggaagagggtggtgggccttggaacgctgcctccactgaggcgggcacacaaggcggaccctcctgaaacagcctccattttcttcaaacatgcagaatgttttcccagactgcgtctatttcagggtcttccatttttgtggtttatggccatgcttgccagttttggtggggttgaggaacccataggactcatagaaataatagtgaaaactcaaacccttattttgggacttcagttctcgtggtccataggggcagagatgtcaaagtgaaggttgcctgagtgaagggagagttcccctataaaaggcctaaaattgatttggggctcagccatcaaggggctggtgttgctcctgtcccagacaaggaagcccctctttacatcagccatattaggggaacggttgtcagctccccaaatgcctactggatcctacagccatacaggaaaacagacggacacagccctttccttaaagagccctggggtcctgt

SEQ ID NO: 189673 - DNA, 900 bp, Homo Sapiens
ggatgtgaagggcccaagactgtgaaatagtagggccccgtccacttcaaaggcactctccacccacttctctttgggctgttccagaaagccttggaggttcttctcttctcgggaagttgctcgggttgtgttcaggacgtaaagcacagtgtgaatgatgtacgggatcaggtggatgttgctctcccggccgcccccgccagtgtctgcgctgaacgactgctccatggcgaagcgcaggaagagcagtttgatgtcgtggatgttgagctgatacgtgggctcccgctggcctgtacattcctggaggtaagtgttgtgtcttgccaagcaagtggcaaaagctgattcagggacatgaggtccccagaccggaaggagcccgttgcacttggtgttggcattctgcagggcggcactctcccactcttcccggcctcgagccaacctgacggcagccagatggcagtcgtagtgcacaatgttgaagtgggacacggtgctgtagccctgctgtttccggggcttattctccaactcctccaaggctacccgcttcgtgaaggtataaatgcccaggacctttgtgggctggaacttgtatccctccctgcagatgcagcacgtgaggccaggctcctcgatcagctcttccatctgcttcaggagtgctgtcttggtcacgacctggcccttttcatttgtcgtcatgcccagggtgcccagggccttctgcctcattgccatggccatgcgtttcttctctgcccgggtctccctgcgggctgcgtcaatcttcttgtttacgtcagggtgttcccgcagggcttccagcaggttctctgccaaggtcccaatgccctcatcactggacacctgctccagcttatttgtaca

SEQ ID NO: 189674 - DNA, 1052 bp, Homo Sapiens
cacaggagtagtcaaaaataaatgttttgtattaagtagtaaaataaatggagaattctaccccaaagcctccacctcagtgaagacctgcgggttatggcagcggcaagggaagctacagcacagtcgtctcagaataaacagcagcctggaaagcagatgtattcgcaggtatcgagggctcctccgaccccaaatagcctctgctctccaggacagttgagagctactcacaaggaaggggtgcacagtagggccaccctctcgagttccataaaagggagaggtggctgggtggggtcacctcttcctttctgaggacaggtaaggccaacagatgaaggggtcccgctgaggaagcaggggagggcgggctcggacacaacggtggcgtcagccccgagaagcaagggatggcttgcccagagccaccagctatgcaccgggagaccacctggaggacatgtggccaccatcccccactctcctgatagccccaaccaggggcagcagcctctgccagcacagaccactgtctatgaaacatgagaaggcacagcctggcaaagatgtccagcaggtgtgcggccacctctgctcacacacacactgtcgtttctcttgcagggctggtcgggaatgtcaccaaagaggttccgatctagagaagcctcaaagcctctgtgttgggcggtctgtggacactggtaccgggagagctcctaccgtgacaggctcccagcgcagcagagcccacacagagagctccctcagatccagaccgacagctcccgggaagggacgccttgtctccaggaggctgcagaacaaaccacggtagtcctccttccacaggggcacagtcagcggcgatagctgaggctggcagcctttgctgggtgagtcacagaccagaagttccgtcgagtctgaagtttctggaaggcgttgaagtttctcctcttctctctcttaaattttttaattttcttttccttccctcggtcaaactcttcgtcccagtcatcaaccacggtctcagtccgggccaa

SEQ ID NO: 189675 - DNA, 1220 bp, Homo Sapiens
ttggctcactcctcattccttcggggactttgtccagcccttggcagcatgaggcctcccatcatcatccaccgagctggcaagaagtatggcttcaccctgcgggccattcgcgtctacatgggtgactccgatgtctacaccgtgcaccatatggtgtggcacgtggaggatggaggtccggccagtgaggcagggcttcgtcaaggtgacctcatcacccatgtcaatggggaacctgtgcatggcctggtgcacacggaggtggtggagctgatcctgaagagtggaaacaaggtggccatttcaacaactcccctggagaacacatccattaaagtggggccagctcggaagggcagctacaaggccaagatggcccgaaggagcaagaggagccgcggcaaggatgggcaagaaagcagaaaaaggagctccctgttccgcaagatcaccaagcaagcatccctgctccacaccagccgcagcctttcttcccttaaccgctccttgtcatcaggggagagtgggccaggctctcccacacacagccacagcctttccccccgatctcccactcaaggctaccgggtgacccccgatgctgtgcattcagtgggagggaattcatcacagagcagctcccccagctccagcgtgcccagttccccagccggctctgggcacacacggcccagctccctccacggtctggcacccaagctccaacgccagtaccgctctccacggcgcaagtcagcaggcagcatcccactgtcaccactggcccacaccccttctcccccacccccaacagcttcacctcagcggtccccatcgcccctgtctggccatgtagcccaggcctttcccacaaagcttcacttgtcacctcccctgggcaggcaactctcacggcccaagagtgcggagccaccccgttcaccactactcaagagggtgcagtcggctgagaaactggcagcagcacttgccgcctctgagaagaagctagccacttctcgcaagcacagccttgacctgccccactctgaactaaagaaggaactgccgcccagggaagtgagccctctggaggtagttggagccaggagtgtgctgtctggcaagggggccctgccagggaatggggtgctgcagcctgctccctcacgggccctatgcaccctccggcaggaccgagccgaacgacgggagtc

SEQ ID NO: 189676 - DNA, 849 bp, Homo Sapiens
ttggctttgtcttggagtagaatactaagttagagttagtggatttctagtttaggagaggagctcaaaactataatctttaacaaattgaaaaatgaaatagggtgttttccctttttgtgcacacctatattaccttaagaaatttccttccatagacagctgcctcaaagggaaatcctctttaaaccgtagttggcgcagaggtcagtcctagtcggagcttaggaggggcggagacgctcacatcgtctgacttgagtcgccactgattgtggcaacagctttgcctcatgagtcaaaaattggcaatttcttttgatttttagttgttgaatttgctgtttcaagcatttgtacatattagaagtctaaggagtagcaagtcagtgggaggactttttcacccctggcattagcagcttcgacctcattttccagatgcaccagctcctattaataagttagcaaggaaagtgtatgtcacgtgcaggaacagtgaggcagggacaggggttctgctccttctcacttcaccaccggcacacagcttgcccctgtctttgcccccaaaggtattttgtgtctagtgtcaaattggagctattcttcactggtccttaaccttgggttttaaaaaagaaggcttctctgtttgggtagcgtaagagctgagtatagtaagtcctcttccaaaagagatggcaatatgctggggcatctactttaaaacaaagttggtctgatttttgcaagagaggttaagggattttattgttcttaattccctttaccggttctgcagttctcatcacggtattttttttaataacctcaggtgtatgagaa

SEQ ID NO: 189677 - DNA, 1132 bp, Homo Sapiens
gagggagccgcctgcctccaggtgctgggcccccagggtcggcccatccactaggaagggctcggtggcgctggtgtgggtggtggtgatgctgctgtactcgctttgcagcgggtgctggaagagcccggcacggctgcccagctgcgggaagggtcctccatcctgggactctatggtgatgatgccctcgcgctctggcccgaagccctcagtggtcctggcctgcaccttgaacttgtagggcacgttctcgctgaggcccggcacggtcagccggctctcggggctgtctccatccacccggaatgcggtggctggccctcctccttgggccatctcacaggtcaccaggtagccgacgatatccccattgggcctccgtggccgctcccagctcagctgcagcgagtctgggctcagggcagtgaacaccagcgggcctggggcactgggagtgctcaaagtgaaggcggagcctggcaggggacacagtgggctctgcgggtgcacctgggattcaatggtgatgacaccctcacgctctcggccccagccttcctggctctgggcccgcacgcggaacacgtaggagtggttgggcaggaggtcttccaccaccaccgaggtctgggcagggttggggatgttgagccgatgcagctcaccgccgttcagcagctggtactccacactgtagccctgcagcggccgctcgcaccgcggctcctgccagctcactctgagagatgtgggccccagggcagagaacaccaggcgggtgggcgtgtcgggcacaccagcagtcaggcgagagtcgtgggaggagacggaggtgagggtggagtagtccctcggcagtgtggtcgagtgtgagtgttctgagcgggtcagtgagttgtagtcccgtgtgagggtggaggatgtgcttagcacgcggtggggcacgtgtgggctcaggtgggtgccataggcagcagcactggtcgtggtcatcctgtgcagggagttggtgctgcccgggaaggcaaagtccatccggccattcaccaggtgctcagtgtcatcggagacgctgggcctctggctgcccgatggagagcgtagaacgtcatcgctgtacataagccaa

SEQ ID NO: 189678 - DNA, 1451 bp, Homo Sapiens
ttggctgccatgtggtcagagaaaaactttatgccgcccactgcagggacctgccctgcattccctgtggagctaatgcacattttccacgtagatttctcttggactttcacactggaaaatgacaagccattctgtggatcaataatgtacttggtgctcccatgaagctgggagccgaggcagaggctcatgagtttgaggctctcaacgagctccccagcactgcgagaggccagctgcatggagttgctggggccggcacagcggcgtgtggtacccgatgtattggtggggttgccacccgagccgctggagggactgcccccaccagcattgttctcactggggctggccttgtccacccctccactggcattgcttggcttgctctggcccccgccatccccctcactgccagggggcccctcgctgctatcccgtcggtgccaggagtaggtgaacccgctatctttatcgagccgccgccggctttcagaatcatcatcactggtctccgaactactgcagctggagccccggccctgacttttcctccggtggtagcgtttgtgaactgtacctggagaagctatattcatctttaacctgctcaacttgggaggcagattctcatccatgtcaaactcatcgtcagatccccttcctcaaagatctggttgaggacgggcgcactcttcctggatgtcaggcggttggttacagatggcttccggcgcaaaaccacttgtgttgagagggacatgggtttcttgtcctcctcatcttcctcttcatcttcttccaccctgaacagacacttccgcccactggctgtgggttttaagcttgcgggtggcaccgtagagagtgctggtccagccaactcagggaggtcatctttcttagctgagtcacacaggcctttgctcctgtggccattgaggacactgtcagcagcccgagcagaagactgagggacagtcgcgtgggacaaaggagtggccgtgaggtcatcctcaaggtcctggggtacatcaattttggttggccatgactgcctatgtaacagatagattggggggaaaaaagccatataatcattatgcagatgatagtaaagtacatcacaatgaacttactgggacaaaatctacagacttaaagaaaaaagcagcagccttgcaaacccattcaacatcctgtaaacatcagcaaggccaccagaagggcaaatgtggttttgaaacatggttcagtttgtggcttattggccaagtgaaaacttcatcacaggtgtcagaaaagaaaatagggcaaagagctactccatcttttctatacaaaagctttatactaaacattttttagaagcccatggaggttattggcaaagcaaaacctgaacaccacgtcttgtttctttggttcttagatcacataaaggccaa

SEQ ID NO: 189679 - DNA, 1144 bp, Homo Sapiens
  misc_feature (896)..(954): n is a, c, g, or t
acaaaaaagttgggccatgatgatattgttactgagtttggtgattcagcttgctttactctttcattgttgggacatgtatattgcaagacagatcggcttgccaaaggatcagaatgttaccaaaagagccttagtttaaatcctttcctctggtctccctttgaatcattatgtgaaataggtgaaaagccagatcctgaccaaacatttaaattcacatctttacagaactttagcaactgtctgcccaactcttgcacaacacaagtacctaatcatagtttatctcacagacagcctgagacagttcttacggaaacaccccaggacacaattgaattaaacagattgaatttagaatcttccaattcaaagtactccttgaatacagattcctcagtgtcttatattgattcagctgtaatttcacctgatactgtcccactgggaacaggaacttccatattatctaaacaggttcaaaataaaccaaaaactggtcgaagtttattaggaggaccagcagctcttagtccattaaccccaagttttgggattttgccattagaaaccccaagtcctggagatggatcctatttacaaaactacactaatacacctcctgtaattgatgtgccatccaccggagccccttcaaaaaagtctgttgccagaatcggccaaactggaacaaagtctgtcttctcacagagtggaaatagccgagaggtaactccaattcttgcacaaacacaaagttctggtccacaaacaagtacaacacctcaggtattgagccccactattacatctcccccaaacgcactgcctcgaagaagttcacgactctttactagtgacagctccacaaccaaggagaatagcaaaaaatnnnnnnnnnnnnnnnnnnnnnnnnnnnnnnnnnnnnnnnnnnnnnnnnnnnnnnnnnnnggaggaataactcaacctaacataaatgatagcctggaaattacaaaattggactcttccatcatttcagaagggaaaatatccacaatcacacctcagattcagcctttatctacaaaaagcagcagcagtttgatgagccttcttcgtgaaatggggaaagttatttagctttgtgttcatacaactg

SEQ ID NO: 189680 - DNA, 672 bp, Homo Sapiens
aactttgtacaaaaaagttggcttcatctgttgacacagcttttatactcacctgtggaagagtcagctactcacccgctattagagtatggaggaaggggttttcattgcattgcatttctgaaacattcctaagaccctttagttgaccttcaaatattcaagctattctgcagctccaagatgcaattatagaaacagctccttttttattttatgtcctctatatgccaggtgcttcacctgttatttcacttaatcctcataccatatttgcaaaggatgtgttattatcttgtgtgacaaatgaggaaactgaggctcaggggataaagggacttgcccaagtcccacagctggtgtgtgactgcagagactgtgctcttcccagtgtgctgcaatacttctcaaccctcctctaacctgctgtgtcacccgctttccctcccagcccccacatccttaccattttccctccctgggaattcctgcttctgcgaaaatggtatcctctagctcacactttcctaatggccccatctcctgcagaagccaggtgagcccagcactggactgaagttcttgcagacaccccacctgtgcccctatcatcaggggaactgctccacctgagaggaccaactctttaatttttagtaaaacctggaggtg

SEQ ID NO: 189681 - DNA, 1582 bp, Homo Sapiens
ttggagtgaatatgcccgcttgggctccaaaagttgctgtacggtattttattttaaagtagaaatctgtccgcttttcacttacggaggccttacagtgtgtgttctgtgttacttgagtttatacgcactgcagaatttgtttaccctgctcttttggaaacgtattccggaagcgaaaccctgagtaatcggaagtggttaggagtgagagagctgctggatatgcggagggactgggcgggtcggcttccgaatggaagaggtctgtgagaagttaacctggtgataccgatccgaagagcctatcaagtgaagccccctgaaatacggagaataagaatcttagaggttgttcagcagaagtcttggagtgcattttcagtggttaaggtgaaaaaatgactactaaaaatttagaaaccaaagtcaccgttacttcatccccaatccgaggagcaggagatggaatggaaactgaggaaccacctaaatctgttgaagttacctccggagtccaatctagaaagcatcatagtcttcagagtccatggaagaaagcagttccatcagagagcccaggagttcttcagctagggaaaatgctcactgaaaaagcaatggaagttaaagctgtaagaatattagttcccaaagctgctataactcatgatatccccaacaaaaatacaaaggttaagtctctgggacatcataaaggagaattccttggtcagtcagagggagttatagaacctaataaggaactctcagaggtaaagaatgtattggaaaagctcaagaattctgaaagaaggttactacaggacaaagaaggtctttcaaaccagctccgtgtacagacagaggtaaatcgtgagttaaaaaagttactggtggcttctgttggggatgatcttcagtatcactttgaacgtctagcccgtgagaaaaatcagcttattttagaaaatgaagccctaggtcgaaacacagctcagctttctgaacagttagaacgtatgtcaatacagtgtgatgtatggcgaagtaaattccttgcaagcagggtaatggcagatgagttaaccaactcaagagcagctttacagcgtcaaaaccgtgatgcacacggggctatacaagatctcctaagtgaacgggaacagtttcgtcaagaaatgatagctacccagaaattattggaggagctcttagtttccttgcaatggggaagagagcaaacttactcccctagtgtacaaccccacagcacagcagagctagcattaacaaatcacaagttggcaaaagcagtaaattctcatcttctgggaaatgttggcattaacaatcaaaaaaagattccatcaacagttgaattctgcagcaccccagctgagaaaatggctgaaacggttctaagaattttagatccagttacctgcaaagagagttcacctgataatccattttttgagtcttcacaaccaccttacttgctacaaagaaaatattggacgatttcatccctatactagatatgaaaatataactttcaattgctgcaatcactgccggg

SEQ ID NO: 189682 - DNA, 1460 bp, Homo Sapiens
ttggctcagggaacaatctgaagtagtctcaaaggaagtgacaggaaggatgtggagaaagctgagtgtcaaagtcagtattcaagaccggatttactgctacttagagatgaatgaagaaatcagagggaacgcagtgtgctgatgctaaagcggctgtcaccacccagctgtgtgacataggacatcttctttctctgtctcacttgactaatatgttgtgtcaggggagacatgattgtaattgcctaaagcaattcttgtgatcaagaatcagaagcatgaacagtattgccctctgtgttagcccctttataagggaggaagtcatcttcagcatgctgaattgtcatctttcttagcagtgcaaatgactaaaacttagccaatgtagagtttgtccaaatttggagctcataactcagttcttgagcaaagtgaaaagaaaacattgtgattatggggaaaatatttgtacgggacttatcaaataaagataggaaaagaagaaaactcaaatattataggcagaaatgctaaaggttttaaaatatgtcaggattggaagaaggcatggataaagaacaaagttcagttaggaaagagaaacacagaaggaagagacacaataaaagtcattatgtattctgtgagaagtcagacagtaagatttgtgggaaatgggttggtttgttgtatggtatgtattttagcaataatctttatggcagagaaagctaaaatcctttagcttgcgtgaatgatcacttgctgaattcctcaaggtaggcatgatgaaggagggtttagaggagacacagacacaatgaactgacctagatagaaagccttagtatactcagctaggaatagtgattctgagggcacactgtgacatgattatgtcattacatgtatggtagtgatggggatgatagaaggaagaacttatggcatattttcacccccacaaaaatcagttaaatattgggacactaaccatccaggtcaagaaaagtcacatgccatagccatggtattgcacatcattcatcttgcattctttgagaataagaagatcagtaaatagttcagaagtgggaagctttgtccaggcctgtgtgtgaacccaatgttttgtttagaaatagaacaagtaagttcattgctatagcataacacaaaatttgcataagtggtggtcagcaaatccttgaatgctgcttaatgtgagaggttggtaaaatcctttgtgcaacactctaactccctgaagttttgctgtgctgggacctgtgcatgccagacaagaccaagctggctgaaagagcaaccagccacctctgcaatcttgccacctcctgctggcaggattgtttttgcatcctgtgaaaagccaagaggcaccagcataagtctctccctaaatctgtttgtcgggacataaccctgtttgtttt

SEQ ID NO: 189683 - DNA, 996 bp, Homo Sapiens
aaagttgggtgaaactccctctcaaaaaaaagaaggaccactctcagtatctgatttctgaagatgtacaaaaaaatatagcttcatatatctagaatgagcactgagccataaaaggttttcagcaagttgtaacttattttggcctaaaaatgaggtttttttggtaaagaaaaaatatttgttcttatgtattgaagaagtgtacttttatataatgattttttaaatgcccaaaggactagtttgaaagcttcttttaaaaagaattcctctaatatgactttatgtgagaagggataatacatgatcaaataaactcagttttttatggttactgtaaaaagactgtgtaaggcagctcagcaccatgcttctcgtaaaagcagcttcaaatatccactggggttatcttttgacaacttgccattatctgatgttacacaattcaatagcaagcaagtttgagacaatcgcagtttaaaagcatgaaccatttaacaaaaagtggaataattaaagataaagcacttcttcccaaagggaattatcacctagtgaaaaattatgcatttcatctactcagttaccgactgcaagtctctcctcgctctagctctcaagctttgggtgaatattcctgtgaaatatatcttcaacttgaaagttcatactccaatcaaaaactccttttactgagtttgcagtactgtatttgcactgtttgtattcctctgggcccttattgctacttttgctttcctttgttacacagattttgtgttgcactttttctccagaggggtgttgtagagccttggttgtatgaataataccagtggtagtgtccacgggtctaatgtaagcccatttggcatcactcctctcctctctcgagaggatttcttgtgcacagagtatgaagcagttgtgggagcgctgtgccctttgtcaagataccatcttgtttgatgatttcttttctttgctgttttt

SEQ ID NO: 189684 - DNA, 186 bp, Homo Sapiens
ttggtgctctgtggggatcaagaaagcaacgtgtggctctacgacgtcagcaacatcctgaagcagccacccctgctgccggcagccctgcaggcccccacacagatcctgaagtggccccatccctgggcccgaggccaggtggtgaccaataccatggtgaaaacattggtggccaatgcctcc

SEQ ID NO: 189685 - DNA, 1346 bp, Homo Sapiens
ccaaacaccccaaagtctctttattgaggttcttaaaaggcgagtgcaatctcagcctagggtagctgaaggaggtccagttcgtgtcaagtctgtgttcaggaagtaggtgcaaagctgccctttgcctttcaccttgatgacaccccggctgtagcaggtgtaccccagggactgtagggcccatgctgtctcctcagtcacttggattttgccaaggactcctgtactctccatgcggctggccacgttcactgtgttgccccaaatgtcatattgcggcttctgggccccaataactccagctactacgggtccatggttcaaccccactcgcaggcggaagttgttgaatgaatgcttgttgatgacgtccagcttaaaccccagggccacggcaaattccaccatagtgccaaggtggctgcagctccgttcagcatcctggcaatgggcccgcccaccagggtgggccagtgagggcacaggaataagtcccactaataagcccatcaatgagagcccagaggaggatggtaggtaaggaagggttgccgtacctgttgtgcatcctgtccagaggtggcatttaagcctgtggctgccatgtaggtgctgccgatggtcttgatcttctccaccccactgaacttgggcttggagagcagctcatcaaaatcagcaattatctcattgagcagcctcagacactctaggccctcatgattgatgttggattcagagtagaactccttgaagtctgggactgaggcgaagaggacacaaacgcattcataggactggtggtagagatcctcgttgcgccggttctggccaatgaactggggggccacgtgtgcagggagcacgttctccaagagcagccgagtcaggttctccatcgtctctgtctcctccctctcctgcctcagcttcttcttccacaggaagtccaggcggcagtagtactcattctggcgagccaggacaaggagggtgaagaagaagatgaagaaggagatagcacccatcagtttgggctccttcagcactccgggcctggagtccaaggggcccagatagaggcggacgatgaggcattccgacagccaggcatgggagtgcaggaagagggagcaggatgccgccagccacagcaggagcagcagcagcttcagctcgaagctcatgtgcagaaagagggagcaggagaggaagcccagcgtgcagcagtgcatggagtatgggacactgatgagaggcagagacccagggagctcccaggagaggttggaaatcatggaggacacattgggagcttggaaagggcagtctgatgatgccaa

SEQ ID NO: 189686 - DNA, 864 bp, Homo Sapiens
ttggctgaatgcagcccattctctggagaacttcctcacacaccgcagcaaagagaagactgaaagacaaacctgggtgcagccagagaggtccagatagatgagcttgtggcatccattccccaagttcagcctagggactccacgtaccccagctgggtctcattgttccagaactgcattagttaagattacccagacttggatttcaaaggaatactttcattgttccgtctgtaacacgaagtaattggggccagctggatgtcaggatgcgtgtggttaccattgtaatcttgctctgcttttgcaaagcggctgagctgcgcaaagcaagcccaggcagtgtgagaagccgagtgaatcatggccgggcgggtggaggccggagaggctccaacccggtcaaacgctacgcaccaggcctcccgtgtgacgtgtacacatatctccatgagaaatacttagattgtcaagaaagaaaattagtttatgtgctgcctggttggcctcaggatttgctgcacatgctgctagcaagaaacaagatccgcacattgaagaacaacatgttttccaagtttaaaaagctgaaaagcctggatctgcagcagaatgagatctctaaaattgagagtgaggcgttctttggtttaaacaaactcaccaccctcttactgcagcacaaccagatcaaagtcttgacggaggaagtgttcatttacacacctctcttgagctacctgcgtctttatgacaacccctggcactgtacttgtgagatagaaacgcttatttcaatgttgcagattcccaggaaccggaatttggggaactacgccaagtgtgaaagtccacaagaac

SEQ ID NO: 189687 - DNA, 859 bp, Homo Sapiens
actttgtacaaaaaagttggagcaatttttaatttttgttaatatcaacagcaaaagcctagtgcattgggagatgtgcaacctccctgaaaatcttttctgtttctggagtacttcaggggtggcctctggccccagagcctttgccacagtgctcccaccagcccccacctcatccgtctgtttgcagagcctcatctacaggtccccacgctgccttctttactcactctgcgcttggccgttttgttatttggcttagtctacattgggcggaagtctgtgtgcacagagtgggtgttccttcgagccccttccactcagagggccacacccagcgatgccagtgaaggtggcacagcctctcttcagtttctcctgactgtgatctcactggggtagaattcccctgagagaattccctcactcacggctccctttgccagagtcagttcaatcaggtctgatgtgagcaatttacacacttgtctcagaaagtccctcagggtttgtagaggactgcaggggggcatccgctgcagactcagcctttctctgcagccatcctgcagtgggggtgagcgggcacaggctgagaactgctcttgggtggtggaagcaggtgtcacggtgcaagtctccccctgcacccctcccccagcttgagccgtgtcacccccctctccctccagcatgggcctgtgtctcaggctctctggaaggtggccctgccccggaccctcttgcagtgtcctggtttgacttggaactagatggccatctttccaggctttggtggcccaagagcagtctgggtggatggaagtggctgtccctcctctccagcccctgcccaccc

SEQ ID NO: 189688 - DNA, 998 bp, Homo Sapiens
gccaactttgtacaaaaaagttggcgagctaacacctgacctttcgggaagcccacagacgctggaggaatcttgagtttctccaaactgccgctccaccagtgcctttggacagccgtgcctgttcgccgctctccctaagtctgattctcatcgaggcccctcgcttctatgactgtgcttgcagaagagtaaacactctcggatgccgctgtcctgggggagcccgcgggagcctgtgaatgttgatacgagctggccagtcctgggcccagctcacttgtccagctacctgccaggtggctttcactgtgttttaatacattgcattccaagctggtcccctctgtgtatcactctactgagaaatcctgcctagtgtgttttgggatgtgtcctagcatttacaagaaaatgaaaagcgtcctcttaattggcacccgaatgttgctgtggctcagtcacatatcccagggccctcgtcccgaggccgtgctgccccgagccccgagcccctctgcagctcacccttggcttgttttccgcaaacccggtaaacgcaagcccttggggcagatgcagaagcagaagagggaggggaaacctgcctctgggtcaccctgttagcacagcgttctcatcgggagacagcatggaactctctctcgcagtgctcgaggctgtgtgtcagtgtttgctgggcttgtggctccttttttggctggataaagaagtcgctgtttttgtactgcttctgtggctcttcacagacctcacggatgtgaccggagatgagtgccgatgaccacgttttaaaggagaaagagagctcctggtggggccctcggggtggtctcaatcccatttgcagtctgcaacagtgacgcgcagcccggtccggagcgtggtgagctttgtttgccttctgggtcggctttcgctgtgtctcctgtgtgtgttagaatccagagcccagaggaagtgcaagcgggtcctcc

SEQ ID NO: 189689 - DNA, 924 bp, Homo Sapiens
ttggctcctctccgtctccatccccagctccatggtgatccgggacctgaccctgcgcagcgccgccagcttcggttccttccacctcatccggctgctctacgacgagtacatgtactacctgatcgagcaccgcgtagcccaggccaagggcgagacccccatcgccgtcatgggcgagttcgccaatctggccacctccctgaaccccctggaccccgacaaagacgaggaggaagaagaggaggaggagagcgaggacgagctgccgcaggacatctcactggcggctggcggcgagtcacccgcgctgggcccggagaccctggagccgccggccaagctggcgcggactgacgcgcgcggcctcttcgtgcaggcgctgccctccagctaagcccttggcctccccgccccacccgcccccgccacccctccacgccagggtccctcaaagcttctgtggcttcgtggtcactgctccagcctcagccagggcagggagggggactccgagacagggaagaccggggccctcctcccttatggggccggcacaatcagtgggctgggcggagccgcagctgcaaactctgacacaaaagacgtgccttaaggaacccgccgcgtgcccaggtgccccgcggggcatccagctcggccccttggccgcccccctccttggtcccagcgtcttctccccagccccgtcctcccacaaccccagggggcaggcaggcaggccccctcccgtgcgaaactgttaacttattcagctcgctggctttgcacagcctgtcctgggcccagccctgatccccgggccggcgcaggtgggcgtcacctggggactccccactgtcagcagcagccccgggacaccctacccccaacaaccccactgcttccccttcttggtattaa

SEQ ID NO: 189690 - DNA, 897 bp, Homo Sapiens
ttgggtcactgtcacctgtcactgacatcacaagccaaaggatagcactttttcaatccatggactcaggagaaaatgccctcttactggcagtggctagagggatgagacgtttgtgtatgtcactgggcagtgaccccgattctcaagctggagccatttgatgtcatgaggacaggatgtttgtgtctcggccccacttccctcatttgctctgtggttgtggcgccctgctttgaccgaatgctctggcaactgcggcagcaggcttgtgtgtgtgagaagggcggcagaggcagtggggctggctcgctgagggctgagcaggtagagaatgtgaatgtccatctcaaggaatgcgaagttccaatctctcagaggagctctgcaagtctcagctaggaatggggctgatctggcccccaagcctcactggagagatcccaagggtattttacaaataggaagcgctctcatgcaggatctgagggctttgctagaccatggttcaaggagtcagaatcttggctaccctacatgctccctctggcaccatttcaggggattactccagagagctgcagccagaactgtttatctcctgagatatggactttctctaagtcaggaaaagcacaaacctcataacttaagtgttttctggttggttgctcccttttctgatcctactactggcctctccctttccagagccaggagacacatctgggaccagaggaaacaaaagcaccaagaggttgactagagctgaccagtgatttacaaatatttcatattccaatgcttcgtctgctcaattatttcaaaaggccatccctgtaaaggcagaaaagcttcctcttagatctggccactcagcaataaatggggtatttg

SEQ ID NO: 189691 - DNA, 992 bp, Homo Sapiens
ttggaagagatataccattggccggaccctgatcccacgctacttccgcagcatctttgaggggggtgctacggagctgtactatgttcttaagcaccccaaggaggcattccacagcaactttgtgtccctcgactgtgaccagggcagcatggtgacccagcatggcaagcccatgttcacccaggtgtgtgtggagggccggttgtacctggagttcatgtttgacgacatgatgcggataaagacgtggcacttcagcatccggcagcaccgagagctcatcccccgcagcatccttgccatgcatgcccaagacccccagatgttggatcagctctccaaaaacatcactcggtgtgggctgtccaattccactctcaactacctccgactctgtgtgatactcgagcccatgcaagagctcatgtcacgccacaagacctacagcctcagcccccgcgactgcctcaagacctgccttttccagaagtggcagcgcatggtagcaccccctgcggagcccacacgtcagcagcccagcaaacggcggaaacggaagatgtcagggggcagcaccatgagctctggtggtggcaacaccaacaacagcaacagcaagaagaagagcccagctagcaccttcgccctctccagccaggatgtgatggtggtgggggagcccaccctgatgggcggggagttcggggacgaggacgagaggctcatcacccggctggagaacacccagtttgacgcagccaacggcattgacgacgaggacagctttaacaactcccctgcactgagcgccaacagcccctggaacagcaagcctccgtccagccaagaaagcaaatcggagaaccccacgtcacaggcctcccagtaaaaggccctgctgtggccacccagtgctctgcctacctgccccacccctcacagccccagggagcagaagacagatggaagagactgagcatctaaaatgg

SEQ ID NO: 189692 - DNA, 911 bp, Homo Sapiens
ccgtggagtcccgggccgcccgggcagacacggtccgctggggatgctggtgaccggtgatgacatccaggatgctgagaaggctgttgacgctgtccccaggaaccacttccttcaccacacactccttcccgtcaggccctggcagacagagctccagcagcccgtcctgcaccacgtagatgctggcatctggctggcccggccggaagacgtagtcaccctggcccagccgctggaagaccatgtggcggcagagctccaggaagagtggcttctcgaagtggcccagcacccggacgttcttgagcatataaagcacttcagagggcagatgggagttagccaggtcgccctcggtcaggtcagcttctagcactgcgggcgggggctccttccgctgcagcgtgggcgtctctttctggatgcgcaggatcttcttggcaatgttgagcatcttcagtttcttcctcatgcgtggccgggaggtggcggagacagaggtatccacgagggaggaggtggattgtgacaccttccgcataatcttccggccatagaagagcactttgtccctcttccggaaccgataccgggggccatccggggctggggtttttggcactcgcagcctccgcaccaccaggaggatgagcacggccgtgaccaccaccgccactccggccccgatcatcacgccaagcaccattccagtttgcagcggagcctccatcggttgattccagctggacggccgatctggtagcccggagtcgtttcagaagagtcctgggatgcttggggtggcgtgggcttgcaaggcgctgcgggtttttgccggggatttactatcacgtagtagtgaagttatgggggctctatggcacagagcatcactgggactccgccaa

SEQ ID NO: 189693 - DNA, 1600 bp, Homo Sapiens
ttggcacatgagagtcattcaagcatctgaaaagctttttaaactgaagacaccagcatggtacctcaagtctattgtagagacaattttaatatataagcattttgtgaaactgaccacagaacagcctgtggccaagcaagaacttgtggacttttggatggatttcctggtcgaggccacaaagacagatgttactgtggttaggtttccagtattaatattagaaccaaccaaaatctatcaaccttcttatttgtctatcaacaatgaagttgaggaaaagacaatctctatttggcacgtgcttcctgatgacaagaaaggtatacatgagtggaattttagtgcctcttctgtcaggggagtgagtatttctaaatttgaagaaagatgctgctttctttatgtgcttcacaattctgatgatttccaaatctatttctgtacagaacttcattgtaaaaagttttttgagatggtgaacaccattaccgaagagaaggggagaagcacagaggaaggagactgtgaaagtgacttgctggagtatgactatgaatatgatgaaaatggtgacagagtcgttttaggaaaaggcacttatgggatagtctacgcaggtcgggacttgagcaaccaagtcagaattgctattaaggaaatctcagagagagacagcagatactctcagtctctgcatgaagaaatagcattgcataaacacctgaagcacaaaaatattgtccagtatctgggctctttcagtgagaatggtttcattaaaatcttcatggagcaggtccctggaggaagtctttctgctctccttcgttccaaatggggtccattaaaagacaatgagcaaacaattggcttttatacaaagcaaatactggaaaggattaaaatatctccatgacaatcagatagttcaccgggacataaagggtgacaatgtgttgattaatacctacagtggtgttctcaagatctctgacttcggaacatcaaagaggcttgctggcataaacccctgtactgaaacttttactggtaccctccagtatatggcaccaaaaataatagataaaggaccaagaggctacggaaaagcagcagacatctggtctctgggctgtacaatcattgaaatggccacaggaaaacccccattttatgaactgggagaaccacaagcagctatgttcaaggtgggaatgtttaaagtccaccctgagatcccagagtccatgtctgcagaggccaaggcattcatactgaaatgttttgaaccagatcctgacaagagagcctgtgctaacgacttgcttgttgatgagtttttaaaagtttcaagcaaaaagaaaaagacacaacctaagctttcagctctttcagctggatcaaatgaatatctcatgagtatatccttgccggtacctgtgctggtggaggacaccagcagcagcagtgagtacggctcagtttcacccgacacggagttgaaagtggaccccttctctttcaaaacaagagccaagtcctgcggagaaagagatgtcaagggaattcggacactctttttgggcattccaga

SEQ ID NO: 189694 - DNA, 1379 bp, Homo Sapiens
  misc_feature (779)..(792): n is a, c, g, or t
  misc_feature (932)..(963): n is a, c, g, or t
  misc_feature (1118)..(1130): n is a, c, g, or t
ttggaaaggtggcggtgctttcggaggtgtatcgcagaacgtccgctctttgttggacactaacaaggcatatccaacttctttcacaaagaggccaacttctggtttgaggaataaaatggaaggagaatcaagcagatttgaaatccacactccagtttctgacaagaaaaagaaaaagtgttctatacataaggaaagacctcagaaacattcccacgaaattttcagagactcctccctggtgaatgaacagtctcaaataactaggaggaaaaagaggaaaaaagatttccagcatctcatttcttctcctttgaaaaaatccagaatctgtgatgagactgcaaatgccacttccacactcaaaaagagaaaaaagagaagatatagtgctttggaggtggacgaggaagcaggtgttacagttgtccttgtcgataaagaaaatattaacaacacaccaaagcattttagaaaggatgttgatgttgtttgtgttgatatgagcatagaacagaagttaccaagaaagcctaaaacagacaaatttcaggtacttgctaagtcacatgcacataaatcagaagccctgcacagtaaagttagggagaaaaagaataaaaagcatcagaggaaagctgcatcctgggagagccagcgggcaagggacaccctgcctcagtcagaatcccaccaggaggagtcctggctttctgtgggtccagggggtgaaattacagaactaccagcatctgctcataaaaacaagtctaagnnnnnnnnnnnnnngtccagtaaccgggaatatgagacactggccatgcctgaaggatcgcaagcaggcagagaggccgggactgatatgcaggaatcccagcctactgtgggcttggatgatgaaactccacaactactaggacctactcacnnnnnnnnnnnnnnnnnnnnnnnnnnnnnnnngtccaatcaccaggaatttgagtcattggccatgcctgaaggatcacaagtgggcagtgaggttggggctgatatgcaggaatcccggcctgctgtgggcctgcatggtgaaactgcaggaataccagcacctgcttataaaaacaagtctaagnnnnnnnnnnnnngtccaatcaccaggaatttgaggcagtggccatgcctgagagcctcgagagtgcataccctgaaggatcacaggtgggcagtgaggttgggactgtggaaggcagtacagctcttaaagggttcaaggaatccaacagtacaaagaagaagtctaagaaaaggaagcttacgtctgtcaaatgggcacgagtgtctggtgatgatttttcagtgcccagtaagaactctgagagcacactctttgattc

SEQ ID NO: 189695 - DNA, 1274 bp, Homo Sapiens
  misc_feature (559)..(569): n is a, c, g, or t
  misc_feature (593)..(706): n is a, c, g, or t
ttggatgagataacccctcaggtgtcagaacttgcttgaagggaattaccagaagtaatttgtgtttgagatggggtggaaattggaattatattagtagccggtggagatacaagttctctgactgtgttgggaaaggataagtgctaccgttgagaagggaagaaaggctgagtctaggtggagaaaaatatcaacagaactctagccaaaggcaagccccagaactcagacaacagaaaggaaatcctaatccttctgttttgagaagagagaactgtagttgcttcacttcctatttcatgacagaataactgcaaacttttaagatcaggaaatgtagacatctagtgatttctttagtagacagtttaatttcccccaagattaggagacacttctgtgcaggttctaaaaggagcccaatggcctggggtgggagtggggagtagatagggaatatgtgggatttggtttaagttcatcattgggagagttcctggatccttgcaagcttagataaatgtgatctttattagatagcagtggcatgcttttnnnnnnnnnnnggcaatgaaaatttagcaagccannnnnnnnnnnnnnnnnnnnnnnnnnnnnnnnnnnnnnnnnnnnnnnnnnnnnnnnnnnnnnnnnnnnnnnnnnnnnnnnnnnnnnnnnnnnnnnnnnnnnnnnnnnnnnnnnnaaaaaattattgcacatattaaataacattcctctatgtatctcaatggcattagacattaggagaagcattttgtggaggatttgaagttgagatcttcatccaagaagtagcttttcaatttgctagaagcttaatgtaggcaagccacttcatttttcagaacttgtttactcatttataatatgggaataaaaatttgtgcaagtcagagaagggtgctttaaaaatgttgtggccagccacatgagatcaaagacacacttttcatgacctcaaatgtgggcccagcctaggtcagccaacccccatccaacccttagactcacgaacaaatccacctgagatcagcagagccaccctagatcagctgaaactctaagcacaaaaataaaaacttatcactgtataccactggagttttctggttatctctcgtatagcaaaatctaactgatgcaatctccatctggccttcatccttctccctttattgtcctttcgtgtattgttcatccagcaaccagggatgatcttgttaaaacattaaacagattctgtcactctt

SEQ ID NO: 189696 - DNA, 1189 bp, Homo Sapiens
ttggctcctggatgatgaatccatccactggatattcctgggacagtactctcagcaggttcaaaagtaagatggttttcaaatcatttttgagactggttgcataacagcagggtacctgaaagagccttctgggagttagtgaactaggtagattgttttgttcacataacgccaccatcaacttaaagtgaattgtctttgttataaatgaggtcactatggacttaccctaaagatcttctgtacttctgtcttccataggacaaatgataagtactacatacctcatctcttgggttattattgtagtcttgcattcatgattatgaatttaaaaataaataccaattatggaaatagtactaaaggcttgccgcgcatgaaacattaattggtttaaagtccctttataaagagtgctacatggtttagataaaggaaacatataactattgagttacaggggattttattaattttaaaatgcaatcaatttaaattatgtaggtttaagactagtcccttggataagccccaagcgaatttgtcttcagattattaaaattagtgctgtaaatcagggtgggcaattcacagcctttctgaactgactgaactagagcttgcagtgaagtgttctgctgagactgagcaccttacagatatttttctccagaagatggtgctgggtaataaaatcatcacaattagggaatggttagtggtctctactgtggcaaatgccaactgttggaattcactttattgtagaaaaacccaaactgagactcttaagttttgtttagcaatgtgtttctggtatgaaacaaactactgtgtcactgtccaggtaggaaacaattctttcaactgggttttcagcataaatgggaactgatgtagaaggcaggatttagcccttctaggcaaaagaaaagctcagttgggtttcacgagtgttcctgtgcttatattcagtctgtgcctacatgttctcatgcatgtctaacctgatttacctcttacctgtaacctaccttatcatgtggcttttaattggcagtcactcgccatttctaaacagatatagtactacctttcataactcacattggcaagtgtaaaaagatgacttcacgtgaagtgaggacaaaatcacaatctgcatactaacctatttttttct

SEQ ID NO: 189697 - DNA, 885 bp, Homo Sapiens
ttggcaaggaaataatctatctcccagaacagaacatgtgccaatgggcgatcttgcctggaataaaatgcctctactcagaaacaggcaggaaagaattgctccaaggaatactttttggggtcagataatgtgtcaggtggaatatccctgctaggagatataggatttctactctgctcaaagctgaccccatctggagtattaatgtttggttctatggaaccacattttaagagatctgctgatccacctaagcacattcagggaagagtaatgtaattgacaaaatatctgataatcatgttgtttaagggctaggtgaagaaagtttcagtattgatcctggaaaaaaagaagatctaagtaggatgggagaatgatttggcccacacaaggaagcaactttattctatatagctttaaaagtcagaactagaattgttcattctttcattcatcaataaatgtattttgagtgcctaagagtttactatgtgcctagcactgtttgaggtcctgatggaagttacaggatgggtactctggttttagtacaagaaagagcaatgactagattgctttgtgaagctcttggtagagacacgctccagaagggataacaaaatcaaatagtagatgggttcattgggcctcagaagttctgctcgtattttaggtgggtgtgaagtgaatttctatatgtccaggagtgaatacaacagaaagagttggatcttatttatttaattagggagttaaaacaagaccaaaaagactcaacagccgcttgaagccaagaactcttcaatgccagctactgccacctaaaaatcatctggctttatagtggatcagaataaaggttattctaactgtggggag

SEQ ID NO: 189698 - DNA, 2337 bp, Homo Sapiens
ttggccaccttgtaaattctgggcattttcagagttttctcttccatgtgaattgctccagctaacttaatattagtttctcaagggtttgtgtagacctggctttgtctctttccatctgtttctctctttccctttaacgtcacttgcctgaggtctataaggccctttaaggttgccagcccagagccagaagagattggtgtccctgaagttaagaaagccacctttgcctacagatggtgttcacagtgttggtgtggagtcacagcttgacttttgtgtttgagcaacactgcaccactgactgactactttctcaaagatgagtatgaagccgaaatcaacagagacaaccctctggggatgaaaggggaaattgcagaagcctatgctgaactcattaagcagatgtggtctggaagggacgcccatgtggcacctcgcatgttcaaaactcaagtaggacgttttgctcctcaattttctggctaccagcaacaagattctcaggagctgctggcctttcttctagatggattgcatgaagatctgaaccgggtaaagaaaaagccctacttggagctgaaggatgccaatgggcggccagatgcggtggtggcaaaggaagcctgggagaatcacaggttgaggaatgattctgtgattgtggatactttccatggcctcttcaaatctactttggtttgcccagaatgtgctaagggtttctgtgacctttgacccattttgctatctaacgctgccactgcccttgaagaaagatcgagttatggaggttttcctggttcctgctgaccctcactgcagacctactcagtaccgtgtgactgtgccgctgatgggggctgtgtccgacctgtgcgaggctctctccaggctgtctggcattgctgcagaaaatatggtggtcgcagatgtgtataatcaccgattccacaaaattttccaaatggatgaaggtttaaaccacatcatgcctcgggatgacattttcgtgtacgaggtctgcagcacttccgtggatggctcggaatgtgtcacgcttccagtctacttcagggagaggaagtccaggccatcaagcacttcctccgcatcagcgctatatgggcagccactattgctttctgtccccaagcacaagttaacccttgagtctttgtaccaggctgtttgtgatcgtatcagccgctatgtgaaacagcctttacctgatgagtttggcagctcacccttggagccaggggcctgcaatggctccaggaacagctgtgaaggagaagatgaggaagaaatggagcatcaggaagaaggcaaagagcagctttcagaaacagaaggcagtggggaagatgagccaggaaatgaccccagtgagaccacccaaaagaagatcaaaggccagccctgcccaaaaaggctttttaccttcagtcttgtgaactcctatggaacagctgacataaattcacttgcagctgatggaaaactacttaaactcaactctcgatctacactggccatggattgggacagtgaaactcggagactttactatgatgagcaagaatctgaggcctacgagaagcatgtgagcatgttgcagcctcagaagaagaagaagaccacagtggccctgagagactgcatcgagctcttcaccaccatggagacccttggggagcatgacccctggtactgtcccaactgtaagaagcatcaacaggccacaaaaaagtttgacctatggtccttgcccaagatcctggtggtccacctcaaacgtttctcctacaacagatactggagggataagctcgacacagtcgtagaattcccaatcagagggctgaacatgtccgagtttgtctgtaacctgtcagcaaggccttatgtgtacgacctcattgccgtgtccaatcattatggagccatgggggttggccactacactgcatatgcgaagaacaaactgaatggtaaatggtattactttgatgatagcaacgtgtccctggcctctgaggatcagatagtgactaaagcagcttatgtgctattttaccaacgtcgagatgatgaattttataagacaccttcacttagcagttctggttcctctgatggagggacacgaccaagcagctctcagcagggctttggggatgatgaggcttgcagcatggacaccaactaatgctgactccacgatcctgccaccctgtagcgccagtgtaatcccccaagagaacatctttgacactctgcagactgctagtgttctgtctaaaaccagacaaggaaatacccttc

SEQ ID NO: 189699 - DNA, 968 bp, Homo Sapiens
ttggaccagcagaggcttcgtgacggagttatcagagacattgagaggcaaattcggaaaaaagaaaacattcgtcttttgggagaacagattattttgactgagcaacttgaagcagaaagagagaagatgttattggcaaaaggatctcaaaaatcatgacttgaatgtgaaatatctgttggacagacaacacgagtttgtgtgtgtgtgttgatggagagtagcttagtagtatcttcatcttttttttggtcactgtccttttaaacttgatcaaataaaggacagtgggtcatataagttactgctttcagggtcccttatatctgaataaaggagtgtgggcagacactttttggaagagtctgtctgggtgatcctggtagaagccccattagggtcactgtccagtgcttagggttgttactgagaagcactgccgagcttgtgagaaggaagggatggatagtagcatccacctgagtagtctgatcagtcggcatgatgacgaagccacgagaacatcgacctcagaaggactggaggaaggtgaagtggagggagagacgctcctgatcgtcgaatccgaggatcaggcatcagtggacttatcgcacgaccagagtggggattccctcaacagtgatgaaggagacgtgtcttggatggaggagcagctgtcctacttctgtgacaagtgccaaaaatggataccagccagtaaggagcttctcaattcctttgatttgtcaattcctgtgtgaaggtttgtttttccacctgtgaaagaaacgtgaatgtaaaagagacctaaataaaaggataattatatttattctctagttgatcagctataaatttatataaaacataggcatgtttgtactaatgaaacgtactgtcaacctctatcacattgttaaattaacacttttggtggtaactcaataaaattgagaaaattg

SEQ ID NO: 189700 - DNA, 1422 bp, Homo Sapiens
ttgggcttggttgtcatgagagtggaggctgcggccggggctatgggcagaggcggccgggtctgcttcttccctgtcactgccgcagcagcttggggtgcaaggcggcctggggcggcggaaggggcgccccccgagttccgtctgaggaagcggcggctgccgaggaagtccacgagagccgggtcccgcacgcccctggggtccgggtgctgaggcgccgcctggccgcctccccgggccgcggcaccgctccgacctagccgccctctccaccggggccgcggcagcgccagtcggggcccttccctctaagcagcccaaacgtgcagaatgccccacaagattggatttgtagtcgtcagctcatctggacacgaagacggcttcagtgcccgggagctcatgatccacgcgccaactgtcagtgggtggcggtcacctagattttgccagtttccacaagaaattgtccttcaaatggtggagagatgtcgaataaggaaactgcagttacttgctcaccagtatatgatttcaagtaaaattgagttctacattagtgaaagcttgcctgaatattttgcaccctatcaagcagagcggtttcgaagacttggctacgtgtctctctgtgataatgaaaagacaggttgcaaagcccgggaactaaaatcagtttatgtggatgcagtaggacaatttcttaaactgatttttcaccaaaaccatgtcaacaaatacaacatatataatcaggttgctttggttgccataaatatcattggagaccctgcagatttcagtgatgaaagcaatactgcctctcgagagaagttgattgaccactaccttgggcacaacagcgaggaccctgctctagaaggaacgtacgccaggaaatctgactatatctctccgctagatgacttagcttttgatatgtaccaagatccagaagttgcacagatcatacgaaaattagatgaaagaaaacgggaagctgtccaaaaggaacgctatgattatgccaagaaactaaaacaagccattgctgatttgcaaaaggttggtgagcgccttgggaggtatgaggtagagaaacgctgtgccgtggagaaggaagactacgatctcgccaaggagaagaagcagcagatggagcagtatcgtgccgaggtgtacgagcagctggagctgcacagcctcctggatgccgagctgatgcgaagaccttttgatttgcccctccagcccctcgctcgttctggcagtccttgccaccaaaagccaatgccctcactaccacaactggaagaaagaggaacagaaaaccagtttgcagaacctttccttctgaaagccttcatcatattctctaactatttctcctcagcattctgcagtagacccgttactccc

SEQ ID NO: 189701 - DNA, 2018 bp, Homo Sapiens
ttggctttgtttggcatggtgatttgtgttttttctcttggtgcttatgtgtgtgggcttgggacgagtgctggtatgcacttaggaccttcttgatagctccctgcactttggaacacggagcagatgagagagggtcggggcttgccctccaccttggacttggaagaagcccacattggagaggtgaggaccccatggtggctctagtggaagatacgttagtctccagctaaggaggatgaggcgcagccccagagggagacctcagtgataggggatcaggctaagaaagtgggggaagggagatgctttgtacatattttggggttataatttctctaaattttaggagaacgggtattgattgataaaagggacaggcagtagtgttcaacagtgcatgtgaaggaaagttctgttttccatggttttgacattctttggactgtattgtgactgctgtctggtccacatggtacccctttggtaagtaggcttcagtgcataccagggtatcactggagatgggagttagtgaaggggtgactccctggcctagtatagtgtgaccctgggactaacttaatgtcctaaagcattttggtgacttctagggaatagcaaagacctatttcattgtccccaggtaagtatgtgatgagcaatgaggaggagtggaaaacaaaacccagaaagtgcggcaggaccagcctgacgcacacgctcctgttgtcatggcagacagccgccttgggtgggcaccaccctggcagttccagcctgtaggggagtgaagggacatggctgagctgggcatgtgctgaggttgacttagggaacaagccctgggattggacaaaagggcccatgctgcagccactgactgggggcagagctctgggtggaagagggaagagatcctaatggaggcgcctccatctgcaaccacagttgtaaggctcatggcacctctgcttggaaagcactggtttagggacttagagaggtaggcacaaggtgggtctcctgggtaagggaagcaagagcagactgttgggccaacaggagaagctccccagagtaggggagaaggttggggtgtagggccttccacgtggaacagacagcccctgtgtctctgtctcttggggacctgagtttgggtggggtggcagttggcacagcgcagatgcggtagagatgggaggaaacccagctcctcacttccgtgtgcctcatgcctttgcatacacaagcaccaaacctactaggtcttctcattacccatgtaaaccacatgttagataaatttttgcaagtagaggaaagaaggaaataaaacatcacattttggtgtctctcaggctttcccccccaactatggtttctttgctttttgttttaacatagttttgttgctgtcttctgtaatgatacagttttgtgcagctgttttcacttagcatatcgtgggcatctccccttatgattactaaatattttattttggagtggctgtgtactctcccattgactagatggaccattgtgccagttgccaatcactaatgctgttactaacttttcagttataaattgatgaatatctttgtgcacaggctgtttcccaatgtcaagttattagggtagactccaggaggtgggattcttcaactaaagaatatgaaaacctttgaggcttttactacatattgacaaaatggtttccggaaatatttgtatccccttacactgccaccagcaaggataaacatgtccatcttgcccgtattgggaattatcatctggctaaatatttgctaatttgataatgaaaaaatagcatcgtgtttcagttggcatttcactgacttctagcacggttgaacatctttcatgtggagcgattgtatttcctcctttgtggattgtcagtgtcctttgctctatcttctggggtcagataaatttgtatgagctcggtatatattaaagatattaacctggtgtgtgtc

SEQ ID NO: 189702 - DNA, 963 bp, Homo Sapiens
ttggctcctctaggtcccaggcgctctgcggagctttcgctgcccggtgagcggcgccgggcttgaggtcgcccagacgtcggaggagccgggtcacgaggctggagcttcctgcttgcagagtgcggcggggaggcgcggcccgggaacgcgggatcctggggagatctgccttctggagactgcgccgtcctcccgggagagccagaaagaggacatggctgctgggcagcgggaagcgaggccccaggtgtcactgacattcgaggacgtggctgtgctctttacctgggatgagtggagaaagctggctccttctcagagaaacttgtaccgggatgtgatgctggagaactataggaacctggtctcactgggactctcatttaccaaaccaaaagtcatctccctgttgcagcaaggagaagatccctgggaggtggagaaagacagttctggcgtctcctctctaggatgtaagagcacacctaaaatgacaaagtcaactcaaactcaggattcatttcaggagcagataaggaaaagattgaaaagggatgaaccctggaacttcatatcagaaagatcctgcatatatgaagagaaattaaagaaacagcaggacaaaaatgaaaatttacaaataatttcagttgcccatacaaaaatccttactgtagatagaagccataaaaatgttgaatttggccaaaacttctacctgaaatcagtcttcattaagcaacagagatttgctaaagaaaaaactccatcaaaatgtgaaatacaaagaaatagtttcaagcagaattcaaatttacttaaccaatcaaaaatcaaaacagcagagaaacgctataaatgcagtacatgtgaaaaagccttcattcacaattcatcccttcgtaaacatcagaaaaaccacactggagaaaaattatttaaatgtaaagaatgtttaaa

SEQ ID NO: 189703 - DNA, 890 bp, Homo Sapiens
ttggctcatttatggaaggctaaccctctgttgaccgtaagccttttggtttgggctgtattgaaatcctttctaaattgcatgaatagactctgctaacgtgatgagacaaactgaaaattattgcaagcattgactataattatgcagtacgttctcaggatgcatccaggggttcattttcatgagcctgtccaggttagtttactcctgaccactaatagcattgtcatttgggctttctgttgaatgaatcaacaaaccacaatacttcctgggaccttttgtactttatttgaactatgagtctttaatttttcctgatgatggtggctgtaatatgttgagttcagtttactaaaggttttactattatggtttgaagtggagtctcatgacctctcagaataaggtgtcacctccctgaaattgcatatatgtatatagacatgcacacgtgtgcatttgtttgtatacatatatttgtccttcgtatagcaagttttttgctcatcagcagagagcaacagatgttttattgagtgaagccttaaaaagcacacaccacacacagctaactgccaaaatacattgaccgtagtagctgttcaactcctagtacttagaaatacacgtatggttaatgttcagtccaacaaaccacacacagtaaatgtttattaatagtcatggttcgtattttaggtgactgaaattgcaacagtgatcataatgaggtttgttaaaacgatagctatattcaaaatgtctatatgtttatttggacttttgaggttaaagacagtcatataaacgtcctgtttctgttttaatgttatcatagaattttttaatgaaactaaattcaattgaaataaatgatagttttc

SEQ ID NO: 189704 - DNA, 1338 bp, Homo Sapiens
ttgggtgagctccggcatcattctttccaccctgactcccctggggtcggagtgagctcccgatcattctttccactctgaccgccctggggttgaggtgaaccagtctttgcattgaagctgcaagcctgaggcacggtggccctggcgtctcccgagccatgaggagggctccccgaggactttctgaactccctggagaagatggaggacggcaagttgaaggtcaccctcaagtacccccattacttccccctcctgaagaaatgccacgtgcctgagaccaggaggaaagtggaggaggccttcaactgccggtgcaaggaggagaactgcgctatcctcaaggagctggtgacgctgcgggcccagaagtcccgcctgctggggttccacacgcacgccgactatgtcctggagatgaacatggccaagaccagccagaccgtggccaccttcctagatgagctggcgcagaagctgaagcccctgggggagcaggagcgtgcggtgattctggagctgaagcgtgcggagtgcgagcgccggggcctgcccttcgacggccgcatccgtgcctgggacatgcgctactacatgaaccaggtggaggagacgcgctactgcgtggaccagaacctgctcaaggagtacttccccgtgcaggtggtcacgcacgggctgctgggcatctaccaggagctcctggggctggccttccaccacgaggagggcgccagtgcctggcatgaggacgtgcggctctacaccgcgagggacgcggcctcgggggaggtggtcgggaaggaaagtacgggcacgcggcctgctttggcctgcagcccggctgcctgcggcaggatgggagccgccagatcgccatcgcggccatggtggccaacttcaccaagcccacagccgacgcgccctcgctgctgcagcatgacgaggtggagacctacttccatgagtttggccacgtgatgcaccagctctgctcccaggcggagttcgccatgttcagcgggacccacgtggagcgggactttgtggaggcgccgtcgcagatgctggagaactgggtgtgggagcaggagccgctgctgcggatgtcgcggcactaccgcacaggcagcgccgtgccccgggagctcctgggagaagctcattgagtcccggcaaccaacacaggcctcttcaacctgcgccagatcgtcctcgccaaggtggaccaagcccctgcacacgcagacagacgcagaccccgccgaaggagtatgcgcgggctctgccaggagatactcggggttccccggccacgcccaggaaccaacatgc

SEQ ID NO: 189705 - DNA, 921 bp, Homo Sapiens
tacagtaataaatcttagttatgtgttctcctgcaggtcatcctcatctcatccactctgctcgccacgtttctcctcatcactctcgtattcggcgaggaccagctcctcctccccagactccagctgctccagccgctcagcctccgggcctgtctctagcatctccctgctgaggcggaggagattctctctttcttcttcttcctgcctcaggcgcttggctgcatacttgagctgcaccctgtgctgcagctgctgcaggcgttcttctcgctgcttcctcctggcctgctccgcctttagtcggtccaccaggtccctctcttctttcttctgcacaaactgagtaacccaggccggttctccagcaggcctcggggtgcctgcagccccttcgcaggaagaagacagacacagggattcatctttctcatcatgtaaggggccagttccagtttcaaggagtcgtgcctcttcttcacgcttcttctgttcaaagtcacggagccaagagagggccccacaaataagacttaaggacttcccagtgccagttggactctcaaatatcccaatcttgccagcctccaaaacccggtacagctctgccatgaagtcttcctggatggaatagggtgtgaagggaaaaggaaaatggatggcaccaaccttctgtgtttcattagccatggacctttgcaaataggggtccggcgccggaacagacgcccagtttgcgatttcaccagtctgcccttcctcgtcccgctgctcctcgtcctaaggagctctgctgccacacagcactgcgctcaccttcttcgccggcagaattgctacgctgaaagccaggccccgggaatcagggcaaacgccactgagttagaaactggcgggtcccctcagtgaaagccaact

SEQ ID NO: 189706 - DNA, 912 bp, Homo Sapiens
ttggataatggccgctttcaaggtgtggattttggctccttgagcctgtctgagcgaggggtggcagcgccggcgccccagaatccgggacagaagggtcccaagagtcgcgcttggtgagagaaatcccagatcctgtgatgggggacaccagtgaggatgcctcgatccatcgattggaaggcactgatctggactgtcaggttggtggtcttatttgcaagtccaaaagtgcggccagcgagcagcatgtcttcaaggctcctgctccccgcccttcattactgggactggacttgctggcttccctgaaacggagagagcgagaggagaaggacgatggggaggacaagaagaagtccaaagtctcctcctacaaggactgggaagagagcaaggatgaccagaaggatgctgaggaagagggcggtgaccaggctggccaaaatatccggaaagacagacattatcggtctgctcgggtagagactccatcccatccgggtggtgtgagcgaagagttttgggaacgcagtcggcagagagagcgggagcggagggaacatggtgtctatgcctcgtccaaagaagaaaaggattggaagaaggagaaatcgcgggatcgagactatgaccgcaagagggacagagatgagcgggatagaagtaggcacagcagcagatcagagcgagatggagggtcagagcgtagcagcagaagaaatgaacccgagagcccacgacatcgacctaaagatgcagccaccccttcaaggtctacctgggaggaagaggacagtggctatggctcctcaaggcgctcacagtgggaatcgccctccccgacgccttcctatcgggattctgagcggagccatcggctgtccactcgagatcgagacaggtctgtga

SEQ ID NO: 189707 - DNA, 1529 bp, Homo Sapiens
ttggctaaaggtgtgtggtggcaaagtacttgagctcttccagccttcagaactgagggctatgatggtggggaacagcaactacaactgggaagaactgcaagagactgccatctacaagggagattactcggccacacatcccactgtaaaactattttgggaaacatttcatgagtttccattggaaaagaagaagaagtttctcttgttcctgacaggcagcgatcggattcccatctacggcatggccagtctgcagattgtcatccagtccacagccagcggggaggagtacttgccggtggcccacacttgctacaaccttcttgacctccccaagtacagcagcaaagagattctgagtgcccggctgacccaggcccttgacaactatgaagggtttagtttggcctgaggcttctcagcttgtccagtatttcccttcgttcctcagtgtccacattgaggcctatacagaaaatcatggggagtgatttctatttttttattgtctaagtgggttgggacttttaaatactgagcctggttgatgtgtttctgggattgtatagcagtaaacaacctttttgaaaaattagaggttggggatggggtgaaaaattggcccttgtatgggaggtgtttttgtttttgttttaaaccaaactacccagtattccttgcacttgtgaatgtgttgcactctgctggatgaaatggcagtggatttttaaactttaatttcccaaatgtctctctcagccctgatgttttctcacagtgcttccttgtccttctcttaacttctcattcctctataagaatgatttagactgacctgtccttttttatctgcgcatgcgagaacatcaccttcctctgtacacttggaaatgcctctggcttgttgcagccctcctttaacccaaaggaggaaaggactgcttcagaaactcccaattccaaaaagctgagtctgggtccattattttggcagaactcctaagaatttatgggagcctatataaacatatctagcttttaaaaagttcttgagggaatagcaactttcccatggctgtgcctatttcctagaccttttaaaagatgtgcagagcagcttagcattcgttgcagctgagcctaattttttcttgctcatccttgtccctttgacaataaggttaattgatagacccaccacctcttgcactctcgcttttggagcaagttgcattaactattttgagtctctatattgtccaagaaaagtagaaataataaatttactttccctttttctatcacattatgtcctctaccattttctccttcctcccttcccttattttctccttttcgtaccctgcgtcctccctgattttcctttcgtttcttctttattttatcccattctctgttacttgactcagtgctcccttcctctcctctccttctagtgggatgcatgcagcctttttttcatttattaattaaattgcaaaattattactcagatttttttt

SEQ ID NO: 189708 - DNA, 1186 bp, Homo Sapiens
ttgggcccttagggcatcaggaagactagctcccctgccccggaggatctgctcagtgctgatggcagcccagctgtgtggactcagggggctctgagggctagggaaacaggaagggcctctttgacaaggtaggagctgtgcttggaggggcaggaaaagaactgagcatgtcgcaggcagcgggcccagcctgagcaatggcaggatgtgaacttccccatcgcaaatgcagttctcagcccactgcagtggatacaaggaagggcctttctcggggccggagaagagaccaagagaccaggcccgggcagcagcctaccggccacgtggaacactggctccggagttattctctgtcaaatctactccccggacctcaaccatggcaagaaccagaggtccaaagaggcccagacccaggtgcttgtgctcagtcctgcgcaaaccaggcccagaccctgcaagcatttgttgatgcccttgcaggcccactgggagaaagatgcctcaggcaggtctcagcctgggggtggcaggggtggggcagagagaatactgacagcagaggtcttggtgggctgcacgtgcctgcgaagatgtggtggacaaggaggctctcgggctgggccttggaggggtggcagcggaaggacagcccaggtggctgaggcctgatgggaagccggggaaggccagggtggaagggcggcttgagggacgccaggagaagactgaatgccaggctaggaaggaggcggctctcgatcacggggtgggtgcccccgacaccgggtctcctagcttgagttccctagaagcgaaatctgagagggggattctggggcaagtagtttcttgcgggtgagtgttctcagagaaacttaccagatcaagaaagggagctcaggctggatggaggaagccacgcaagtgtggcttcaagatccatcgccttggcctgatcgctgtgggggcaggggcctggagtacgaggggcaccctgggggctcccacccagaagcagaggggctgggctgttgcacctctactggcatcagtctttggttaccccccagccccagtaggaggagagcaggcagagcttgtcatccccagcctggtgtctcgcagtcccagggaagccgcttcttgccttcatggctgagtgcttgggaagggctga

SEQ ID NO: 189709 - DNA, 947 bp, Homo Sapiens
agagaagaaaagcctcagggtcttccttgaagagacgctgtgcagcactgctgggtcttgagtacaactgttcattgaggtagcgaaatcgggccccatcccagccgctgtgccatgcgggctcgcaaagcccctgccccgagcctcatggctgtctgtcctgggaacaggagacacctctgtcttctctgtgggggcctcagctggggcctggtctggcacctgaggtggctgaaacttgttcttacatcttctcttgttcttttgccggttccgccactgcttgcggcttaatgtatgagggggtttaggggaagtggacccagggctttgctttggtggatcatttgtagtactacccttccaggctttgggacctgtttggtcaacattgtccaggtgctgggctgaatttataggggcatgtttctggcatttcctctttcttttctcatcttcagcagagtcactgccaacaagagcctgtttgtggcatttcttcttcctttctacttcttcctcagagtcactgcaaggtgggccctgtttttgacatttcttcttccctttcttccctacttcagcagaggcactggcaaatgatgcctttttggggcatttcttcttcctttcctcctcctcctcctcagagtcacttatacataggctggggggatgctgggaaagagatgctgcctctagggcccgtaatgtggccaagagctggcggcgcttggagcccttgttttgcgaggaggccgcaggcggaggtcgtgagattacgggcccaaggcccgcggctactggggccgcctcggcccactcaggctcttcgaacatgagggtcgggagggcagggtcgccgagtccccgctcttctccacgtgcacagcgctcctctggaagtcggagcgctcagacctgccagaaccgacccggaaacccaa

SEQ ID NO: 189710 - DNA, 2214 bp, Homo Sapiens
caaattagaattttgccaataaaaaaatatatatttttcagatgttaataagacatatcagtagagacaaaattaggattttgaagtaatgcaataaaaagatgttggagggcagaagtctatttagtttttgtatacacttgcaagagtgcattactcagtataaagcaaaatggggaggaaaaagacatccatccattttattggaacacttttatgtgacttgaatctggtgttaggttgttgatttttctaaaaatctcctatatatacaaaatccatatgtacttggagatccagctgttgccccctgtttaaaacaaaagaccacctcggggggtcaattaaattaaaaaggccctccaaccaccctaaatgggataactaagagtatctactgcagtcatttcagaggacagagaaggaaaatattttaatttgctttaatataacctcttttcagtagatcacaaatgagtttacaaactacttttttttctctttaatttaggtgtttgcagataattttcattatacaactatatccgtagctgtatgtgtgtatagttacataatggtaactacacacgatacagaagaatcagtaaattcatggattattttgctgaggttttaaattttaaagcctctgtttcagaattttacacttgatcaaggagaaaaataaatgtgtagtctaacatttgctttctggagttaattaactgatctgtaagaaccactgcatatgtcttaaaatgtaaacatatttacatttgttgtatttgttattgagcctttaaggttaggcccagaatgaacagaccatagcaagtaaacaaataatttttagaatcaaagtattaatagaagaccagttcatggatttgcttattctatcctgctgagacaaaactcatgagtgtgcacacacatgtgaatatatccctacgaaacagtctatcttctcataggcttaaattatagtcatggctattaaagaaattaacagcatccagccacatgcaactttccaaccttcagtactattaggtgattaaaatcaacaaatatgaagtttagttcatttttcccttaaaattccaacaaagatcaaaaggttgtatctagaactaattgccatcaagttccaattcaatgtcatttaaagtaatgtaaccacacatttggtattttcaataggaaggttaattaggtattgtgcaaactgcctgcaacggaagcactcagtccttatctaacttgtcccttcctggccccaacatgctaactgccccatccccaattctgggcaaactgatcacaatgtgcaaaaaataatatattatctatttataattttaaaatatatacagccagctcaaaaacaacaacaaaccccatcaacatagtccagctgaaatctccactggtagtcaaagaagtagattaaaggagtaaaggaaggagaaggctgatagggccacaagaacggacagacatcaagtaaaatttgagtcccaaccatgcaagtacatgagcagtgagataacttatatattccaataacctattttcaacaactcctgcccaagacatgaagatcaaatcaggtttctgaggtaagtgtacttctaaaccatacacacatgaaagctatgaaagcaattcaaatgaggctgcttcatgaggcaatctagacttatggcattatttctacttttctccatgttttaattgcagcctgcactttaaatctttcccaataatttttaacagtgcctctcaaatgcaaagacacgtaaaagaattaataactagccaaagaattttatcaccgcttcactcatttataagaaaaccaattatttccaagcaaaatcaaaccaaaccaaagaggctcctggtagaaatgaaacaaaactttaaagctagttttaaaacaaatattttcctctgctctaaactactctggcgttttctaccactctaccattttggaacattcattacaataaggtatataggtagatggtaggaggcaaagcatttatcagtagttgagcaaaactgctgaggccatttataattcaaagaatgaaaacttagaatagtttactacattagaatacatccaagttccaagagtaggactggagctctcttaaggcaatctttcagaaaagatgttgcatcttctgtgatgatggccaa

SEQ ID NO: 189711 - DNA, 995 bp, Homo Sapiens
ttggcaagctcagcgatggcggctccagaaggcagcggtctaggcgaggacgcccggctggaccaggagaccgcccagtggctgcgctgggacaagaattccttaactttggaggcagtgaaacgactaatagcagaaggtaataaagaagaactacgaaaatgttttggggcccgaatggagtttgggacagctggcctccgagctgctatgggacctggaatttctcgtatgaatgacttgaccatcatccagactacacagggattttgcagatacctggaaaaacaattcagtgacttaaagcagaaaggcatcgtgatcagttttgacgcccgagctcatccatccagtgggggtagcagcagaaggtttgcccgacttgctgcaaccacatttatcagtcaggggattcctgtgtacctcttttctgatataacgccaaccccctttgtgcccttcacagtatcacatttgaaactttgtgctggaatcatgataactgcatctcacaatccaaagcaggataatggttataaggtctattgggataatggagctcagatcatttctcctcacgataaagggatttctcaagctattgaagaaaatctagaaccgtggcctcaagcttgggacgattctttaattgatagcagtccacttctccacaatccgagtgcttccatcaataatgactactttgaagaccttaaaaagtactgtttccacaggagcgtgaacagggagacaaaggtgaagtttgtgcacacctctgtccatggggtgggtcatagctttgtgcagtcagctttcaagggcttttgaccttgttcctcctgagctgttcctgaacaaaagatccggatcctgagtttccaacagtgaaatacccgaatccccgaagagggaaaggtgtcttgaactttgtcttttgctttgggctgacaaaaccaaagccagaattgttttagctaacgacccggatgctgata

SEQ ID NO: 189712 - DNA, 1302 bp, Homo Sapiens
  misc_feature (1244)..(1252): n is a, c, g, or t
ttggcccaccgcgtgggacggcgtgaacgtggtgtcggagggatgtcagccttctctgaggcggcgctggagaagaagctgtcggagttgagcaactcgcagcagagcgtgcagaccttgtccctgtggctcattcaccaccgtaaacactcgcggcccatcgtcaccgtgtgggagcgggagctgcggaaagccaaaccaaacaggaagcttacttttctctacctagccaatgatgtcatacagaacagcaagaggaaggggccagagtttacaaaagattttgcaccagttatagtggaggcttttaagcatgtttcaagtgaaactgatgaaagttgtaagaagcaccttggaagagtgttatctatttgggaagaaaggtctgtttatgaaaatgatgtattagaacaacttaaacaagctctgtatggtgataagaagcctaggaagcgaacttatgaacagataaaggtggatgaaaatgaaaactgttcctctctgggatctccaagtgaaccaccacagactctagatctcgttagagcattacaagatctggaaaatgcagcctcaggtgatgcagcagttcatcagaggatagcttctttacctgttgaagtccaagaagtatctctattagataaaataacagataaagaatctggagaaaggctttccaaaatggtagaggatgcgtgtatgttgctggcagattacaatggcagattggcggcagaaatagatgatagaaagcaactcactcgaatgttagcagattttcttcgttgtcaaaaggaagcccttgcagagaaagagcataaattggaagagtacaagcgcaagctagccagagtttccctggtgcgcaaagaactcaggtcccggatccagagcctgccagacttatctcgattgcccaatgtcactggcagccacatgcacctgccctttgcgggagacatctacagtgaagattgatggaccagcctctttccaggtcccaggactttgcaagagatggagacaggttaggtggatagtcctgtagtgttatttttgtatattgttgagaaagaaacactaacaaaaggaacaacgagtaatttataaaattgtttaaaatgttggtttgtttactattttattggtaaattaacatgacttaatttgaacaaagtgatgatttgtgtgtattaataagctcacaaatagtgattattttcaaagatctttttgtaaannnnnnnnnggatccaaggccttgtgagaaatctcttgtttgtatttcttcaggtattt

SEQ ID NO: 189713 - DNA, 1429 bp, Homo Sapiens
cattaaagataagatcacaaagcccacagaagtatttaatctttatctcattgtcatgctcatcttgggcaatgtcggtacaatgtttctatcttatgaaaaggctttctgcagtgagcacagctgtatctatgaaacttgtggcttgccaaagacatgcagtgctgttttacatattcctgggaatcaaacatatcttcacaaatccggcattgccatttacctctcggagaactatttgccggggaatgatcaataacagtaatagctgatgaaggcttgttagcagtcaaattatccaatgttgtagaggatgatggcaaagtttcaccttctacctcatccatctcataaaaatatctgtgtccattatgaaattcagtcacatgtgccatgatagtatctttccttgttaactcctttttgcatgtccgacaccagaaaagaaagttatttaaatgtgccctccgtgaatccggctcatgtgtaaacgaatgacccctgaatcatcacatacctttccacagaccacacattataacccattgtgtttgctgagaaaacatgcttttctactgcatcttcacttgggaatcgctgattgcattcacagaaccaggttttaactactgatttttctttctggacacaagcaacaccttcatggcttttatcttttaaattcatcttcttttttggaatggcaatgcactccagtgagctagattctttaatagacatggttcttttaagtgatgaaaattttgattgatccaacaataaatgcaagtcagaagaaggatccttgttcccttcgctgctgtggcaatagagtaagactgattcttccactgagttaatgactcggactttgtgtcctgaattctgcttatgattttgggtgctggtttcatccacaaagacttgattgcaatctggacaataacctcttaatatgaatttctctgcaacctgggtaatgctcttctcagctacagctacaggtccagcatttcgacaatgaactctgaaatgggcagtgagctccatgtgggaacgcagtgtcttgtggcaggccacacacttaacttgaaagggaacatctttgcacagagagatcaaaagtttctttgcaaaagatgggaaagatattggatgtgcaattcctttgttatcacccagtttgaaactctgatggaaatgattctttccagacatatgctttgaacactcctcctttctgctaaaaagaaggaagcaatttggacatgcaaaacactgaataatctgaggaagaaggttgttgttatgtccatcatctgtggcttcctaaaatataagacaaagctgtattatggaaaactaaaataaacactcaagttcttgaaaaaaactttcaaaatttcctatttgttgtttattcgcccaa

SEQ ID NO: 189714 - DNA, 1135 bp, Homo Sapiens
accatcaatctggggagtgaggtttcgaagaacgagccagctgctggttcttcgtgaggtgtcggtgctccaggcagaacccgaggagtaggagctggtccagccgagggggctggcaccccaggtggaggagggcttgggattggttaaccctggaggtggcctcgtgggtgcagtactgtttctgggcaccttccatagttcatgagacagagaggcttgcgtgtgggaggtagggccagaggaccacgtcgatttgatgtctgacagtttacctgcaacactaggtgcggatgcaatgctgctgaaagagctactgtagccggaggcactgagtggccaggcactcgaagaaggcagcgtggcattctgagatgatggcggggaggaccctccactcttgaggaggtagcggttgacatcctggatggtggtgttgatggtaggcccagtggggacactgccaggagtgacgtcagggtcattctcagggtcaatattctgcagtcctttccatggaactcccggatggaattctgggggccagttgatgctagagccatttgagattttatcactgtcagatttggcacgtgaccagctatggggaacagctacgggaggactggctggtgactcactgttctggattaaatcgtaccggccataggagtcatcaatggaggacttacctggaggcccaatgcttagacctccagggatagcaccatgcttgctagggttctgctccaggggggaagcggcactgggcaagttatccatggagttggggtgcgtccactgggggaggcgtgactgggactgggatgggtccttcaccgacaagccaccggtcatgtccatgctgttgacattcatgtttgggttcagtccagcgagagggtaaggagcaaaggtgttgggtgaagactgctgctctttggtctgcaggtcaggtaggccgggagtctgtgggtgcgaggggaagctgtccatggccgatttgcctgcagaggggtgcagagacaggtgcggcgggggcggtggcggtggtggctgcttcacgagcagggcctgggccagctggcgctggtgctgctggatctgctgctgcagattagtgattgtgcgccaa

SEQ ID NO: 189715 - DNA, 1535 bp, Homo Sapiens
ctcccacatttcagaattggtgggagtgtgcatttgattgttaataaccagctgggttacaccactccagctgaaagaggaaggtcttctttatactgcagtgatattgggaagcttgtgggctgtgccatcatccatgtcaatggagacagcccagaggaagtggtccgtgccacacgactggcttttgaataccaacgccagttccgcaaggatgtgattattgatctgttgtgctacaggcagtggggccacaatgagctggatgagccattctacaccaaccccatcatgtacaaaatcatcagagctcgaaagagcattccagacacatatgcagagcacctcattgctggcggactcatgacgcaggaggaggtgtctgaaataaaatcctcctactatgccaagttgaatgatcacttaaataacatggcccactacaggccccctgccctgaacctgcaggcccactggcagggcctggctcagccagaagcgcaaatcaccacctggagtacaggtgtgcccctcgacctcctgcggtttgttggcatgaagtctgtagaggtgccaagagagctgcagatgcacagtcacctgctgaagacacatgttcagtccagaatggagaagatgatggacggaatcaagctagactgggccaccgcggaagctcttgccttgggttctttacttgctcaaggttttaatgttcgtctaagtggccaagatgttggtcgtggaactttcagtcagaggcatgcaatcgtggtttgccaggagacggatgacacctacatccccctgaaccatatggacccaaatcagaaggggtttctagaggtcagcaacagccccctgtcagaagaggccgtcctgggattcgaatatgggatgagcattgagagcccaaagttactgcccctgtgggaggcacagtttggcgatttcttcaatggtgcccagatcatctttgacacattcatctctggaggagaggccaagtggctcctacaaagcggcattgtcatcctccttccacatggctacgatggggctgggccagaccactcatcctgtcgaatagagcgtttcctgcagatgtgtgacagtgcggaagagggggtggacggagacactgtgaacatgtttgtggttcacccaacaactcctgcacagtatttccacttgcttaggagacagatggtccggaacttcagaaaaccactcattgttgcttcccctaagatgttactcaggctcccggcagccgtgtcaactcttcaagaaatggcaccaggaacaacatttaacccggtcattggtgattcatctgtggatccaaaaaaggttaagaccctcgtgttctgctccggcaaacatttctactccctggtgaaacaaagagaatctctgggggccaagaagcatgactttgccatcatccgagtagaggaactctgccccttcccgttgggattctttacagcaagagatgagcaaatacaaacatgttaaagatcatatttgga

SEQ ID NO: 189716 - DNA, 1562 bp, Homo Sapiens
acaaaaaagttggcaccttctgtcatcagcagtcacctctcacccctgggacccaggctccccagggcaagcaccccctgggggtgaaggggacaacacccagcttgcagggctggagggggaacggccagagcaggaagacatgggtctctgttctctggaacacctacccccaaggaccagaaattctgggatatgggagtctccagaactggacaggaatctggctgaagatgcttcaagcacagaggcagcaggaggttacaaagttgtgagaaaagctgaggtggcaggcagcaaggttgtccctgcactaccagagagtggccagtcagagcctgggccacctgaagtggaaggcggaacaaaggctacggggaactgcttttatgtcagcatgccatcaggacccccggactcaagcaccgaccactcagaggcacccatgagcccccctcagcctgacagcctccctgcagggcagacagagcctcagcctcagctgcagggaggcaacgatgatccaagacgccccagccgctctcctccaggcctggccctcagggacgtgggcatgatcttccgtaccattgagcagctcactctcaagctcaacaggctcaaggatatggagctggcccacagagagctgctcaagtcccttgggggagagtcatctggtggcaccacgcctgtgggcagtttccacacagaagcagctagatggacagatggctccctctcacctcccgctaaggagcccctagcttctgactccaggaacagccatgaactggggccctgccctgaggatggctctgacgcccccctggaagacagcacagcagacgcagccgcgtcaccaggaccataaccgtacaaaccaccaaatcctctgcgtccccactcctccttcagggactggcctgagaccggggcacagggtaggggggatcccaacactcctccctgtggaggaggcagttagggaaactaggatccagccaaggcccggggggagacccgcatgttgcttggtctgctcaagtcggagtcaggtttcagtgtcttttccctcccttagcccaaccctccaaggcctcatgtctcctaagcatgctgactgcatccgaaaggcccccactcaccatggtctgccctcaccccacatatgtgtgtacacgcgcacgcctgtatgtgcgctgccctcagacatgcaagtgaaaggaggaggcttctgtgtaaatgcactttcttcctcccctctttctccataagaccccaggcagaggtgggtgcctcccctcccctctttgtcactttggtttcctataaatatgtatgtatcgtatgtgcatctttgctattgtaaataactttgaccttttttgttcctgttcctgaagtgctggaggcagttatggaaggagctgcttagggaagaggggtttcacttgtatctccttagttaacaacccagttccaggatcgagcctaaagcgggagccaggcctgagtgttcctgtccctgtgagtgggaaggtcttctggctccccatccc

SEQ ID NO: 189717 - DNA, 863 bp, Homo Sapiens
tcctcagctccgtacctgcttcagtggttttctacagggacagggtggggaagagggggacataggtggggtaagaaacccccatgatccccatcttgtgaagatgagaagtccagggagggagggagtagcttggcagcaagctgtggagggcaggctctggagccaggtgggatggggagccagaagaccttcccactcacagggacaggaacactcaggcctggctcccgctttaggctcgatcctggaactgggttgttaactaaggagatacaagtgaaacccctcttccctaagcagctccttccataactgcctccagcacttcaggaacaggaacaaaaaaggtcaaagttatttacaatagcaaagatgcacatacgatacatacatatttataggaaaccaaagtgacaaagaggggaggggaggcacccacctctgcctggggtcttatggagaaagaggggaggaagaaagtgcatttacacagaagcctcctcctttcacttgcatgtctgagggcagcgcacatacaggcgtgcgcgtgtacacacatatgtggggtgagggcagaccatggtgagtgggggcctttcggatgcagtcagcatgcttaggagacatgaggccttggagggttgggctaagggagggaaaagacactgaaacctgactccgacttgagcagaccaagcaacatgcgggtctccccccgggccttggctggatcctagtttccctaactgcctcctccacagggaggagtgttgggatcccccctaccctgtgccccggtctcaggccagtccctgaaggaggagtggggacgcagaggatccaacttttttgtacaaagt

SEQ ID NO: 189718 - DNA, 2090 bp, Homo Sapiens
ttggcgcacggcggcctctacaagccagtgcagtgccacccctccacggggtactgctggtgcgtcctgttggacacggggcgccccattcccggcacatccacaaggtacgagcagccgaaatgtgacaacacggccagggcccacccagccaaagcccgggacctgtacaagggccgccagctacaaggttgtccgggtgccaaaaagcatgagtttctgaccagcgttctggacgcgctgtccacggacatggtccacgccgcctccgacccctcctcctcgtcaggcaggctctcagaacccgaccccagccataccctagaggagcgggtggtgcactggtacttcaaactactggataaaaactccagtggagacatcggcaaaaaggaaatcaaacccttcaagaggttccttcgcaaaaaatcaaagcccaaaaaatgtgtgaagaagtttgttgaatactgtgacgtgaataatgacaaatccatctccgtacaagaactgatgggctgcctgggcgtggcgaaagaggacggcaaagcggacaccaagaaacgccacacccccagaggtcatgctgaaagtacgtctaatagacagccaaggaaacaaggataaatggctcataccccgaaggcagttcctagacacatgggaaatttccctcaccaaagagcaattaagaaaacaaaaacagaaacacatagtatttgcactttgtactttaaatgtaaattcactttgtagaaatgagctatttaaacagactgttttaatctgtgaaaatggagagctggcttcagaaaattaatcacatacaatgtatgtgtcctcttttgaccttggaaatctgtatgtggtggagaagtatttgaatgcatttaggcttaatttcttcgccttccacatgttaacagtagagctctatgcactccggctgcaatcgtatggctttctctaacccctgcagtcacttccagatgcctgtgcttacagcattgtggaatcatgttggaagctccacatgtccatggaagtttgtgatgtacggccgaccctacaggcagttaacatgcatgggctggtttgtttcttgggattttctgttagtttgtcttgttttgctttccagagatcttgctcatacaatgaatcacgcaaccactaaagctatccagttaagtgcaggtagttcccctggaggaaataatattttcaaactgtcgttggtgtgatactttggctcaaaggatctttgcttttccattttaagcttctgttttgagttttgccctggggcttgaatgagtcccagagagtcgttcggatggtgggaggctgcctaggaggcagtaaatccagtcacagtgcctgggaggggcccatccttccaaaatgtaaatccagtcgcggtgtgaccgagctggctaacaggcttgtctgcctggttttcctcctacacgtggacattattctcctgatcctcctacctggtcccccagggctaccggaaggtaaaatcttcacctgaaccaattatgagcagtctccttactgaaggtacagccggatacgtggtgcccccggggctggtgttggcagccggggggaggtgcctgagggtccccacggttcctttctgcttttctgaatgcatcaagggtacgagaacttgccaatgggaaattcatccgagtggcactggcagagaaggataggagtggaatgcccacacagtgaccaacagaactggtctgcgtgcataaccagctgccaccctcaggcctgggccccagagctcagggcaccaagtgtcttaaggaaccatttggaggacagtctgagagcaggaacttcaagctgtgattctatctcggctcagacttttgggttgggaaaagatcttcatggccccaatccccctgagacttgcccttgtaaaatgatttttgtgatgttgtgatgcttgtggagcatcgcgtaaaggcttcttgcttatttaacttgtgcaaggtaaaaatcaagcctttggaaccacaaaacaacttcaagtacatgcccattgtttgtttaaaaacagttat

SEQ ID NO: 189719 - DNA, 1199 bp, Homo Sapiens
ttggccacgctcatctgcatggccatgcaggccagcaaggccaccaagatcaccctgtcggccatctacaagtggatcacggacaacttctgctacttccgccacgcagatcccacctggcagaattcaatccgccacaacctgtctctgaacaagtgcttcatcaaagtgcctcgggagaaggacgaaccaggcaaggggggcttctggcgcattgacccccagtacgcggagcggctactgagcggcgctttcaagaagcggcgactgccccctgtccacatccacccagcctttgcccgccaggccgcgcaggagcccagcgctgtcccccgggccgggccgctgacggtgaataccgaggcccagcagctgctgcgggagttcgaggaggccaccggggaggcgggctggggtgcaggcgagggcaggctggggcataagcgcaaacagccgctgcccaagcgggtggccaaggtcccgcggccccccagcaccctgctgcccaccccggaggagcagggtgagctggaacccctcaaaggcaactttgactgggaggccatcttcgacgccggcactctgggcggggagctgggtgcactggaggccctggagctgagcccgcctctgagccccgcctcacacgtggacgtggacctcaccatccacggccgccacatcgactgccctgccacctgggggccttcggtggagcaggctgccgacagcctggacttcgatgagaccttcctggccacatccttcctgcagcacccctgggacgagagcggcagtggctgcctgcccccggagcccctctttgaggctggggatgccaccctggcctccgacctgcaggactgggccagcgtgggggccttcttgtaagaggccaggccctgccccacctctggacagtgcccaagtcagggtccagaactgccctccaacacaggtccacagacaccccaccacctaggcaggggctgggccagggctccaaggcttgccccagaggccacatggccaccagccccagctgccatcagattcaagcccaggaggctgaaaacgagggcccaggaccagaatcgctgcctcctctcccagccccacccttgtacacacagtgttttcattgctccgcgtcttcccagccccagaaaccggctaaaggaccctgcaccatgaaagcc

SEQ ID NO: 189720 - DNA, 1382 bp, Homo Sapiens
ttggcggagacacagggccgctcagaggccgccgcaatgctcccctctttgcaggagtcgatggatggagatgaaaaggaactagagagcagcgaagagggaggctcagccgaggagcggagactcgagccgccgtccagcagccactactgtctttacagctatcgcggaagcagattggcacagcaacgaggggacagtgaggacggaagcccaagtggcacaaatgcagaaactccctctggtgatgatttcagcctctccttggcagatactaatctaccatccgaagtggagccagagctgcgcagtttcattgctaagcgtctttcaagaggtgcagtctttgaagggctgggtaatgttgcatctgtggagctaaaaattccaggttaccgagttggttgttattactgccttttccaaaatgaaaaactgcttcctgaaacagtaacgatagactctgaacgtaacccttcagaatatgtggtctgttttttaggagggtctgaaaaaggacttgagcttttcaggcttgaattggacaagtacattcaagggctgaaaaataacatgaattgtgaggcaaggggcctggagagtcacataaaatcctatctgagcagctggtttgaggatgttgtatgcccaatccaaagggttgttcttctctttcaggaaaagcttacctttctgctacatgctgctttgagttacactcctgttgaagttaaagaatcagatgaaaaaacaaagagagacattaacaggtttctgagtgtggccagtcttcaaggacttattcatgaaggcaccatgacttctttgtgcatggccatgacagaggagcagcataagtctgtggtcatcgattgcagcagctcccagcctcagttctgcaatgcaggaagtaaccggttttgtgaggattggatgcaagcttttttaaatggtgccaaaggaggtaacccttttcttttccgacaagtactggagaactttaaactaaaggccatacaagacacaaacaatttgaagagatttatccgacaggcagaaatgaatcattatgctttgtttaaatgttacatgttcctaaagaactgtggtagtggagatatacttttgaagattgttaaagtggaacatgaagaaatgcctgaagccaaaaatgtgatagctgtccttgaagaattcatgaaagaagctcttgaccaaagtttttgatcatatgttttgagataattgtatgatcaagttgtatatttaagtcttagtgtttgaaattgcagttataattgttcataggattgctatttaagatgatttgaaactcaatccagattttctttttgtattttaccaatttaacttaaataaaa

SEQ ID NO: 189721 - DNA, 949 bp, Homo Sapiens
ggggggctgcgggcccactgggttgatccagcaagcgcacgatgtcctggtgcagtctctcctgggctacgtcccgcggcagcctgtccaggtggtcggtgatctcacggttggcaaagtggtccaacagcagcttggcagctcatagctgccctcgcgggcggccaggaataggggggtctcctccttgctatcctgcatgtcttattggctccatttttgagcagggccaaagtggcttccacgttgttcacagccgcagcccagtgtaaggctgatttcccaagctcatccacagcattgacatcagcatggctggcgatgagctcttccaccatgccctctactgccaggcgggccgccaggatcagtgccgttgagccatctgccatgcgggcatccaagtctgtagagcggtttcggatgagaatctggaagacaccctgggcatcggctgtgacagctgtgtgcaggggagtgcggcctgagtggtcctgggcattggtgtctgccccagcatccagcagccgcttggctgcatcagcacgggcataacgggcagccaggtgcaaagcagtctcgccagtacggtcagtccgtgccccaagctgagccccctggcagatcaggtcggagatgatgctagctgatgtgtcatctgcctcatcctcttcagttggcattggctccagagcccccccacagaaggaagccagcattagcggggtgaagccatctgggccacgcacattgacatccatgccatcagcatctgcgtcgccctgtggtggtgtcagtgccatggctggtgccacgcggatgtcagcagcaaccagatggtgttgagtccactgacggcaatccacagcctcctcagcccccatgcctggctcctctacctttagccgcttggcctctgggcactctgtgtccatccagtctgtgccaa

SEQ ID NO: 189722 - DNA, 3034 bp, Homo Sapiens
ttggtgaagaaccgaattgtccagaaaaccccagtgctacaagatgtccagtgccaaaaccaagatcaaaaagcaacctcagaccaatacccagagattctcacattaaagagcaaagtcaacagaaaatcagcccagcagccgtaggagaggagtcatccccaggccggccccagtctctgctggacaacgctagcacctcagacagtcaggcagtgatgaacattatgaacacagaacaaagccaaaatagtattgtttccagaattaaagtgtttgagggtcagacaaacatagaaacctcaggactgcccaagaaaccagaaattactccacgttcacttcctccaaagcctactgtttcctcagggaaaccttctgtagctcccaaaccagctgctaacagagcttctggagagtgggactctgggactgagaacagactcaaggtgacctccaaggaaggactcaccccataccctcccctgcaagaagcgggaagcatcccagtaaccaaacctgaattgccaaagaaaccaaaccctggccttatacgaagtgttaatcctgagattccgggaagaggggccctggctgagagctctgatagtgggaagaaagtgccaactcctgccccgcggcctttgctgctgaagaaatctgtttcctcagaaaaccccacctacccttcagctccactgaaacctgtcactgttcctccccgactcgcaggggcatcacaagccaaagcatacaagtcactgggagaagggcccccagccaaccccccagttccagttctgcagagcaagcccttggtggacatcgatctcatcagctttgatgatgatgttttgcccaccccatcggggaacctggctgaagaatctgttggttcagagatggttctagatccctttcagctccctgcaaaaacagaaccaataaaagaacgagcagttcaaccagcacccaccaggaagcccactgtaattcgaattccagccaaaccaggaaaatgtttacatgaggatccacaaagtccacctcctctccctgctgaaaaacctattggaaacactttcagtacagtatctggaaagctcagtaatgttgagagaactagaaacttggaatccaaccacccaggtcaaacaggaggttttgtgcgagtacccccaaggttgccaccgagacctgtgaatggaaaaaccattccaactcaacagcctccaaccaaggtgccccctgagagaccacctcccccaaagctttctgcaaccagaagatctaataagaaactgccttttaatcgatcctcttctgacatggatcttcagaaaaaacaaagtaacttggcaactggactctcaaaagccaagagtcaagtttttaaaaatcaagatccggtgctaccccctcgtcccaaaccaggacaccctctctacagtaaatacatgctgtctgtgcctcatggaattgccaatgaagatattgtctctcaaaaccccggagaactctcttgtaagcgtggggatgtacttgtgatgctgaagcagacggaaaataattacttggagtgccaaaagggagaagacactggcagagttcacctgtctcaaatgaagattatcactccacttgatgaacatcttagaagcagaccaaacgatccaagccacgctcagaagcctgttgacagtggtgctcctcatgctgtcgttcttcatgatttcccagcagagcaagttgatgatttgaacctcacttctggagaaattgtttatcttctggagaagatagatacagattggtacagagggaactgtagaaaccagattggcatatttcctgccaactatgtcaaagtgattattgatatcccagaaggaggaaatgggaaaagagaatgtgtttcatctcattgtgttaaaggctcaagatgtgttgctcggtttgaatatattggagagcagaaggatgagttgagtttctcagagggagaaattattattcttaaagagtatgtgaatgaggaatgggccagaggagaagttcgaggcagaactgggattttccccctgaactttgtggagcctgttgaggattatcccacctctggtgcaaatgttttaagcacaaaggtaccactgaaaaccaaaaaagaagattctggctcaaactctcaggttaacagtcttccggcagaatggtgtgaagctcttcacagttttacagcagagaccagtgatgacttatcattcaagaggggagaccggatccagattctggaacgtctggattctgactggtgcaggggcagactgcaggacagggaggggatcttcccagcagtgtttgtgaggccctgcccagctgaggcaaaaagtatgttggccatagtaccgaaggggaggaaggccaaagccttatatgatttccgaggggagaatgaagatgaactttccttcaaggctggagatataataacagagctggaatctgtagatgatgactggatgagtggagaacttatgggaaaatctggaatatttcccaaaaactacatacagtttctacagatcagctagaggagaagcttgtctgtgttccttggcacaagaactcacttgaactatcaccttgactatcagatatgtttttgcactatttttttaactgaaaaagaaatatctaagctgtacatggtacactagaattttctgaaagcagaaaacgttcagattttgtagttaattttcattacaatagaaacatgcacatggaaacccatgagctaggattctaccgaggaaaacatctagtgggattagcaaggtgaagggaaagcatctggtggcatggcagcatggggaggctcacacacagaagttgcacgtggacatctgttttaatcagcacaagtgaattaaccatgcttcttcattttttactttagttaaaaagaggacatttaatattctacatgctgtaactatcagacatggttagcaatcttcaatttcatttttga

SEQ ID NO: 189723 - DNA, 1709 bp, Homo Sapiens
  misc_feature (538)..(631): n is a, c, g, or t
ttgggttcatcactactagacagcacaaatacgaacttcaaagaagagccagctgctaagtaccaagctatctttgataataccactagtctgacggataaacacctggacccaatcagggaaaatctgggaaagcactggaaaaactgtgcccgtaaactgggcttcacacagtctcagattgatgaaattgaccatgactatgagcgagatggactgaaagaaaaggtttaccagatgctccaaaagtgggtgatgagggaaggcataaagggagccacggtggggaagctggcccaggcgctccaccagtgttccaggatcgaccttctgagcagcttgatttacgtcagccagaactaaccctggatgggctacggcagctgaagtggacgcctcacttagtggataaccccagaaagttggctgcctcagagcattcagaattctgtcctcactgataggggttctgtgtctgcagaaattttgtttcctgtacttcatagctggagaatggggaaagaaatctgcagcaaannnnnnnnnnnnnnnnnnnnnnnnnnnnnnnnnnnnnnnnnnnnnnnnnnnnnnnnnnnnnnnnnnnnnnnnnnnnnnnnnnnnnnnnnnnnnnagccactgcgcccagccaacaatccgctctgaggaaagcgtaagcaggaagacctcttaatggcatagcaccaataaaaaaatgactcctggttgtgtttggaaagggagagaagagatgtctgaggaaggtcatgttctttcagcttatggcatttcctagagttttgttgaagcaagaagaaaaactcagagaatataaaatcaacttttaaaattgtgtgctctcttcttcacgtaggctcctgttaaaaacaaagtgcagtcagattctaagccctgttcagagacttcgtggatcacagctgcagctcaccgccacatcacaggatccgttaacgttaatacccaatactctgtcagccactgtaggctctaagaaccacgtgcagtcttcagcccattaaattatcgattattttttaatgaattgaatttatattgagtcttcaaattaactgaatggatttaaaggggtaccaaggaggggggaaacatcagaatttcccaggcagttgttgcaaggaattggtactaaccgtgactacaacaaaaattcttgattgacttttaaagttatttcctggcattctggtaccttcacccagcctgagtgccctggagagggaacaggaaatgctgatctctacccctgggtgagaccagaacctcagggctgatactgttgagtggcttcctcggtttactctgtgtactgtgaaagtattttcatattttttctgtgtgccagagtgaaaaaggacagcttctgagtgtggtaattgtgcctctagcacccagcctttcaaagcccacctgaaacctgggggtggatgaaagaactagaatagaagactgaagctgggtaggccgctcagtgtccactggcattttgctaaaccgacaaggaaagctgtgtgcttagctctccccagagggagggcgagaaagggtgtggtgatggtccatctggctgtcggaacaaattctggtgtcttgggctgataacagtgttggtgattctgatgggaatcctctcatctccagcagacccatacacacccctgaaatggggctgc

SEQ ID NO: 189724 - DNA, 903 bp, Homo Sapiens
  misc_feature (443)..(478): n is a, c, g, or t
  misc_feature (842)..(854): n is a, c, g, or t
ttgggggcttatggtagatggcttcctggaatcaaaatgtgaattcatgtggaagggacattaatccaataaataaggaaagaagctgttgcattactgggattttaaaagtttgatttacatttatattccttttctggttcccatgttttgtcactcatgtgcacattgcttcgccattgggcctccagtgtattgttctgcagtgttgaaacagaatggaaatgacaagaaatatctgcagttatccaggagaaagtataatggcaaaattattggtttctttctttactttgtgcttgtttttatccccttgggttgtttttctctgatttttaaataaacttaagaaatttagattacagagtatgcatgactgtaagaaaaagaaattgagaggaagtgatcatagcaaattaaagaagtcttttcctcccagaacnnnnnnnnnnnnnnnnnnnnnnnnnnnnnnnnnnnncttttccacagagaaaggcaactgtgatgataaaatttaacgttcccccaaacactgagtcaatgagatttttctcaggagatactttacctataacaatgccgttaaatccaaatctcttctaaacgatggcattctatgtaatgcctttcctggacttttttggccactgccctggactagtgaaagaatggactctatctttatctgcaagaggaactaaggccttctatcatactgcctggccagcctggggcactgaaaatacggctcatgttaatgagttacattatcagccagcccagccttgcccaccatttaagaaatatcacagagccactagatctcatatgatcttcttcannnnnnnnnnnnnaacccatgaaaactctacagaagaaaagtgaagacgtcctgttgaaaaa

SEQ ID NO: 189725 - DNA, 1262 bp, Homo Sapiens
acagtagagatctctgccccagccccatgcttgacagtttgggctgcatgagctgctttcttcttggcatcatactgtgtaaggatatcaatgaggcccatgaagtagacctcttctggggggctcttcagcactccggatggcatagacatcaatgaaggactcaaactctcctgggcccaggggccgatgggaatggatgtagcctccgataccctctggggaggtgccataggagcccaccagagcaggaggtccagtcaggctgcagtccccatccacctctgactcatcctcccgcacgggcgcttcctcctctggttcagagccccgaatgatgtcgtggatgcctagcagaaggctgtagtccatgatcttcagctgcactagaaactccacatctctcttcagcttctccagaaatattttcttctcctcttcaccaatatatactttctggttcttgttgagaaagtccatatccttaagggtgggcaattctttaaccttttccttatcgctggcttcccgggacactagggaacccttgaggtcatacttcctgtgcacaggaagacggtggctaaacatattgcgcatcacaagcatgtagctgtcttcgttgtccacactgactcggtacatccccaggaactggggcagaagcgtgttgccatggcacttcacaatgtactggtgatagttggagaggttgctatgcatgtcagcaatgtcctcactggatacttctttgatgaccagagtccgatcgtaggagataaggaagcgaccatcactgccttcactttcgctgggggggtttcgggtaagggacaccaagtaatcttggtcatcaatgccaaatcgatcacggaggttcctgaagacctggggacaatactccttgaacttgaaatgactgggcagattttccctgtggaaaaggtgattgttgaccttgatcttggagctggccttaaagtcatctggcagcagcatcaccgggggaggcacctggctgagctcattgatcgagtgggctacgccccacaggaacacacccaccagcgggtcggccgcccggaacaccttcaccttctgctgcacgaaatgcttcttcttggtcttggaggcgaagccgaaacctgggccggggcctgctgtcgccgccgataccgtggctggtgggaccgaggaggacgccatagtctcccgcgcaaccgaccaagtggaagccggagccggcagctatccaggcccaa

SEQ ID NO: 189726 - DNA, 1653 bp, Homo Sapiens
ttggctaaatattctcatttcaggactttttaaaacacattttcccaaatctaacttgggacaaaatctaacttgggacatttaaataggttatcaataattatctgtttatggcctctttcggcacacaaataagcatctccctgtacaaaattctagtgtatgctgagctgattgattgccttctgcatacaccttttctacaacttctcaaacgtgtgtgacatgctggtaagatggcaggaaaaggagtgactgaataatacaatatagctgagatgtgtttcaagaaaacctctgggccagggtaggggtttgtgagcgggagccaaggacttgccccatgtttctaatcaaggtgagaccactgacacatgtggtcagcaaatatgttctatacacacatccgcacactgtcatctaacccatccgttctcccatccacagcatctccaggacaaagccatcgcaactagggaggggttgacacctgctctcctaacatgttttctttctgtttcaggcttgaaaaacccttgcccagttttgatcccttcaagactttgtcacagcctctatcacacatctgtttttctcgaagaaaaaaatataattaataaaaatgttttactcttttacactgtataattgtaagaaatagcgtattatttgtgaatgcatggtctgaaatttctgtacagtttggagatattttcaaacgaaacgtaagagaagtcaacaataaaaccaagaaaagtgagtatttttataccaaacattttaagtatgctgggatggacgatcttacactggtttggatcacagtttttgttcttgacttttgaatgcttgtaattaaaaatatctatttttttcctctgaagtaagttgcatgtttgaggcatgtttccaaatattatcaaaatatcctgaattgtattgtgaatatatagaaatctgtgcctggccggagtccagggtaaattagtagcatggtgttagatgttagaaacagaactgttatttgcagtgttaggtctaggatcccagttctagtaggacagccctgcaagacaatcaaccagaagcctccaggagcttctacctatggcttattcacaactgggtaagaaaacatcattggtaagaactgctgagtgtgcccttagaaagccctagtagctccagctgtgactatatcaactgtgtgccaagtgtgactttgtacagttttatgtttccactctcctgtatgtgtagccactcgatgcctaacctaccttccacaagccagccccgcatccctgctcccgcagtgtaagtgcagagcctgcctcactggtaagggaaaaccttggcttgggaggccagccctggcccttgaaggggttggctgtgcccagcccacctggctgcagtgggcagctcatgtctgtatctccaaagtgatgtttgtttgcaaaacaccggctgaactgagctggtgttgccaactcttggcagcactgggccaaaccgaccacataccatgagctcccaaatggcgtgtgctcactgtgagacgtcctgccacaccccacaggagacggaggcagtgggcatttgggaaccaattctattcagacttcgtcaaagccaaagttcagtctggtg

SEQ ID NO: 189727 - DNA, 1252 bp, Homo Sapiens
tttgctcatgctgatcccattcaaaggcttctctccagtgtgaattctctgatggcgaacaagagccgagctgtacttgaaggctttcccacactcactacattcataggggttctccccggtgtggattctttgatgctgaataaggctgaactgtaggtaaactttcctccacattccatacattcgtagggcttctctccagtgtggattctctggtgctgatagaggtgtgagctctggctgaaggctttcccacattcattacattcatagggtttttctccagtgtggattctctgatggtgaataagggttgagctcctgctgaaggccttcccacattcattgcaggcgtagggtttctcaccagtgtggattctctgatggtgggtgagggtggagctccagctgaaggtcttcccacactcattacattcatagggtttctcccccgtgtggatcctccgatgcagaatgagggcagagctacagctgaaggttttcccacaatcactacattcataaggtttttccccagtgtggattctctgatgctgaataaggtgtgagctctggctgaaggccttcccacactcattacattcatagggcttttccccagtgtggattctctgatgttgaataaggtctgaagttcgattaaagctcttgctacattcatcacacttatggggtctgtctcccacggggagtctctgatgtgagataaggttggaattcacagtgaagctgttcccaaaatcattatatttctcgcttctctctcccctgggggttagcttctcctcaactgtcacttgaccaaaatctggcattttcctgttcagtctttctccaggggagttccccagcggccttttcagactgacttctcgttcataggcttctttaaacttgagaccctgagaaatatccttttgaaatcttcccagtaggaccccatgtgatcttgtgtcttcagaaatttcttgatcattttcagtcctggtctcacgatccagtgagaacacattcccgtaattctccagcatcacatctctatagaggtccctctgagcaggttccaaacgcttccactccttccggatgaagtacacagctacatcctcaaaggttaccagctcctgggacttggcctttaggagcgcagccgccaacatctcatcccccaggctgtccttgtcggaaaaggcaggaacttttgaaggaagagctttttctgcaattc

SEQ ID NO: 189728 - DNA, 887 bp, Homo Sapiens
ttggctcttagagaaaatccatagccttcagatcttggtgttttgaattcttactatagatgtttttaaagttccaaagtcattgagtttcaatgttacataaactccattacccgcatgttggggcttgatctcctggttattatctgtgcttgaggaaacacccacagcagtctctacccagaacagtttcctaaagaggcataccctcttcctccactggaaaatagtgcgttcccttcctaccctgcacacccatcgcccccacattgatggttttcaaacagcaaacttttcagctaaagcttcaaaccatgattggaatcagcctgtgttggatttgtgattcagggtcatggtgaccctgatccagtttgggtggaaatccttcctaagtatcataagaagcatcttggcagagatgctttggtggcagccatgagctttgctggaggccttgcttcccatagccttggctgtggggcaaggaactctgccaggcgagggggatgctgccctggatcaacagaagcctggtgggtttgctcgtgttagagtgtcctgccttcttactgacaactcttctcggtgatagcctctcttccctggattgtgacatatggaatgacagtgcaggtaccaccgaggctagcacagtcaagcctccagctaagctggatccctgaagcctgctatcatgcagacaggctatgcggctgcctcggaccatgctaggccacttgctggggtgtcaacctaccaccaaaggggtcttttagcaaacctcatggggaacaggaacattcctgttcatccctggccacaggctgcagacccagcactggcccttgcgtgagtcagagcctggggctggccctagccccttc

SEQ ID NO: 189729 - DNA, 1193 bp, Homo Sapiens
ttggtgggaaagagccgcgaggagcagaccgcgccgccgccggagccgcgcctgcccaggcccggggagggaggaggcgggcgtcagggtgctgcgccccgctcggcgtccgagcttccggccgggctgtgccccgcgcggtcttcgccgggatgaagcgcccctgcgaggagacgacctccgagagcgacatggacgagaccatcgacgtggggagcgagaacaattactcggggcaaagtactagctctgtgattagattgaattctccaacaacaacatctcagattatggcaagaaagaaaaggagagggattatagagaaaaggcgtcgggatcggataaataacagtttatctgagttgagaagacttgtgccaactgcttttgaaaaacaaggatctgcaaagttagaaaaagctgaaatattgcaaatgacagtggatcatttgaagatgcttcaggcaacagggggtaaaggctactttgacgcacacgctcttgccatggacttcatgagcataggattccgagagtgcctaacagaagttgcgcggtacctgagctccgtggaaggcctggactcctcggatccgctgcgggtgcggcttgtgtctcatctcagcacttgcgccacccagcgggaggcggcggccatgacatcctccatggcccaccaccatcatccgctccacccgcatcactgggccgccgccttccaccacctgcccgcagccctcctccagcccaacggcctccatgcctcagagtcaaccccttgtcgcctctccacaacttcagaagtgcctcctgcccacggctctgctctcctcacggccacgtttgcccatgcggattcagccctccgaatgccatccacgggcagcgtcgccccctgcgtgccacctctctccacctctctcttgtccctctctgccaccgtccacgccgcagccgcagcagccaccgcggctgcacacagcttccctctctccttcgcgggggcattccccatgcttcccccaaacgcagcagcagcagtggccgcggccacagccatcagcccgcccttgtcagtatcagccacgtccagtcctcagcagaccagcagtggaacaaacaataaaccttaccgaccctgggggacagaagttggagctttttaaattttctgaacttcttgcaatagtaac

SEQ ID NO: 189730 - DNA, 921 bp, Homo Sapiens
ttggatttatatctgtacatattagacacacgcgagccatcttgccagaattctgacagtgatgtcattttattcccctcccaaaacatgccccaggaacaagcaccccttgcctctgtggcagctgcgagtgtgtctgatttcataacgaagccaggctgagggcaagaggcccgacaggcaggccagggtccccggagaagccggatttcttcgcaatgtcactggtacttagcagatggtcgtgttcacaggggctagccacctgtactacggtgccgaccgcaatgcgaggaatgtggtggccacgcgatggagctggccggaggacaggtcaggtgagggggccgacccctgcggggctcagggctccttccattctaaccttgagccacagtgtcactcttcagggctctgctcctggctctattttgttaaggtgtcatcagccttcaacctccatttatatatttttataatgttaagccactgaccaactttttcatagaaacaactatcagattcgagggctccctttgtccccctgacctgggcacaggcatgggcgatggctccctcttcccagaatctgcggggaactggggcaaggcccatctgtctgcaaggctggtagctctctccctcggcttccagagtccacggcagttgcaaggtaaccagtgtggatctgctgagtcaccccaggcaccagacttaccccaggagcatgggccactgtccatggggccttccttgagaccttcccttggggctggcgggcggcggcttaccagctgggtcagtcccatctcgcccctctgtgcctatgccctggcgttgccaggcttaacccttcccctgtatcttactcatcccagaattattactggccatttctaaatagacaaaaactaccctaaa

SEQ ID NO: 189731 - DNA, 2055 bp, Homo Sapiens
  misc_feature (57)..(99): n is a, c, g, or t
  misc_feature (995)..(1007): n is a, c, g, or t
ttgggaacaagcttctttcccttaccccccatccacaatgtctgagcttggatgtcnnnnnnnnnnnnnnnnnnnnnnnnnnnnnnnnnnnnnnnnnnnaaggggtctgggctcactgcctggtgaagtttcaagtgttcagcagacctctctggtaacatatctggaatattgttgttgttttttaaccgagttttcccatcagtgccaaaactcaactcaatctgaaagtagagtgtctgagaggacagaaggtaatgggaactgtagctggaggcctcaggccatgggtcaaacctgggagggaaagagaccctacacatggcctagaaatgagagaagagagaggtatttacccagaggattttcctatggttggggatgcaaatattagaaaacagattgtattttgctgaggggagtggctgtcatgagcatgtcagttctaaaaggggttttcattatcctggaaatgtataaactaaagtaagctgattggctttgcaaacatgttcatttgtttttcagacagtatgggttaagttctctgccctccccaggggtctgaggaggctctgggtttctcagatctgtctcttgctgcgttttcacatcagctgtgctgcttggtgcctctctgatacgaatacactgacacgtcaaagtaacctaatgtggacaccatccagaaaactccagttcatgctggatcttaaccaaaaatgattcaatactgttatcactaaaacagcaccaagacctgaagccatcttcccttggagtcaactgactaccacctctataagcctagtcaatgagcagaccccttccagtatttgtaaaagtagtactaggttgcctttttggcaatttttattgacctgttgaatcttgactataaaatgatctgagaagtaaggaaggctgggctgatgtgtggctctcatataccttctgcaagggggcagtctccccagctccctgatgatgctcannnnnnnnnnnnnacctcaggtgctgctggtgtgagccaaagactggagtttttccagctggggtgggagtggagagacaacaggaacaacgctgcaccaaagaaaaggtcagttaaaaagcagcacagctggtgaccttattttctagatgttacaaatcaggtcactatgcaaactagaatatcctcagcaggtggcctggccactctggagaaagaaacccaaggaaagtgagcacccaactggatgccaagacacccgggttctgaaaatgtgctgtgttgctacctcggcaagatcaccagcactgaggggcccagctggagaatgattctgctacaaaaggagacagttgagacttttgcttgttggaaatcaaacttcttatttgtctaaattgcccctttttctgttcctaaaaggaaggataagagagaacattccaggtgaggcacttcaaagtttccttagaccctatagtgttaagaggtattttaaacactaaaaggacaaagctcttcccaatccttatgcttccctaagtggtatctgcagcagtttgttgtgtgcagtttgatggcagctgcaaactggaggtgaggcggaggaaaggcaggtaggaaggagtaaggatggagatgctcagaatcaagagcatggcggagtaggagaagaagccctgcacacagggcagtgtccacagccagaaaactcctgctgggcaccaaccactacgagcataccccatgcccaccgtggagctgcaactcctcgacagcactgagtttgatagtctcactggaagcagatcagctgatgtagaacagagacctcggccataaaggtgagaagacatagggatttcaaccacacagttgggacagaagggacagtgcatctgttcatccatcctgcacttggcccacgttgaactccatggtgcctgagagagactagttaaggttggtcttctgtatcctctgctgttgagcctctggtaagctttcatctcccatgaactcatttccccataaatgaaatgggtaaataatgccccatt

SEQ ID NO: 189732 - DNA, 710 bp, Homo Sapiens
actttgtacaaaaaagttggacgatggagagctcccgcgtgaggctgctgcccctcctgggcgccgccctgctgctgatgctacctctgttgggtacccgtgcccaggaggacgccgagctccagccccgagccctggacatctactctgccgtggatgatgcctcccacgagaaggagctgatcgaagcgctgcaagaagtcttgaagaagctcaagagtaaacgtgttcccatctatgagaagaagtatggccaagtccccatgtgtgacgccggtgagcagtgtgcagtgaggaaaggggcaaggatcgggaagctgtgtgactgtccccgaggaacctcctgcaattccttcctcctgaagtgcttatgaaggggcgtccattctcctcctacatccccatccctctactttccccagaggaccacaccttcctccctggagtttggcttaagcaacagataaagtttttattttcctctgaagggaaagggctcttttcctgctgtttcaaaaataaaagaacacattaaatgttactgtgtgaagaataatgccttgtatggtgttgatacgtgtgtgaagtatttcttattttatttgtctgacaaactcttgtgtacctttgtgtaaaagaagggagctttgtttgaaaattgtatttttgtatgtggcatggcagattgaaaattatatctagctaatctc

SEQ ID NO: 189733 - DNA, 992 bp, Homo Sapiens
gtaatggatgttttgcacctgaaaacactataaaaatccagtggttgtttaaaaagtccatttgtcactaattccattcaggttctccaaccttcttcttgaatatcattgtcaccatttttactgttagaataaagaggtgacaccataaagtcctgctgataatgagagtagttcaggacagctgtgattgaaatatggtcgctatttacagtttttcagggaaaagttatacttttctatgttaataaagagctgaagtggtctacagttaatgtgacatgtagggatgatgatatttttaaaatacattttgttgctaaaaagtttttaggccagtgcaaattatgcagtagaacttgtgttgcaaaaggaattataacccatactttaaaaatgcttaatccctcatattcaatttcatcaagccttgtatacttctgcttaaatgtaattcaatccttggttgttatggcaaacagaaacccaacaaaaagacagactctggtactatggtaacagagccactttatcatttggtcaaaatttggcattatgattagctttgtagaactgacctgtttatttggcaatgctgttaaaggatcatttcggtttcagacttcaaagttgattaataaatttaatcttaactttttattcactggaatcaaaacgatggttggtactgtgtttactgtttaaaatgaagtactaaagccctgagaactgcacctcattttctttatccagaaattgtgcttatatattttcctgtcaggtttaaaaagatgttttaattcataaattattgttatcattgacattaaaagactgtgatattgaaagatgaattaccaaatttgctgagattgtttagtaaaattttgctggtcaaaaaggtgtatttctacaatttacatttcattgttataaacttgcagtcatttcttgaattttatgtaaaatgtaaaatgaaatagctatcatga

SEQ ID NO: 189734 - DNA, 1148 bp, Homo Sapiens
ccaccaacaatgacaacaacaaaacaacatttttatttctcaatgtaagctccatcaaggtcaagatacttttgtaagctgtgacaccagccatttagtccacctctaaagaattgcgggctctgggaatttaaccatgtcagtgcagcctttttaacattattaacggaagaaaaaatgagtgcttttaaagattttttaaaatgaggaaacaaagtcagaaggagcaaaatcgggactgtaaggtggatgcctaatgatttcccaacaaaactcttgaagaattgcccttatttgatgagaagaatgagccaggagcattgtcatcgtggagaaagacactggtgaggctttcctgggtgtgtttttgctaaagcttcggctaactttctcaaaacactctcataataagatgttattgtgagccaccacgcccggccgatttggggcatttttatttaacagaacttctctaaccttccaactgcttcccacaaacacattggcctcaaggctccttagaatcccagttccagcttcctaaaatagacagtgggtatcgggcagcagtcactggggctcaagggcagtgagcaagagaaatgtctaaagctgcttctcccaacaccgtccaaagtctccactgcctgagttttgtttcggctggtttgaactcatttcgggtgtgtgcatttttcttttggtacccatgtgagacatgaacaacaggagggagggaaagagcccaggtgggacgtgggacaggcttaggggaaagagcttgtcctatctcaggaacaaaattataggctgtgggcagagggtctgaaaggtgggctttggggtagtgcccaagcctggtcgtgttgccaggagtggtgacaagaaatgcagcttacatcaaacgaacatgtagtgcatgcccactgcctgatggccagatggcctgtaagaagagctaccagggcttccagacctgtggaacgaaagaggatggggaaaaggcagagggcactgagtgtccctttaaaaactaacacactgaatattccgtgtgatctagaacagtgtggcagctttcacagcacaggaccgttcatcgggggcctaaacgtttccctcagctctgtcaccaactcacttctctc

SEQ ID NO: 189735 - DNA, 1220 bp, Homo Sapiens
caaattgatgagcaatgcttacctataaaagccaactttgtacaaaaaagttggcaattttttgtacagtcggttttaaggtcttctctgccattagagccagtaggttacagctattgatgtaactgtagctgcaatttttgtgcaggactgagaaacacagtgcattatttattgcggaatcattgctgctaaataactactgtctgtttatttaacacaacaattgaatgcctgaagaagttgcagtggctttattatatgtgaatgcatctgtttctcctcacgaattgttttactgctgcattttttgtttttaaaattaaactgcagtgtttcctggaatgtaaatttagctttgcttaatagtaaaataagtgagccatcttgaacactttaagtttatactatataatttcttaatgaacattggcaaatagagtagctaagagattgacaagcacattacgtttagataagcatgtgatgcagaagttgattcaagcaagtgaatccctgacattttgaggatctcacattagacaccaacaaattaaagctccaaaattatttattttttatgtgttcctcactttagaaacgtctactgcatattactggatatttgtatactaatacacttacctattttacattgtgttttaaatttagttaaaacttaaccgtagaagtctgttcaaacgcgaaaggtcttgctttgtttgttttaaatacatttattttattagaaaggatgatatttcattggggaatagtttctttcatttgggggctatgtgtttcaataacattcacttggaatcagctgaaagctgtaatatgtctttgaaatgagccatgataaattacaaacaagagaaatgagaacttacaggattgcttgaaattattgtgggtattatctgtttaccagagatactaaatattagttttaattatgcatctctttgaacatcataaacacactttggtgttggtaacagtattttaagcatttttgttcacttttaagactatttgtttagtgcatcttacaaactataaatcttaattggtatattttgaaatggtcgtgtaaatttttgccttatatatcatgaaaatagtcataacttaatttcttttcctgaaattcactgtaaaacattcaggggtcctaccatttctgttcaggaaatcttgtagtttattgttgtatt

SEQ ID NO: 189736 - DNA, 1569 bp, Homo Sapiens
ttggctcagaggggagcctgtgggagatggagaggtagatcccgtagccggcgggcggcgacgtcccgaccagagcgtgtgtggcccgatggggtcatcccctttgtcattgggggaaacttcactggtagccagagggcagtcttccggcaggccatgaggcactgggagaagcacacctgtgtcaccttcctggagcgcactgacgaggacagctatattgtgttcacctatcgaccttgcggctcgggaccgcccccctgagctggccccgccctccaggtgctgctcctacgtgggtcgccgcggcgggggcccccaggccatctccatcggcaagaactgtgacaagttcggcattgtggtccacgagctgggccacgtcgtcggcttctggcacgaacacactcggccagaccgggaccgccacgtttccatcgttcgtgagaacatccagccagggcaggagtataacttcctgaagatggagcctcaggaggtggagtccctgggggagacctatgacttcgacagcatcatgcattacgctcggaacacattctccaggggcatcttcctggataccattgtccccaagtatgaggtgaacggggtgaaacctcccattggccaaaggacacggctcagcaagggggacattgcccaagcccgcaagctttacaagtgcccagcctgtggagagaccctgcaagacagcacaacaacttctcctcccctgaataccccaatggctactctgctcacatgcactgcgtgtggcgcatctctgtcacacccggggagaagatcatcctgaacttcacgtccctggacctgtaccgcagccgcctgtgctggtacgactatgtggaggtccgagatggcttctggaggaaggcgcccctccgaggccgcttctgcgggtccaaactccctgagcctatcgtctccactgacagccgcctctgggttgaattccgcagcagcagcaattgggttggaaagggcttctttgcagtctacgaagccatctgcgggggtgatgtgaaaaaggactatggccacattcaatcgcccaactacccagacgattaccggcccagcaaagtctgcatctggcggatccaggtgtctgagggcttccacgtgggcctcacattccagtcctttgagattgagcgccacgacagctgtgcctacgactatctggaggtgcgcgacgggcacagtgagagcagcaccctcatcgggcgctactgtggctatgagaagcctgatgacatcaagagcacgtccagccgcctctggctcaagttcgtctctgacgggtccattaacaaagcgggctttgccgtcaactttttcaaagaggtggacgagtgctctcggcccaaccgcgggggctgtgagcagcggtgcctcaacaccctgggcagctacaagtgcagctgtgaccccgggtacgagctggcctcagacaagcgccgctgtgaggctgcttgtggcggattcctcaccaagctcaacggctccatcaccagcccgggctggcccaaggagtaccccccc

SEQ ID NO: 189737 - DNA, 1449 bp, Homo Sapiens
ttggcatctccctgctggtcaagcaggtgcaagagctggaactgaagctgtcaggacagaacgccatgggctcccaggacagcttgctggagatcaccttccgctccggagccctgcccgtgctctgtgaccccacgacccctaagccagaggacctgcattcgccgccgctgggcgcgggcttggctgactttgcccaccctgcgggcagccccttagttgaccacggcatgtttgagaatttgaacacagccctcactccaaagctccaggccagccgctccttcccccacttgtccaagcccgtggcccccggctctgcccctctgggctctggtgagcctggggggccaggactctgggtgggcagcagccagcacctcaagaacctgggcaaagccatgggggccaaagtgaatgacttcctgaggagaaaggagccctccagcctgggcagtgtgggtgtgacagagatcaacaagactgcaggagcacagctggccagtgggactgacgcggctccagaggcttggctagaggatgaaaggtcagtcctgcaagaaacatttcctcggctggatcctccacctcccataaccagaaagcgaacccctcgggccctgaagaccacccaggacatgctgatttcatcacagcctgtcctcagcagtctggagtatgggacagagccatcacctgggcaggcccaggactccgctcccactgcccagcctgacgtcccagcagacgcttcacagccagaggccaccatggaaagagaagagagaggcaaagttctgcccaatggagaggtttccctgtcagtacctgacctaatccacaaggatagccaggacgaatccaagctaaagatgactgagtgcagaagggcctcctcccccagccttatcgagaggaatggcttcaaactcagcttgagccccatcagcctggctgagtcctgggaggatggcagcccccctcctcaggcacggacctccagcctcgacaatgagggccctcacccagacctgctgtcctttgaatagagcctctgctctttcctgctgagctctgcccttgtcttcctgctgctttctcctccactgcgcacactggccctggcctcaactccgctgtgccctttgtcttccttgtatgaggcaccagcagagagccagtcgtccatcatgggattttgcaggactggaagtccttgagtagttctagttaaagagtctatccgcagaatggctgaaggacttgatgccgttttgagcctaattttctgtaacctcctctgagtgggctgcagcccttggacattagagctcttccactcttgagcttgtcctgtcttctcagtgaattgcagggccaccagctcagacaatggatcttacaggaattctttttgcctgtcccctacatgcgcctcctcccctgctg

SEQ ID NO: 189738 - DNA, 2037 bp, Homo Sapiens
  misc_feature (181)..(189): n is a, c, g, or t
cacggacagacagggtcgtttgtcacagcaaaaaaccacctcacggctcctacccgcactcatcgcgaacagtgcctgcagcgggagcggcgcgagcaccctccccaaatgaaaacaccaccaccaggaggtgggccgtaccccaggctgagggaggaggctgggggctggggctcagggnnnnnnnnnggccacagcgccaccctgagtggccctgaaaatagtgcacagtgctgggtactgccccggccggaggcacctatttgttgagcattccggccacaggccacccgctggcccttccttggtgtggcacgagaccacgggcacttgcaggagctccctgcatgctgttttgtgctttggtctcagggagcaccctcctacctcggggtcccagagtgggcagccgggcaggtgtgaacagtgtgacaagggtaccgtggggcacctggtagtgccacccagaggggcagccggtgctcctggtggtgtggcagcaacagttacaaactcaccccaagtccaaaccccagaaatcctgtttctctggccctccgggtccagaatgccctgcactgcctcctggcctcaggggctgctgcggtggtgggaaggctgcccagcagtgaggaaggcgagtgcaggggctgcggccgcggtcagagaaggagagacaccagcagaggacgcgaagctggaccggccaggttcagagcccgcctcggttgctcccaatcagaatctgctttgtgctccacggcctccaagcactttcatgagcgttctgctcctacgtggccaggtcctaccttccctgacggctctggccaggccagctcggtttccctctaacccatgaggcctgggggggctgtgacagaggctggaagcgtggccagagcccaggggcaggcccgcctggtcacagcaggatgaggctggggtggcgcagctgccggtacacctgtagcagcctctgggcggtggcacaggagctggcctcatcctccgtgcagagccggtcgcgcagggtctgcacctcccgcagcagtgtctcgtggttggcgtggatctggcggaggtactgcacacggagatcaggagcgctggagccctgggcggcctgctctgtcaccatcgtctgcatgcgcccgacaacggcatggtgcgccctgcaaatgtcggccagagaggagctttccacttgaatctccacggcctggatgggccctgctgggcacaggtcggtcatggccacctctcggacgatgaggtgaacgttggcgccatcaggggccactccctggatggaagatagtgctcgggccctcacgacgtccacagcagcattctcagcaaggagccactgcagggtggcacagcacaggggcacgcctggaggggaggcatcagccgagagctcagcctgatcctaccaggtgggctcagccgatcctaccaggtgggcatctgcatacctgccccaaagtgcccttcccagagccatctaagcatcccagctgtccccagccccaccctaagctgcggcgtggccagctgacccagaggaaggaggccactgctcaactttctctgctgaacaagtcctacgatgggtggtggcagttacgatctgtggaaggtgaaaacctcactttgggggacctgctaatgctcctgggagccgatgttaggagcaggcagctccgcccggcactgggcagaaacaccccaggagatggctgcggctgccctctctgcacaagcccaaatccagaaaccatccaaatacccatctgcagcagaacggtgacatctgcacctgcgacacagagggtctcacacacatgggggagcaaaggacagacacaaagaagggactgcacactccatttcgtggagctcacacatgcctgatgaacggtgctggggctttggggtgagcgcagctgcctccctccccgggtgcccgcactgtgaagctcacagtttgctcctttgtgactcttctgtatttaggttacgcttccccaa

SEQ ID NO: 189739 - DNA, 1325 bp, Homo Sapiens
gtgggggccgctggacgacgtgcgcttcctcatcgcctgcacttcctggtactgacggcgtcctccgcaggatgtcgcccgtctgtccgccgtcccctgtggttcttgcctgccttgtctcctctccccacgtccctgcgtctcttacaccccctcccacccgaggctccccagagatagcagagaattcgaagaggtcgccggggactggaaagaagtcccggcagggccgccttcgcagtctacaccccagcctgcttcccagcctacacccagacccagctcagaccttcgtgaccaccccatccctttctccggctggctgggtcgggggcatccctctctgtcgctggcttccagaggcaggacaggcctcctggtaagcccgcaaagttgctgacctcctgacttcgtctgccttttattaatatctgtattgctgataaccctgctcttgactatgtgtcccaggtcatgtcccaggtcatggagaagcccgtgccacagtgaccctccccatactcctgggggggctgctctccatcctggatcgtaaggaggcatcatcaggctgtgttcctggaaccccaataaccctgggcccccagggccagcctgttgtagagggaggctatctgaccgccggtctggcagaggagatgggtgggcagctcccagacaccccaaaggacccggttctcttcccagagcgtcctaaggttactcttggaacctgatctttgttttctcatcccagggaaatgacacactctgtatttctgttttatttagaaatgatttaaaaaacattatacaaaggctgatcagtttaaaatgtgactgacactgaaatgctgtgatgtcccccaggctgaggggaagctaggctctggggcccccagtgctttgcccctctgtctgccctgtcctggggtgatggacaaacagatgaccacaggcaggagaatctgagattggaagcctctaggctgagccctctgggcctggccccacatccctcacctctgcagcctgggctgcctgcctccatctcctgttcattctcagctggcctgcccaggagccaacggggagcctggcgggaggcgggggtgcctagagctttcaagaattgagagcaccaacctgaggagtggacagggaccaagaagtgggggaagggaggccaggaagaggtggatacaggagacacttctcatctcatctcagaccctagaggggtccacagatggggacaccagacccagccagcctactggatggcccgggcaagtaacaacctctctgtgcttcatctgaaggca

SEQ ID NO: 189740 - DNA, 740 bp, Homo Sapiens
  misc_feature (255)..(307): n is a, c, g, or t
ttggcagagtccagacagcaaaaccatggcagagcagagccaggctcctgcaccctgattggtttggtagccaactgaatgttggttctcccagaactttggcagagatcccaaataaagagtttcctactaatttgttagacacagaaacactttggggattagaaaaaagtacttgagctgataattacataacctattgcagctcggcacaattccacatggactcatggtcatttcaggctctttgctcannnnnnnnnnnnnnnnnnnnnnnnnnnnnnnnnnnnnnnnnnnnnnnnnnnnncctccctcacccagctcacagccagcgcctggtcaacgtgaagtcccggctgaagcaggcgcctcggtacccatcacttgcccgggaactcatcgagtaccaggagaggcagctcttcgagtactttgtggttgtgtctttgcacaagaagcaggccggggctgcctacgtgccagaactcacccaacagttccctctgaaattggaaaggtctttcaagttcatgagagaagctgaggaccaactgaaggccattccccagttctgttttcccgatgccaaggattgggttcctgtccagcagttcaccagtgaaacattctctcttgtcttaactggagaagatgggagcagaggttcggttactgccgaagactgctgcctggaggcaaagggaagcgccttcctgaagtttactgcattgtgagccgcc

SEQ ID NO: 189741 - DNA, 1217 bp, Homo Sapiens
  misc_feature (214)..(270): n is a, c, g, or t
caaaatattttgcaatatctgccaatttcttccttactgctcacataaattgactctattacaactggtatcagaactttcacacaaaatcatactcagacatttttatataaaacctataaaagatattttaaacttgtatctaatacttccaggtgtttggctgtttgatctatgcaaaagtacagccatatgtatatatctctgtgtgtgnnnnnnnnnnnnnnnnnnnnnnnnnnnnnnnnnnnnnnnnnnnnnnnnnnnnnnnnntagattatgaataaaatggaaagcttattttactgctttaatgcagacatcctcataaaacaagactactttcaccaccaccagcatttatacatatatacaaagccagtttaagtacatatacatccacttacacatatttgtaaccactaagcccaaattaattttcccatattccagccgtagcaaatgaatcgcttataagcaacagaaacctaaggttaaattgggaaatcaacagttttaccacattagcctgtaggaactatgcaggtgactgtatacaaaaattcacaacattagttcacaagaaattatgggactacaagaagccttttcatcatgcttttgtgtggttatccaaacacttcttggggcaaaaatacaaccaccacatctgaaaatgcttaataaagtcagtgttcctcatgcaaaactttaaatgtattggcttaactgagctccaaaaactgaatgaaataattatcctacctactcagcattgctgcctcactgctaaatccctttggaaccttaagacttctggaacgttcagagatgtattcatcaataaaaatattacatacaaaaagcatttaaaaaggaagacaaaaagccaaacaggaattttcctattgtaaataacagtcttagaaatggaagaaaatcttttcaggaacttccttgagaattggttaggccagtccgaagacgaagatgagacatggagttcatatgtttatttgatggcttcaatggagtgttggaagtgagagcctggggaaagcgatggtggtatctatctagtcgtaaatattttactgtaaccaatttcccatcaaaccaagagccatgcaatgctttaaaagcctttccagcatattctggagacagacatttaacatatacacaaccctcacgtgaatttttgtctactgcaatgccaa

SEQ ID NO: 189742 - DNA, 1651 bp, Homo Sapiens
  misc_feature (179)..(188): n is a, c, g, or t
actttgtacaaaaaagttggctttttaaataacctcatgttaattcaggcaaatctggtacaggagaagcccaagctaactgagctgggtgaaggcttgtgcatcacctggcttgagttccttgctgtcacagatgataggttcatgtacacaacattaatgtttgataaggaaagcannnnnnnnnngttaaaattgaattgtcagtactttacttttttccccccaaataggtatatatagactgcagaagcttcagtcccatatataaacgttcatgtcattttagaggattatatggttgtctccagagaaattaacttacattatcaaaaaattctttgtctaatatattggagtctttaaaagtgttgaagaataaaatattaattagaacaacttcaaatgctaaggtgatgttttaccgggacttaattaaatacaactttttcctttcgaaaaagactgttcacatttgcttccaggtgtaattattgctttcattccttacccccctcaagcaaatgtgaaaagtatactgacctaagattctcattagttttagttcttaaaacgaatagtaaatgatttcacagcgtaaaatttgatgttatttctggaagctggatgatatggaagagttcatgtgcctggacacacagttccctgtaatcctgccatctagggagataaactctgttaacattttgatgttgtgtttttgcttatttttctatgcataattatgcatttatattctcaaaaatgaaatcataatgtacatttgctttgtagtctgctctatatattgtcaatatgttcccatattaaatattttgctttttagacagctgtaggatattttatttcatgggtataccataactttaagatttatttcctattcagcaatttgattatgtattataatgtaatctgtaaatagtgatatgattaacatcttaatcacatccatagaaaatgacttatttccagaagataccgctctaaaaatgaaattgttaggtgaaagtgtttttgagaatttttatatatattactcactgcagagatcatgttcatttacattcccattagcaatatatccaatgctcagaattgaaaattactacttaaaatctttgcaaattgaataattacagaaaagggctacatttaaaatttgtatttgtttttcttacttagtgaaggttgtgttttttttcatattcattggccatgctatattcattcttttgagaattgctcattcatattttttctgttgcttgcttggagaatttgctctttttttggcatataagttcttaagaatgtccgtcctttgtcatatattgtaactttttttagccttatttgtcatttaacatagtttgtggtatttcagtatagaagttgttttctttaggagtctacctttgtgtatgtgcttgaaagtatttttgtaatccaagaatggataaatgtccttattttcttctagtattttcttatttcacttttacacctatctttaaaaggaatttaaattttgtttatatacattaactaaatcagtacaagtttgggggtgaaaaggaaatttttaatccatctcaaatgtatttgggttatattatataaagtaggg

SEQ ID NO: 189743 - DNA, 1187 bp, Homo Sapiens
  misc_feature (62)..(87): n is a, c, g, or t
cattttggccttgctggcttgcgtcacattatgagaatgattgtgtaaaccttatactcttnnnnnnnnnnnnnnnnnnnnnnnnnncccaaaacatagaaatctttacaactttctctaaatttgcctcctatgtgaagtcaggaaaatcatagctttacttctagttgaagtgatgtagttggaaaacagaagcaataaatatgtcacaagcttcaatttttgtaatgccccttctatttcctgcatagcaataagcctgttaatacattaaatgtttttgctttctctttaaatgccaattatttacatctgtttcaaaaataaatttggaatgggacattgtgctgtttcaccttcaatgctgttaaaaattttaggaaaaaaaatgtcagaaggcctatctacaattttaactactacttaagcaaattactcatctttagtggttaccaatgatcagtgatgatatgctgaaaaaaccgtttaaatattttgataaagacacagcttttcttttccatatcagacagaaaacataattagcatatttcagatatatgaaaaacacaaataagtaggctacaaataaaaagaatcatttcattgacataatttctatcaaagcatgaataaaatttcacctattaattgaaaaatggaattgaattagaaagtttaaaagacgtaagcagaaaccagacatctacatcatgaactctgaagtagtatgtgctgctatgtccagtttgcacaacacttaactgtgttcttcagtatagtcacttgtgcccgtagcagccatgtgataaagaaaaaatgagtatcaaaaccaactccatcgtaacagaaaggtaaattgattttcatttcaaaactgcctgtgtaaagcattacagaatcctggaccactgaataccaccattctctgttatcctgagtatgtcaattaaacagtaatttttaattaagagcggaaaaattttataatacaaagaaacatccatattgcaatttctgtttacaattgcacacagaagtacagtgtacgtaagaaatacatgtctgcatataacaaggtatgtacattggcaagtgatgtctccaatgttgaggtggtcgagcctcctagccttgattggcagttgaaaaaaatatatttatttcaatttgtggtaaaagtccaa

SEQ ID NO: 189744 - DNA, 1448 bp, Homo Sapiens
  misc_feature (1100)..(1158): n is a, c, g, or t
aaaaagttgggtgacatgaaaaaaatgcattatgtggaccctgaccatgtaaagagagctcagaaatatgctcagcaagtcttgcagaaggaatgtcgtcccaagtttgccaagacatcaatggcgctgttatttgagcacaggtatagcgtggacttactcccttttgtgcagaaggcccccaaagacagtgaagctgagtccaagtacgatcctccttttgggttccggaagttctccagtaaagtccagaccctcttggaactcttgccagagcacgacctccctgaacacttgaaagccaagacctgtcggcgctgtgtggttattggaagcggaggaatactgcacggattaaaactgggccccaccctgaaccagttcgatgttgtgataaggttaaacagtgcaccagttgagggatattcagaacatgttggaaataaaactactataaggatgacttatccagagggcgcaccactgtctgaccttgaatattattccaatgacttatttgttgctgttttatttaagagtgttgatttcaactggcttcaagcaatggtaaaaaaggaaaccctgccattctgggtacgactcttcttttggaagcaggtggcagaaaaaatcccactgcagccaaaacatttcaggattttgaatccagttatcatcaaagagactgcctttgacatccttcagtactcagagcctcagtcaaggttctggggccgagataagaacgtccccacaatcggtgtcattgccgttgtcttagccacacatctgtgcgatgaagtcagtttggcgggttttggatatgacctcaatcaacccagaacacctttgcactacttcgacagtcaatgcatggctgctatgaactttcagaccatgcataatgtgacaacggaaaccaagttcctcttaaagctggtcaaagagggagtggtgaaagatctcagtggaggcattgatcgtgaattttgaacacagaaaacctcagttgaaaatgcaactctaactctgagagctgtttttgacagccttcttgatgtatttctccatcctgcagatactttgaagtgcagctcatnnnnnnnnnnnnnnnnnnnnnnnnnnnnnnnnnnnnnnnnnnnnnnnnnnnnnnnnnnncctatttatttgaggtcagtgtttgtttttgcacaccattttgtaaatgaaacttaagaattgaattggaaagacttctcaaagagaattgtatgtaacgatgttgtattgatttttaagaaagtaatttaatttgtaaaacttctgctcgtttacactgcacattgaatacaggtaactaattggaaggagaggggaggtcactcttttgatggtggccctgaacctcattctgggttccctgctgcgctgcttggtgtgacccacgggaggatccactcccaggatga

SEQ ID NO: 189745 - DNA, 1465 bp, Homo Sapiens
ttgggtggccagggatcaggcagcggctcaggcgaccctgagtgtgcccccaccccgccatggcccggctgctgcaggcgtcctgcctgctttccctgctcctggccggcttcgtctcgcagagccggggacaagagaagtcgaagatggactgccatggtggcataagtggcaccatttacgagtacggagccctcaccattgatggggaggagtacatccccttcaagcagtatgctggcaaatacgtcctctttgtcaacgtggccagctactgaggcctgacgggccagtacattggtatgtccgaccaggtggaggctttgtccctaatttccagctctttgagaaaggggatgtcaatggagagaaagagcagaaattctacactttcctaaagaactcctgtcctcccacctcggagctcctgggtacatctgaccgcctcttctgggaacccatgaaggttcacgacatccgctggaactttgagaagttcctggtggggccagatggtatacccatcatgcgctggcaccaccggaccacggtcagcaacgtcaagatggacatcctgtcctacatgaggcggcaggcagccctgggggtcaagaggaagtaactgaaggccgtctcatcccatgtccaccatgtaggggagggactttgttcaggaagaaatccgtgtctccaaccacactatctacccatcacagacccctttcctatcactcaagccccagcctggcacaaatggatgcatacagttctgtgtactgccaggcatgtgggtgtgggtgcatgtgggtgtttacacacatgcctacaggtatgcgtgattgtgtgtgtgtgcatgggtgtacagccacgtgtctacctatgtgtctttctgggaatgtgtaccatctgtgtgcctgcagctgtgtagtgctggacagtgacaaccctttctctccagttctccactccaatgataatagttcacttacacctaaacccaaaggaaaaaccagctctaggtccaattgttctgctctaactgatacctcaaccttggggccagcatctcccactgcctccaaatattagtaactatgactgacgtccccagaattttctgggtctaccacactccccaaccccccactcctacttcctgaagggccctcccaaggctacatccccaccccacagttctccctgagagagatcaacctccctgagatcaaccaaggcagatgtgacagcaagggccacggaccccatggcaggggtggcgtcttcatgagggaggggcccaaagcccttgtgggcggacctcccctgagcctgtctgaggggccagcccttagtgcattcaggctaaggcgcctgggcagggatgccacccctgctccttcggaggacgtgccctcacccctcactggtccactggcttgagactcaccccgtctgcccagtaaaa

SEQ ID NO: 189746 - DNA, 1543 bp, Homo Sapiens
actttgtacaaaaaagttggcttacctagagatctaccaggagaaggtattagacctcctggaccctgcttcgggagacctggtaatccgagaagactgccgggggaatatcctgattccgggtctctcccagaagcccatcagtagctttgctgattttgagcggcacttcctgccagccagtcgaaatcggactgtaggagccacccggctcaaccagcgctcctcccgcagtcatgctgtgctcctggtcaaggtggaccagcgggaacgtttggccccatttcgccagcgagagggaaaactctacctgattgacttggctgggtcagaggacaaccggcgcacaggcaacaagggccttcggctaaaagagagtggagccatcaacacctccctgtttgtcctgggcaaagtggtagatgcgctgaatcagggcctccctcgtgtaccttatcgggacagcaagctcactcgcctattgcaggactctctgggtggctcagcccacagtatccttattgccaacattgcccctgagagacgcttctacctagacacagtctccgcactcaactttgctgccaggtccaaggaggtgatcaatcggccttttaccaatgagagcctgcagcctcatgccttgggacctgttaagctgtctcagaaagaattgcttggtccaccagaggcaaagagagcccgaggccctgaggaagaggagattgggagccctgagcccatggcagctccagcctctgcctcccagaaactcagccccctacagaagctaagcagcatggacccggccatgctggagcgcctcctcagcttggaccgtctgcttgcctcccaggggagccagggggcccctctgttgagtaccccaaagcgagagcggatggtgctaatgaagacagtagaagagaaggacctagagattgagaggcttaagacgaagcaaaaagaactggaggccaagatgttggcccagaaggctgaggaaaaggagaaccattgtcccacaatgctccggcccctttcacatcgcacagtcacaggggcaaagcccctgaaaaaggctgtggtgatgcccctacagctaattcaggagcaggcagcatccccaaatgccgagatccacatcctgaagaataaaggccggaagagaaagctggagtccctggatgccctagagcctgaggagaaggctgaggactgctgggagctacagatcagcccggagctactggctcatgggcgccaaaaaatactggatctgctgaacgaaagctcagcccgagatctccgcagtcttcagcgcattggcccgaagaagcccagctaatcgtgggctggcgggagctccacggccccttcagccaggtggaggacctggaacgcgtggaggggcataacagggaaacagatgggagtccttcctgaaggcaaacatcctgggtctcgcccccggccagcgcctgtggcgcctccctgaccgtcgtctccctcactccgccttttcaattttggtataaacccc

SEQ ID NO: 189747 - DNA, 799 bp, Homo Sapiens
tttgtacaaaaaagttgggtcatgtattccccttactgtagctttctggctgcttaatagctggctctggtttcgccgctagaggtaacatcagccctcaaaaatactgtctcaacagctggaaatataaaagatttgcaaacttctttgtttctgtctctgcattgtatgccattttatagtccacaccctgaaaatgtatttcttccagaaagtctggaggaaggacctatatttgtagaagtaaaggtatattctgtcactcagctgtattcacgtctgagcagttctgcagtaacacctgcttaaaattctccctttgcatgttttgtaaataggctccagttttgttttttaaaaggaatttattttttgcctcatcagtccacccaactgattctgaatgggagagagtctgtagagaattgattcagaaaagtgtctgtgaaagaaaaacaattattttgtcctgtttctcaaacagtgttaagcagttttgttaatagacatttttgcatcgacacttcaacattaacactttcaaagtcatggtctggtgccagatttaagaaactcgaaccacctaatatttcataaccttcttcattaggtacttgtacagattaatttctaacattgcagcagtttcatatgtgtgcaatatgtgcattctttcattttagttttgcacttggttttcttttataaagtacgtttttactcagttcatgcgtgaacaatttaaaaaacgacagaataaggtacaaatgtagtgtatttaataaactgtcaaccaaag

SEQ ID NO: 189748 - DNA, 1585 bp, Homo Sapiens
  misc_feature (541)..(551): n is a, c, g, or t
  misc_feature (1475)..(1483): n is a, c, g, or t
ttggaactgctttctcagataccttaactcccgagaagagagtccttgtgcacagaacttgtgggagcctccatccgctgctctttacctttggatacagtgtgcaagtttcatgacagaatcattaagataatcaaattgtcctaattctggtgcgattcatggatatactggtaaatttaggcaaagtgaaacttatcagcgtagtttctgttctttaaaataaattggaaattagagactaagcacaattagtctataaatgttctataaatcaaaaacttacctcttgcactatcatgccttgaaatttactttttcaaagggaaacaagtttagcagcagccttcaaagaacttctttctatgatgagccaaattcatctttgccagaaaagaaattttgataattccaagaagcctgattagaacaaatcagatataccttctcttgtctgcatgactttgtgagataaaagagagggcttccaacttttttctactagcttgatatgtattatcacttaaaatggttgcctttnnnnnnnnnnngtagagatactaattaccagtaagtaatcatccaaataaatacgtcataaaataaattaattattttttctttgatggattacagtgactactgtgttgcactggcacatttatggtctctgttctggaatcttggaggacacacagcagtggagaacagaaggagtgagttttataatgaacagattccagacacggtaggtttagctgagttcatacagaggagatataactcatttagatcttctgacaaatcctagtgttagttttatctgtggaggaaagacatttaataataaactgtttgggaatcttggtgaataaagattcattttcaagctgaataaccatacttattttattttaagttgccatttggggaataattgcagtatgtgtagagactctcttgggatgcacttatatttttatttaatgactacttgttttctagttttgcccacaacgtctgaaaccactaagacattcaggagcatgttgagcttctggtttggaaacagcaagacccaccatttatgacaaggacagccatgaggttaatacttggagtttaactgccttccctttgaactagttaaaatctgtaagaataaggaagttgttgaaggcttaaaatctgggttctgaaaaagtagtttcagtttataggatacacatttactcactgagctccagttccaatactaaattagacagtatcatatagacggaaaatgaaatgctagaactgccgttctttggatcgccactctatgggggtctgtcttttaactactctcctggttatgttggccttacaccactgccatttgatttaaaaacgctgcagacactttatctgcaaatgtgttccagttgttatcagctacctactacgcagcttcagcgccagtgtgaatttannnnnnnnnaagtgccattaccgtctcctctgttcagattttgacattcaggaaaatatttttattttgatgccatactgaaatctacaatgtatatctgacaaagcagtt

SEQ ID NO: 189749 - DNA, 1014 bp, Homo Sapiens
ttggcttggcagtagcagagagcactgaagttcacatgcaagttctaatctaaagttaagcagtctcttatttgtttcgggactctgatttgactctttttctgatgctttcagcatgtctgcagcctgttctcctagcctgctgcttggagtcaggttgagcatcagtgagatgaagacagtaccttttcctctcacattggcagaatagcacgcactagatgcctgaccttgagctctagtctcccctttaaatcttaccttggcagtaacacattattcctcattcaataatttcaatgctgaaactgaactctattactaatgccttccaatcagagttcctgatggggatgcctgtgggatggcccacacctgggggacctggcagatggggtgagttgggtaaggaagatgatgcttagttcctgatagatgctacagatgtagtttggcatttcagtttttgtccagtttgattttcactggggtttgagtcacagcaagctgtgtatgaacttgtgttttgtggtgacacattaataatcaaattgctaaaaccctgaatctgcttattcttcagcttcacctctgcactaaccccttacccttatggtacgtcaggattttaactagtactgctttgttgactttgggaaatggtgccactcaaaagcaacttcctaacttgaggaataactcctttgtagtttactttctggtactggttggtgccttgtattgggatacagctatattcttagctcaaatgtcctctttttgagagcaaagtagttatccaatggtgagacgagaccctgacgctcatagaggccattccttcctgggtgtcggaccagggctctgtgtcagggaaaaccttctgggtggactttgtaagaatccagtttccaacgttagattcacatccttaatcttgcagagactagaatttcacagctcgctttggaacatattccaattcaaccagttaaaatcagaggaccaagtcgt

SEQ ID NO: 189750 - DNA, 1147 bp, Homo Sapiens
gggttcagatcagccttccattggaggcgaggggaggcagggcaaagggcatgtgagaggtagggctgccctcccaggagccttcccctttccctaggagccagtcaggatgggggaggaaggcagaggggtcctagccagctgtcacatagaggaataggggctgggagtggggatgacaagaagtacaaagaaagagaaagtttggggagatggataacaagctcagctgtgtcagtgacgtggaggggaggtatggtgggggaccagccatggccctatccaaccccaggctccacaggccccaaattggctttgcaaatccaaacattttaaggaagtggtttagggatggaagagaaacacggtagaggtctgtgctgtggattttcatctagggtggtgggaacaccagagatgtctcctctgccattgttttagttggctcctggacctcatcccagcagagggagggtgactgtcagcaggtcagtcccaccgccactgtccccctcgcagtgggcctctgtgtctcaggcctggccaggctccctgcccctcagagctcctcgtggacccgctcctcgtcctcatctgacttcagcttgagctcgtcgactgtgatcttgccgtcctggttgcggtcctggttctggaacatgtctcctatggttttctcagggtcctgcccaggcatgaggcgtcctttgccctcactcacttgagccttgatgaaggtggagaactcctccggagggacctcgccatccttgttgaggtccatgtcttcaaacaggttggcaggagggtccttgtgccacacaaacaggtagcctgtgggcagcccatcctcccgggacaccagctccacctcaaacagcagcacagcactgcctgggactccccgggctccactctccccgtgggccaggtgcgggggcacgatgagctgccgcctctctcccacacacatgccctgcaggcccgtgtccaggccttcgatcaccttgttggccccgagagtcgcctcctggggggccccgtagtcatgcgaggtgaacagctgggtgccgtccagcaaagaacagttgtaatggtatcgaacaaagtccccaagcttggtggtctcattgcaggtctcagccaa

SEQ ID NO: 189751 - DNA, 1513 bp, Homo Sapiens
ttggctgtcactccgggcacctcgaacctcgtcttcacctatcctagcgtcctggagcaggagtcacccgcatctccctccgaatcctgctccaaggctcaccgcagaagcagtagcagcggggaccaatcatcagactccttgaactcccccactctgctggctctgtaacccagtgcacctccctccccagctccggagggggtcctcctcgctcctccttcccagggaccagcaccttcaagcgctccagggccgtgagggcaagagggggacctgccaccagggagcttcctggctctgggggacccaggtgggacttagcagtgagtattggaagacttgggttgatctcttagaagccatgggacctcctccctcattcatcttgcaagcaaatcccatttcttgaaaagccttggagaactcggtttggtagacttggacatctctctggcttctgaagagcctgaagctggcctggaccattcctgtccctttgttaccatactgtctctggagtgatggtgtccttccctgccccaccacgcatgctcagtgccttttggtttcaccttccctcgacttgaccctttcctcccccagcgtcagtttcactccctcttggtttttatcaaatttgccatgacatttcatctgggtggtctgaatattaaagctcttcatttctggagatggggcagcaggtggctcttctgctggggctgacttgtccagaaggggacaaagtgcaatacagagccttccctaccctgacgcctcccagtcatcatctccagaactcccagcggggctccctgagctctcaaggagatgctgccatcactgggaggctcagaggacccttcctgcccaccttcggagacggcttctggaggaacggcttggccagaagacagggtgtgagtgagacagtggggcacaggttgggtttgccaaacgcctaattaccaggccaggaagcatgccaacaaagccacacgggtgtcctagccagcttcccttcacctggtgtcttgagtagggcgtctcctgtaattactgccttgccattctgcccctggacccttctctccggaccagggaggcgtccctccctaggagccacacattatactccaagtccctgccgggctccgcctttcccccaccctggctctcagggtgacgccacccacagagatttaatgagcgtgggcctggaccttccccagatgctgccaggcagcccctccccaagcctcaaagaagcatttgctgaggatggagaggcaggggagggaggcgggaggccgtcactggagtggcgtctgcagcagctgctgccccagcacccgctcagcctgtcctggctgctcacctccccgcagggcaccgggcctttcctgccctctgtggtcatctgccacctgctggatcaagtgctttctcttttacactcccctgtccccaccccagtgcactcttctggcccaggcggcaagcaagctgt

SEQ ID NO: 189752 - DNA, 2223 bp, Homo Sapiens
  misc_feature (1767)..(1784): n is a, c, g, or t
ttggcgcagcggtggctctgcggccgctggagtaaacactgcctttgttccctagcgcctcgtctttcgtcgccccgtgccctcacgccgccgggctctggccggcccgccctcggtccttgaaccccatttcggctcgtgccgtgcggatgcagctgccgggcctgggtttgggcattgagcgggaggaggaggaggagcggcggcgcctgggcggcatgcgatggggaactgctgcagcgagtaggcggcggcggaggatccaagtattttagaacatgctcaagaggtgagcacttaacaatagagtttgagaatctagtagaaagtgatgaaggggagagcccaggaagcagtcataggcctcttactgaggaagaaattgttgacctaagagaaaggcattatgattccattgccgaaaaacaaaaagatcttgataagaaaattcaaaaagagccttacaagaagagaagttaagactagaagaagaagctttatacgctgcacagcgtgaagcagccagggcagcaaagcagcgaaagctcttggagcaagaaaggcagagaattgtgcagcaatatcatccttccaacaatggagaatatcaaagttcaggaccagaagatgacttcgaatcttgtttgagaaatatgaagtcacagtatgaagtttttcgaagtagtagactctcatcagatgctacagttttgacaccaaatacagaaagcagttgtgatttaatgaccaaaactaaatcaactagtggaaatgacgacagcacatccttagatctagagtgggaagatgaagaaggaatgaatagaatgcttccaatgagagaacgttccaaaacagaggaagacattctacgggcagcacttaagtatagcaacaagaagactggaagtaatcctacatcagcctctgatgattccaatgggctggagtgggaaaatgattttgttagtgccgaaatggatgataatggaaattccgagtattctggatttgtaaatcctgtattagaactgtctgattctggcataaggcattctgacacagatcaacagactcgatagggtaaaattgtgtgaccttgtttatcagttatgaccaaatgttaaaaaccaactagaatgtataagtgattgtgcttagcctttttgtaagggagatgtgtaagaaaccatgttgtaaatgcttattttattacaaaggagtagggatgataggatctgaattgatacagaattaagtgcaatttcatcatctgccttctgcttttcaagaccaatttaatggtcctgtcatgttactgattaaatttactttgtcttgtctttatagcatttctgtttactatggtagatttccactttcaatttttaaaattaattttactttgaatgatttatgaagcctatttcattgtctaactatgaaaatattaagacttttttgttaattctcagccgatgtgaaggaagcatgaggagggatcgtcagattcagatttagaatagtgttcccgtttccagcattatttatttctatgacttctttggattttattatctaatagtaagtacagttgatgtgggtagatgactctaagaaatgctgaagtatcggcattacatgtgtttatttacatgtcctagtatgataatgttgattcaatctgaacaaaagataatataaaaataacccttcagagtttggacatttcaagttggtaataataaaaaataatatttaagaagnnnnnnnnnnnnnnnnnnttagttttttccacttcattttacatgccactatattgactttaattgatatacagtattaagtttttaggtgccattatttttaaaaaattctatatttccaatgaacgatgttagattttacacagaacatattctctgcatgatttcagaaaagaaaatctaaaaagggtaatacgggtattttcaaataaaatcctttctggtatgaaaggctccattgatttttaattaagccttcctttaccttgtagtacaagggtgctttaatggggatagaactaagcatatcaaatctataactgcatttggtgctagacaattactgttctttcccctaaatgtatatgtcaattacaagcccaggataagaaacactccataattgcctttccttgatttctgctgaggattggtatgattttattaacccaacctg

SEQ ID NO: 189753 - DNA, 1197 bp, Homo Sapiens
accactccttggagtgggagaagtcggggctggtgcagtttccacctctttaggccaggcctcactcaggtacttggtggtctcgtgggtgctgtccaggtgatcatgctgcaggtggtcccggggccgctgctctgccggccccccggggttgatttcccagccatctgggggctccatgggcagcagggtgctgcggccatcttcccataagcctgccccgtcatcgtagaataggaggcttcgggagggcatctggctggccgtgtagacgccgtctgcggccagggggtcttccttcacagtctgggagccggaggagaactcgggaaggcagggcacgagggagcccagcaccagaacaaagcacaaggctgccaccatgaggcaggtcccagtctgggtggcggccatcttgtaaggtctggagatcttgttggtgaccagagtctggagtttctgcagctgctggagcagggtcctgttggcattctccagggtctccaccttcttccacagttcattgttctcagatgtaaatgtctccaccttcttttctagacactccacatactccttcttcttacgacggctctcctgggctgagatcttgttcttgattttcctccggactctcttcaaggccttctcctcggctttggtgagggggagttttgtggggatggggtagccctcagcaatcagggtccgcttctcctcctctgtcaggagcagtggccctgatgtcccctgtaatttgtgaggggcagtgaggagtggggaggtggagatggccgtggaggagcgcgccatgggcctgacagggctggaggggggcagagagcggggactctgggagccgtcgctgtcactgccatggctgctggggggcgtcggaggcatctgcaccaggtcctccggtgtcactttgaggaactggttcacctccagaggctctgctttgatcactggcagctgagtcatctctcccggggcctggtgggggatgggcagcctggacaaggggctgaggcccagcagcggggtggtggccatggcggccgcggcagccatggccgagggggcagccagagggtccacgggcagctccgggctctgctcctgcttcaccatgatggagcacagtttgtgtcccagcgcccatgctccatgctctgcatcttgggtggtgtccaa

SEQ ID NO: 189754 - DNA, 1115 bp, Homo Sapiens
taaaaattaggcagagacttgaggggataaggataagagaacaggataagagagcagaaagacgctcaggagagtagaaagacactcaggagagaacaagagatcctgcccattcttattatgaggatgaactggctacaggacatgagtagcccaatcagatctaacttaaataccagcctctccaaaaaagtttcccaataaagatcccctaacaattatttactggacaaaaaaggttgatatttctagaagagatgatctctttgacacaaaagacccaacttaggacccaacttaatacatagatagcaccatgacagagctgggatccattaagacatgactgtagacaataccatctctaggaacacactgtcactcacacatggatgtgttgttttatggcctaaagatgttgtagacggttctcacataaatttcatcagggggaggcttcttcttgctgccaggttcaaggaatctcttaattgtagggatattacttagtttcactgtgtattcctggaggaaaggaaatgcagacaggatattaggaattttctcttctagagctaaaatggtttggagtaaaatcacatctgcaaggctcagctgattaccaacaagaaagctttgtccgtgaccccttaaaatcttttcaaacacaggaaagtatctaattatagccttctgggccatgttaaccacttccttttgctgatcatctggttttaagaaaggatgcatgataagcagttccagcagatccagtgtcccctccacgtacatgtcaatcagggttctctccttgaggttcttgccaaagagattgtgcttgtctgctatgtagtggagaatgcttcgggtctgtaccaacttcatcccgtcaatttcaaccatgggcacttgttggaacagcaggtggttaccatcctgcaacttgtacaactgttcttttgtttccagaaattcttcatcaaactcgactccggcggcagctaaaacccatctcacggactccatccggcctcttccgttgggatagtggagcttgggccttgctgccatgatagcttttcaggctttctggagtccactcggaggcctgccaa

SEQ ID NO: 189755 - DNA, 830 bp, Homo Sapiens
ttgtacaaaaaagttgggtatgacaacattagaaaaacttaatgaaagaatgtggctttcttcagtcaaagcatttttattatccacgtgatggctaagtggataatttaaaagcttagtaatgtctggtcattcactgatttgtgatgtcaataggatggcaccttggaaagaaaaatgaagaacaactttatcaaggaagctagtatttaaaaacaaattcatgagcaagctgcaaatgagaatgtgttatatgccaaggaacaatgaagtagaatataatgtatactaagggatttcaagttctcagaatttttgagtagttgcttacgtgaagctcaagatacctgtagaaagaaatatggtatatttgtatagtttttaatagaaagatctatgtttataaaccagcacttggccaaaaacaaaattgtaaaggaaatttaaattctggagaattctacagggttgctctaagaactgtcttctcagcagttgatccagctgtacggaaatttagggtatttaaacttttaaaggatcatgagctgtttcttgggcgatgaatgttctcaatcagaaaactgacagtagaaatctcacttctggggaaaacagttgtggaattcttacttcattatgaatgtatttaaaaaacaaacaccaaataattggaatatattgcaggcattaagctcattaaaaacaaactggcttgcagaagggtccgatgtgccaagtgatcatgattctgctggaaagaggattttaaatattgtgggagttctcccaccctaagtcttacataatgccaccagtccatccaaaac

SEQ ID NO: 189756 - DNA, 971 bp, Homo Sapiens
ttggcaaagaaggtaagggcagtgagaatgatgcatcttgcattccttgtgctgttgtgtctgccagtctgctctgcctatcctctgagtggggcagcaaaagaggaggactccaacaaggatcttgcccagcaatacctagaaaagtactacaacctcgaaaaggatgtgaaacagtttagaagaaaggacagtaatctcattgttaaaaaaatccaaggaatgcagaagttccttgggttggaggtgacagggaagctagacactgacactctggaggtgatgcgcaagcccaggtgtggagttcctgacgttggtcacttcagctcctttcctggcatgccgaagtggaggaaaacccaccttacatacaggattgtgaattatacaccagatttgccaagagatgctgttgattctgccattgagaaagctctgaaagtctgggaagaggtgactccactcacattctccaggctgtatgaaggagaggctgatataatgatctcttttgcagttaaagaacatggagacttttactcttttgatggcccaggacacagtttggctcatgcctacccacctggacctgggctttatggagatattcactttgatgatgatgaaaaatggacagaagatgcatcaggcaccaatttattcctcgttgctgctcatgaacttggccactccctggggctctttcactcagccaacactgaagctttgatgtacccactctacaactcattcacagagctcgcccagttccgcctttcgcaagatgatgtgaaatggcattcagtctctctacggacctccccctgcctctactgaggaacccctggtgcccacaaaatctgttccttcgggatctgagatgccagccaagtgtgatcctgctttgtccttccatgccatcagcactctgaggggagaatatctgttctttaaagacagatattttttgg

SEQ ID NO: 189757 - DNA, 1303 bp, Homo Sapiens
  misc_feature (869)..(892): n is a, c, g, or t
ggaaacaatagagaacagcacagcgcaaaacaaatggctgcctttcattaaccatggacatgagaagtactacaattgccggtcttggtgggtttgaaggtgcatttacagatgcaaagtagtcttggtttacttggcagcctcgaataacttctgatacagtatttatggtctcagtcaggatatcagcaggaaccccagtagccattaggatagtacaaagctgctgcaataacccacactggaacatagccttctggcagctactggtagcaccaggagggttggtgggagataccaatacacgaacaagctgtagcattagatgtagattggtcactttctgtgcagaccagccagaattttcatctccaacttcaaaccaaggtttcatacgttgaatatatgagccttctttaaaaaaattttgattggagttgttgttttttaataagttttggagcaaaatcaaacaatcttcaactactatacctccatcactgttcccctcctctgaaataatgtccagtagtctctcgaaagcattttcaaaagcaacaattttctggattgcaccattgcttcttgttagtgcctgcagtagtaagacgccatcattacgtataacttccctggaatccgctagtaagtccatcaatcttgaaacacccataggactgactaaaataatttgttgcacctgaggccctagttgttttaaaagagaagtaagaagcttcacaccaggccagcggacatggaaatcaaactcctccaataaagataacagaagagtgacattttcctgctgcttaatgaaaatttctgtaaattggcttcccaaatcttcactctgtcttgtggaattnnnnnnnnnnnnnnnnnnnnnnnnattagatattatattatatagtgtgtccaaagcataacctattatttcagaatctgaacgatctgtttgtaaaacatgaataagatgttccatagcttgtatacccacttccaagcggtatttcttagataatgatttgagagcacgaacagcatttcttcgatcatccaataaagtagatgaagctactctgtcacaaagcttttgaatcgtctcggcttctgtgtgctggggtccggcactctgaccccccattaccccgcggaggaaattcatcttgccgttcagccaccaggtttaccggcccctccggaaaaaaaagaagacaacttcccccgccctccgcagggcctggcccccaatcccgcactctacacactcctactgctgccaccaccgcctccaacccaa

SEQ ID NO: 189758 - DNA, 1315 bp, Homo Sapiens
  misc_feature (167)..(238): n is a, c, g, or t
ttggatgcttttgtttttaacaaaagggtttcacactttgaaaattttttgagcaactagttgttgatgttgagagcagttgatccataaatctggtgtgtgaatgtttcaagcagaaattaatttaaatgtgtgtttaggaagtacttaacttggaagatgtatcnnnnnnnnnnnnnnnnnnnnnnnnnnnnnnnnnnnnnnnnnnnnnnnnnnnnnnnnnnnnnnnnnnnnnnnnatgatgcagaatgatagcatcagatgtctgcagctgaaaaaaatttactactatgaacccccaaaatattcagttgcaagaaaatttgattctaaaattattcatggtaggatacgtaacacaccccttcaaaacttttaaaaaatacatttagcacatgtgctatgaaagcatacgtacaaagagaaaggggaaagtgatttataattcctacaacagaggccaagaaatagattaaaatattttcaagaccccaaaataatgtattatggttgggaagtcagtagaacactggaataggtgaagacctgacagtaatttttgtcttaagaatgctttctttaggacagaccctttaacctcacctctgtgcatctgtttttaaaatgattatatttgcctctgatatttgaaagcacttttgtagttttgatgatgaaaaatatattaaacgtgcatattaccattatttaggaaataattccttatatactgtgataaatcattgctgttacatacagtaacatgccttaattacatttaatgccttactgctttatgtaagtaaatccaagtttcagaattaaaaataagcattatttcatatggtccaatcagattcgttacataggctatataaatttgtctccattttcaccatcaagcacaaataattgggtcaaaactgcctttgaggtctgttgaagaaaatggttcattaagcaaaaaagagtagaggtattttatattagcagtaacagacaaattatttagtaatcccttaacctctgtttttcaaagagaaaatatccaatttagacttttttcctgatctctatatatagcatcaaattgggaaacaaaggccaaaggtgtatagattgcttgaaagggggtggtagtgcctctttttaagatctgttgagtcggctacagtctggctaaataagaagcatttgcatactgattccatcatttaatctttaaaagtatgtgttttaaaaatgtaaccagaatgattcttcaatagaaaatgagatttggtggagtctgggattgcctgttttgtatataata

SEQ ID NO: 189759 - DNA, 869 bp, Homo Sapiens
ttggggaggtagaattgggctatttgctgaagcttcttggtggcccttgctagcccaggaagaaacttacattttgatttttttgtaccatggctttggttcacaaattgctgcgtggtacttattttctcagaaaattctctaagccaacttctgccttgtatccatttttgggtattcgctttgcagagtattccagtagtcttcagaaaccagtggcttctcctggcaaagcctcctcacagaggaagactgaaggggatttgcaaggagatcaccagaaagaagttgctttggatataacttcttctgaggagaagcctgatgttagtttcgataaagcaattagagatgaagcaatataccattttaggcttttgaaggatgaaattgtggatcattggagaggaccggaaggccaccctctgcatgaggtcttgctggaacaagccaaggttgtctggcaattccgggggaaagaagatttggataagtggacagtgacttctgataagacgattggaggcagaagtgaagtgtttttgaaaatgggcaagaataaccaaagtgcactgctatatggaactctgagctctgaggcgcctcaggacggggagtctacccgaagtgggtactgtgcaatgatatccaggattccaaggggtgcttttgagaggaagatgtcttacgattggtcccagttcaatactctgtatctccgtgtacgtggggatggtcggccttggatggtgaatatcaaggaggacacagatttcttccagaggacgaatcagatgtatagttacttcatgttcacccgcgggggaccctactggcaggaaggtcaagattccctttttcccaatttt

SEQ ID NO: 189760 - DNA, 1213 bp, Homo Sapiens
ttggctacatttgaagatttctggaggatgatttgggaacaaaacactggaatcattgtgatgattacgaaccttgtggaaaaaggaagacgaaaatgtgatcagtattggccaacagagaacagtgaggaatatggaaacattattgtcacgctgaagagcacaaaaatacatgcctgctacactgttcgtcgtttttcaatcagaaatacaaaagtgaaaaagggtcagaagggaaatcccaagggtcgtcagaatgaaagggtagtgatccagtatcactatacacagtggcctgacatgggagttcccgagtatgcccttccagtactgactttcgtgaggagatcctcagcagctcggatgccagaaacgggccctgtgttggtgcactgcagtgctggtgtgggcagaacaggcacctatattgtaatagacagcatgctgcaacagataaaagacaaaagcacagttaacgtcctgggattcctgaagcatatcaggacacagcgtaactacctcgtccagactgaggagcagtacattttcatccatgatgccttgttggaagccattcttggaaaggagactgaagtatcttcaaatcagctgcacagctatgttaacagcatccttataccaggagtaggaggaaagacacgactggaaaagcaattcaagctggtcacacagtgtaatgcaaaatatgtggaatgtttcagtgctcagaaagagtgtaacaaagaaaagaacagaaactcttcagttgtgccatctgagcgtgctcgagtgggtcttgcaccattgcctggaatgaaaggaacagattacattaatgcttcttatatcatgggctattataggagcaatgaatttattataactcagcatcctctgccacatactacgaaagatttctggcgaatgatttgggatcataacgcacagatcattgtcatgctgccagacaaccagagcttggcagaagatgagtttgtgtactggccaagtcgagaagaatccatgaactgtgaggcctttaccgtcacccttatcagcaaagacagactgtgcctctctaatgaagaacaaaattatcatccatgactttatccttgaagctacacaggatgactatgtcttagaagttcggcactttcagtgtcccaaatggcctaacccagatgcccccataagtagtacctttgaactt

SEQ ID NO: 189761 - DNA, 1641 bp, Homo Sapiens
ccaaaatccagcaggaacttcacgatgtgatggtggccggcgcagacggcgttgtgcagtggggtgatccctcgtcgttgggcttgctgggatcttccactcatagatgatcctctgcaccagatcgaactctcttccagagacgcgtctaggagcagtgccagggggttaaaccggactctcagcccgtgccccgtccgctccgagttgggcttcttcaagttggtccgcttgttcgtggaggtggcaggagggtggctggcagggggaagaggtgctggagggacctgctcttcccctggagatggggcctcagccacaggactcgggatctgctccgtggtggggaccgtggccacgttgttgttattgtcctctgccggctcggcagtttggtgggtggtttggggacagatgagctcctctggttcgggggaaggtaactcattatcattggcatctgatgacggggcaggctcagcggggagtggggctgtgggctgggcaggggggagctcttccaggtttccattggcattggtgtttccattgtccacatcggccaaggtgcccatgaagtcctgggaggggctgggctggtagaaaggggtgccctccatgccaccggccagggtgttgaagcgctggtacagcagcttctggatgttgggcccgccggggccctcgggctctgtgatggagctgcgctttttcaggggccggggcgcgttggccagcttcctgcggagggcctccaggtctgcatcactctggtagcgcagtggcgaatgcacgatgggcgtgagcttggtggggctgagtggccgtggcaggctctccacggtgctgccatctgcgggggcggcggggccatcctgctcaggctctttctcagtactttctgaaggtggctgaggctgtggtgtgcccgtggacagtgacccgtgaagaaacggcagcggcgatggagaggttgaacccgaaggtaaaacgggcttaccatacactgctttaactgacttatttaaggcgctgtgtgctgccggctggtaattcttaggtggtgtggcttgctggaggtacatggagtatatggaacttgaattcactgtctggggtcctttcctgggagactgtggccttgaccctttatcagccaggaaaggcctaatggccactgtcagtgggagttcaggcttgctgtccccagctggaaatgcaggtggtcccgctggcgggtacgtgggacttggcggtacggaaatcctctgctgaatctgttgtgaggagcctggctggggggtgctgcctgtggcgggcagcagggtgggcctctgtcgacttggcaggcctgcactgggcctgggcaagctgccttccttcctcctttccagggagcttgtcgacccaggacccagaggtgtaggacttgggtatgtcccatagcttggaggcagctgcttgcctacacccgggatgggaggtggcactttaccaatctcgatgcccggcttctccgtgggtcccagtgctgagaagggcacaggctggctggagacagtgccctgcttgacagacccctccacgctcggatccttccagtctgcaccggccacctgcactggtttcacggaagaccaa

SEQ ID NO: 189762 - DNA, 945 bp, Homo Sapiens
ctttgtacaaaaaagttggtctccttttaccacaccaattggtcgaaaagatgaagcagatcttgcaaaatcagctttggccatggcggattcagaccacctgacgatctacaatgcatatctaggatggaagaaagcacgacaagaaggaggttatcgttctgaaatcacatactgccggaggaactttcttaatagaacatcactgttaaccctagaggatgtaaagcaggagttaataaagttggttaaggcagcaggattttcatcttccacaacttctaccagctgggaaggaaacagagcctcacagaccctctcattccaagaaattgcccttcttaaagctgtactggtggctggactgtatgacaatgtggggaagataatctatacaaagtcagtggatgttacagaaaaattggcttgcattgtggagacggcccaaggcaaagcacaagtacacccatcctcagtaaatcgagatttgcaaactcatggatggctcttataccaggagaagataaggtatgccagagtgtatttgagagaaactaccctaataactccttttccagttttactttttggtggtgatatagaagttcagcaccgagaacgtcttctttctattgatggctggatctattttcaggcccctgtaaagatagctgtcattttcaagcagctgagagttctcattgattcagttttaagaaaaaagcttgaaaatccaaagatgtcccttgaaaatgacaagattctgcagatcattacggaattgataaaaacagagaataactgaaactgaaattccatggtcaactgctttaaaattaagatgaagatacagtcatgaaattatctgaaaatgggtcatcacattaagtatttccttacttaaaatgtttggtctagccattacttaaaggggtggggaaaaag

SEQ ID NO: 189763 - DNA, 1722 bp, Homo Sapiens
cctgaggcccaggtcccccagttcccaccccgttctgcagcccacccctcagtcggccttgggcagggacttcctgtgcgaggggggcacgaggtgggggggcaggctgctgggcagctcgtagccgtcgagcttgatcttgatgaggtgcttggccagcgcgaactcctcctcatcaagcatgccgtcgcagtcgcagtcggccagcttccagatcttgcccaggacgctgttgggcagcttggaggtcaccatctccttcttggcgttgacacctgatatcttgccattgatgggcgacagagtgtagaagagctcgtcgtagacgggcttgtctttggccacgacccactcctcctcgtcggcgccctccttggcaccctccccgtagccctggttgaaggggccctcggtggtgccatcgaaggcgccgccctgcaccagctgcgtgggcgtgctcgtctcctcctggctgatgaggttcatgaggggcgagatcttgttgctcagcatgttgtccactgcctcgatcagcttgggcttcagcgagtggaatttggtgaagtcatagttctcaagctgttcctgcatagccttgacctcagggaagccccctgcagaaatctggtattctcgctgtagctgaatgtagatttccggtagcctgctgataagctctctcttcttgttttcctttccaaatacacttggcatctccttcttcaggtagctgatgatgtaggcatgcaccttggccagcctcgctcgcttgatgaggtcgttgagcttgcgcaccgctgccttctgggggaggctctggatgtctctgaagaggtcctgggcctcagcctcgaagagccggcggttgtccgtgttctgcaggggctgcgcccagaaggagccaatgtagacgcgcagtacctcgggcgtgttgatgaccttgcctagggaccacatgagggccccgtagacccgcatcagctgctgcgtgtccacttggtcggccttgttcagcacgacacggatcttgtcgtcctggccccggaaggccttgatggcctctgagaattcatctgagatgtccagcttgtgagcgtcaaagagcaggatgatcctgtccaccctctcggcaaaccactgcaggacctggcagaagtcatagcctcggctgatgcgctgcttctccccagaaaggatgccggggctgtcgatgacgctgatgctcttcaggacctgattggggagctgtgagcacatgaatcgattcaggaaagcgtttccaaagcgactgagctttctaaacggctttttggggtccacgactaaagcattccctggggtgctgccctcagtctctccatacatcacggcgatgaaggagtctgtggtgggctccggaccaatcctcatgcctgggaaatcctgctccagtaggtatctgatgaaggtggtcttgccggtgctgtactggcccaccagcaggatcatgggcttgttctcgaagtcggcgtcctccagcgcaggcgagtggaactcgtggaagcggtacgcctcctccagcggcagcaccttgcgcaggtagagcgagcgcagcccgcccgtcaccgtctgcaccgcgtccgcgccgccagcgcgttcgcgcccgcccgcctgccgccccatccagctgaacatcctgccgccagtccacgctcggatgggaccctgctccgggttcgccaa

SEQ ID NO: 189764 - DNA, 1773 bp, Homo Sapiens
ctttgtacaaaaaagttggctccggagtcatgagacccagctatggttcttccgatttgtggtgaatgctgctggctatgccagctttatggtacctggctacctcctggtgcagtacttcaggcggaagaactacctggagaccggtaggggcctctgctttcccctggtgaaagcttgtgtgtttggcaatgagcccaaggcctctgatgaggttcccctggcgccccgaacagaggcggcagagaccaccccgatgtggcaggccctgaagctgctcttctgtgccacagggctccaggtgtcttatctgacttggggtgtgctgcaggaaagagtgatgacccgcagctatggggccacagccacatcaccgggtgagcgctttacggactcgcagttcctggtgctaatgaaccgagtgctggcactgattgtggctggcctctcctgtgttctctgcaagcagccccggcatggggcacccatgtaccggtactcctttgccagcctgtccaatgtgcttagcagctggtgccaatacgaagctcttaagttcgtcagcttccccacccaggtgctggccaaggcctctaaggtgatccctgtcatgctgatgggaaagcttgtgtctcggcgcagctacgaacactgggagtacctgacagccaccctcatctccattggggtcagcatgtttctgctatccagcggaccagagccccgcagctccccagccaccacactctcaggcctcatcttactggcaggttatattgcttttgacagcttcacctcaaactggcaggatgccctgtttgcctataagatgtcatcggtgcagatgatgtttggggtcaatttcttctcctgcctcttcacagtgggctcactgctagaacagggggccctactggagggaacccgcttcatggggcgacacagtgagtttgctgcccatgccctgctactctccatctgctccgcatgtggccagctcttcatcttttacaccattgggcagtttggggctgccgtcttcaccatcatcatgaccctccgccaggcctttgccatccttctttcctgccttctctatggccacactgtcactgtggtgggagggctgggggtggctgtggtctttgctgccctcctgctcagagtctacccgcggggccgtctaaagcaacggggaaagaaggctgtgcctgttgagtctcctgtgcaaaaggtttgagggtggaaagggcctgaggggtgaagtgaaataggaccctcccaccatccccttctgctgtaacctctgagggagctggctgaaagggcaaaatgcaggtgttttctcaatgtcccctgacacctcccccccaggccattgaggagcccatgaggcccccttcccttttggcttttctctaccctcttcgcccacaccctttaatggggcctccaccttcctgcacggctccaagatgtgtgttggggagggtcgcctgggcaaactcccggtgactgcttttgactcttttgatctggaggcccgtactggacccggcatcctctgctaccttccgactcgcctttgttggctgctccatggctgactgaaccggctttaacctgcgtggcctgcgtcagcctgggcgctacaacttcaactctctcacactctttgtcagcactgtggagatgtttgacctgcatcatgggtcctgcaccatcttgccccccagcctgcgcatgatcgataccatgacacactttgtggtt

SEQ ID NO: 189765 - DNA, 1953 bp, Homo Sapiens
  misc_feature (117)..(125): n is a, c, g, or t
  misc_feature (1523)..(1532): n is a, c, g, or t
gtacaaaaaagttggatcattccaacactaaattcttaagtagttgcccaagggccagctcagtttatccttcggagagacaaggatatgcatgattcttaaccaggctatatgttnnnnnnnnnttggaaaatgcaatacattttttattatacaaactacagaatgagtatgcaagttttatttatcaaaatgtaatggatttttaaaggctgagaaattttccttatacctaccttttcagttattttaattataccaaattatcaactagaatagcttcatccatatgaaatataaaatgaagagacacctagctctatcaggcttaggattctttgaacttatttccactttaatttctcagtggaagttaagaggggtgagaaaacaaagaaggggaaaaactgacaactaacaaaaccagcaccacatcgctaggtggtgcttactaattaccttctcaggattttcctcagattgaaaagcttatgaggatttcttgggagtcttaataacctgcctgttagtacagagctttcctgatgatatttactcttgagcacatgtggttgtaaaaccttaactttctttctccaggagggtggtgatagaaacagatggtagtatttatgaactgatgttctcgtgaaatgttgagggtggggagaaaagactttaagggaggagagccatctattttgttcctaaagccacctctcagcagaatcgtcatgtttttctgatgcaccgctctgcttcatgcccaagatgacttgcgaggcaatctcaggagctgtggacttaaccattgcaaagcacactgtctttctcagcgttctctgcaagtcagtaggtgttagtatggttgcaaagttcactgtctcagcaaagttgaactgggctacctctctacagctgtttcctcagagggaaaaatcttgagaccagatggtggagctctggagtcagaggaaatgggtgtcttcagcacaaagctgctgcttttacttcagccacttctgacatttttacataccgagcctgagattgtgtgattatctcaaatcaaatcactttgatggagataaataatcaaaactgttttatagtcattgatttggtgagaacagtaatggaaaatggtgttgaaggacttctcatttttggagctttccttccagagtcctggctgattggtgttcgctgttcatctgagcccccaaaagcattattactgatacttgcacacagtcaaaagcgcagactggatggatggtcttttataaggcatttaagggtacactactgtgtttcactgaccatacatttttcttagcccctcaagtaatatagcacagagttatgaatgacaattcccctaaccattcctcttcatatctgcctcttccccttaccatcgtaattctccaaactggtcataaaggcactctgtgaagatattggggactgacatcttaagctctcacctggctgcagtaggaaaggccaaactgacgacnnnnnnnnnnttctttataaagatgatatggtaacatgtatctttgccctgggtctgggtgggtccagtcagtctcagatttacaagcatttaggagcctaggtaaaagctgctagtattcttttaaaagttatatttatgacttgcaatgatagaaaactccttccaattaaatggcattttataatattatgtgtgtacttcacagtgttaaaaataccctcatacgttattgcatttgatcttcacagaaagtgcattttaaccaatactctgggtgcaataaataatatgtagaaatttaagtcctccaattccagcatatccagtgagttttgacagtgtgtttatgtggaatgtttaacgatatacaattgtactttatataaattggttcatgttcttcttaatgtgacatgaaataattgtgc

SEQ ID NO: 189766 - DNA, 1028 bp, Homo Sapiens
tttgtacaaaaaagttgggcaagttacatatacatctataaaccctccaaccactacaaattaattcaacaacccagctccataagacgttcagtcagctgccctcggtccatctctgctcaatcaccttccagtggggacacccgcccattttctgctcaacaaatgatatctgtgtcacggccaacttctgcatctcggtcacattccttaaaccgtgcttcctcctacatgaggcatctgcctcacagtaatgatgcctgctctaccaactctcaagtgagtgagtctttgcggcaactgaaaacaaaagaacaagaagatgatctaacaagtcagaccttatttgttctcaaagacatgaagatccggtttccaggaaagtcagatgcagaatcagaacttctgatagaagatatcattgataactggaagtatcataaaaccaaagtggcttcatattggctcataaaattggactctgtaaaacaacgaaaagttttggacatagtgaaaacaagtattcgtacagttcttccacgcatctggaaggtgcctgatgttgaagaagtaaatttatatcggattttcaaccgggtttttaatcgcttactctggagtcgtggccaagggctgtggaactgtttctgtgattcaggatcctcttgggagagtatattcaataaaagcccggaggtggtgactcctttgcagctccagtgttgccagcgcctagtggagctttgtaaacagtgcctgctagtggtttacaaatatgcaactgacaaaagaggatcactttcaggcattggtcctgactggggtaattccaggtatttactaccagggagcacccaattcttcttgagaacaccaacctacaacttgaagtacaattcacctggaatgactcgctccaatgttttgtttacatccagatatggccatctgtgaaacagaaggtaagatcgccattggttatacataacagcaattcattttttttcctctgaagttgaacatgccaa

SEQ ID NO: 189767 - DNA, 949 bp, Homo Sapiens
ttggcttacgaagacacaagagagattgggtggttgctccaatatctgtccctgaaaatggcaagggtcccttcccccagagactgaatcagctcaagtctaataaagatagagacaccaagattttctacagcatcacggggccgggggcagacagcccccctgagggtgtcttcgctgtagagaaggagacaggctggttgttgttgaataagccactggaccgggaggagattgccaagtatgagctctttggccacgctgtgtcagagaatggtgcctcagtggaggaccccatgaacatctccatcatcgtgaccgaccagaatgaccacaagcccaagtttacccaggacaccttccgagggagtgtcttagagggagtcctaccaggtacttctgtgatgcaggtgacagccacagatgaggatgatgccatctacacctacaatggggtggttgcttactccatccatagccaagaaccaaaggacccacacgacctcatgttcacaattcaccggagcacaggcaccatcagcgtcatctccagtggcctggaccgggaaaaagtccctgagtacacactgaccatccaggccacagacatggatggggacggctccaccaccacggcagtggcagtagtggagatccttgatgccaatgacaatgctcccatgtttgacccccagaagtacgaggcccatgtgcctgagaatgcagtgggccatgaggtgcagaggctgacggtcactgatctggacgcccccaactcaccagcgtggcgtgccacctaccttatcatgggcggtgacgacggggaccattttaccatcaccacccaccctgagagcaaccagggcatcctgacaaccaggaaggtttggattttgaggccaaaaccagcacaccctgtacgttgaagtgaccaacgaggccccttttg

SEQ ID NO: 189768 - DNA, 886 bp, Homo Sapiens
ttggaaaaaatgtaattaactgtaaacttggaatcaaggtaagctcaggatatggcttaggaatgacttactttcctgtggttttattacaaatgcaaatttctataaatttaagaaaacaagtatataatttactttgtagactgtttcacattgcactcatcatattttgctgtgcactagtgcaattccaagaaaatgtcactgtaatgagtcagtgaagtctagaatcatacttaacatttcattgtacaagtattacaaccatatattgaggtttattgggaagattctctattggctccctttttgggtaaaccagctctgaacttccaagctccaaatccaaggaaacatgcagctcttcaacatgacgtccagagatgactattacttttctgtttagttttacactaggaaacgtgttgtatctacagtaatgaaatgtttactaagtggactggtgtcataaactttctccatttaagacacattgactcctttccaatagaaagaaactaaacagaaaactcccaatacaaagatgactggtccctcatagccctcagacatttatatattggaagctgctgaggcccccaagttttttaattaagcagaaacagcatattagcagggattctctcatctaactgatgagtaaactgaggcccaaagcacttgcttacatcctctgatagctgtttcaaatgtgcattttgtggaattttgagaaaaatagagcaaaatcaacatgactggtggtgagagaccacacattttatgagagtttggaattattgtagacatgcccaaacttatccttgggccataattatgaaaactcatgatcaagatatatgtgtatatatacatgtatctggct

SEQ ID NO: 189769 - DNA, 1105 bp, Homo Sapiens
  misc_feature (200)..(261): n is a, c, g, or t
atcgcgaccgtgactccggcgtcgtgggggcccgtccgcgagcttcgccaccgcctcaaggcccgctaccaggaccgccgggcgctcttcatcgctgggcgctggccgtgccgcctggtgcagtggcgggtccccggccacaacaggcttctccacctccttgcgggggcccaggtggtcccggcggcggtcccggcgannnnnnnnnnnnnnnnnnnnnnnnnnnnnnnnnnnnnnnnnnnnnnnnnnnnnnnnnnnnnnccgtaggcgtgggcggctgctgctccgggcctgggcacagcaagcggcgacgtcaagctcccggggttggcgcggttggcgggggcagtcccgagcgtgaggaggtcggcgcaggctacaacagtgaggacgagtatgaggcggctgcagcacgcatcgaggctatggaccctgccactgtcgagcagcaggagcattggtttgaaaaggccctacgagacaagaagggcttcatcatcaagcagatgaaggaggatggcgcctgtctcttccgggctgtagctgaccaggtgtatggagaccaggacatgcatgaggttgtgcgaaagcattgcatggactatctgatgaagaatgccgactacttctccaactatgtcacagaggactttaccacctacattaacaggaagcggaaaaacaattgccatggcaaccacattgagatgcaggccatggcagagatgtacaaccgtcctgtggaggtgtaccagtacagcacagaacccatcaacacattccatgggatacatcaaaacgaggacgaacccattcgtgttagctaccatcggaatatccactataattcagtggtgaatcctaacaaggccaccattggtgtggggctgggcctgccatcattcaaaccagggtttgcagagcagtctctgatgaagaatgccataaaaacatcggaggagtcatggattgaacagcagatgctagaagacaagaaacgggccacagactgggaggccacaaatgaagccatcgaagagcaaggtggctcgggaatcctacctgcagtggttgcgggatcaggagaaacaggctcgccaggtcc

SEQ ID NO: 189770 - DNA, 341 bp, Homo Sapiens
ttgtgattgctgttgaagaggtcggcgaagagctcgtcgtggcacagctccagggtgggcacggcggccatggagtcgatgtaggcgctgaagtcgatggcgctctcgtcgtcgtacatggcgggggcggcggcgcctggctcgcctagggcccctggctcggccccgcggcccggcttgcccgcccggcccggttcgtagaagggcgcaggctccgcaggccagggcgcgccgcgcgccgggccgtccaggctgaagagcgcggcgctcatggcggcgtcgggccgggaattggctccgagccaacttttttgtacaaagttggctataaaagaaaaagc

SEQ ID NO: 189771 - DNA, 1202 bp, Homo Sapiens
ttggctagacagagcatttcactttacagcaatgcccaaattgctgtcatataggatgaagaaaaaaattcaccgagctgaagttacagaagaatttaaggacccaagtgatcgtgtgatgaaacttatcacttctgatgtattagaggaaatgctgaatgttcatgatcattatcagaacatgaaacatgtaatttcagttgataagtccaagccagataaagccctcagcttgataaaggatgatttttttgacaatattaagaacatagttttggagcatcagcagtggcacaaagacagaaagaatccatccttaaagtcaaaaactaatgatggagaagaaaaaatggaaggaaattcacaagaaacggagagatgtgaaagggcagaatcattagcgaaaataaaatcaaaggccttttcagttgtcatacaggcatccaaatcaagaaggcatcgtcaagtcaaactcgactcttctgactctgattctgcatctggtcaagggcaagtcaaagcaactaggaaaaaagagaagaaagaaagattgaaaccagcaggaaggaagatgtctctcagaaacaaaggcaatgtgcagaatatacacaaggaagataaacctttaagtctgagtatgcctgtaattacagaagaagaagagaatgaaagtttgagtggaacagagttcactgcatccaagaagaggagaaaacactgaacaaagagcctggtgtagtttttaattttgagttttctgacagaagaaaagattgatattttgtgtattgaacaggaagactgccagtattaaaaaaatccttctgggaatctgtaggttatttcttggaaattgcaatacgtagttctagaataaaagtacaaaaaattagaataagaattctttaacattttctttaatgatttgcataaatggagataaaacttgtatttagtatgtaatagaaaaaattctgttattcgcagattgttactatttcctataaattttgtgatactatactgtcctaatacagtctggtaatactattctattttatttaaaatattttttattgaaatattaatgtttattacatgcaaataactattttgtatctacagtcggatatgggattttttattttgtatatttattctattttgtatattgttaagtgcaataagtttttgccttgctt

SEQ ID NO: 189772 - DNA, 993 bp, Homo Sapiens
tacaaaaaagttgggttttgggtgtctcgggagaagcagcaggaaggagtcgccagatgatcaagctccccctttgctgtcatctgtgaatgagcttcgccaggtggtgggcacctgggagccatgcagaggctgtggtgctgagttagactccaggtactttgtggtcaaaggaaatcgcctagctccaggctgtgttaggacagtattagcatgaaggctgtgcgaccatcatgcctgctgatccttgaggcaggcctggtccagaaaactctgggtcagtgactgcgcagggccagccgctaccaggacggccctgaaacaggacacatctgtttttgtccctcaccctgggcaggccgcgtcacaatcacagtcctcctcctccccaccctgacgtctgagcgcagggcttgaattgttagtcccaactctggccaaagatacttttttccagagacagaggccaggaggcagtgaggggagccccgcggggaggcggcggcgactgccacagcccttccagcctgtcttgctggccgccctggttcatatttgagtttaattgtactgaccctggacccagataagcagcaactttgtgtctttggggtcacagaacattttggggcagtttaatgtggtaccaaactgaaaataggagctatttatagatggagcagcacttagtgcttcatagaaagcaatgcctatttttatagttacaaacgcagatatctacatacatatgctttgctgaaagttaggtctgtggtagaccagaaaaccacaaattgactttttttcttagaaaatatttctatttgcggtaaatatagtaatatgtaaataatgtacatctgttgatttctggagtgtctgttattcaatgatgtatatactcccacagctcgcatgaaggaacagcctctattgatacttggttgtaaaatgaagtaagattggagggtggatggctgtcatagctcttgc

SEQ ID NO: 189773 - DNA, 1086 bp, Homo Sapiens
ttgggtcctcctggctcagcagggcctcctggatctccaggacctcagggtagcactggtcctcagggaattcgaggccaaccgggtgatccaggagttccaggtttcaaaggagaagctggcaaaaggggaaccagggccacatggtattcagggtccgataggcccacccggtgaagaaggcaaaagaggtcccagaggtgacccaggaacagttggtcctccagggccagtgggagaaaggggtgctcctggcaatcgtggttttccaggctctgatggtttacctgggccaaagggtgctcaaggagaacggggtcctgtaggttcttcaggacccaaaggaagccagggggatccaggacgtccaggggaacctgggcttccaggtgctcggggtttgacaggaaatcctggtgttcaaggtcctgaaggaaaacttggacctttgggtgcgccaggggaagatggccgtccaggtcctccaggctccataggaatcagagggcagcccgggagcatgggccttccaggccccaaaggtagcagtggtgaccctgggaaacctggagaagcaggaaatgctggagttcctgggcagaggggagctcctggaaaagatggtgaagttggtccttctggtcctgtgggcccgccgggtctagctggtgaaagaggagaacaaggacctccaggccccacaggttttcaggggcttcctggtcctccagggcctcctggagaaggtggaaaaccaggtgatcaaggtgttcctggagatcccggagcagttggcccgttaggacctagaggagaacgaggaaatcctggggaaagaggagaacctgggataactggactccctggtgagaagggaatggctggaggacatggtcctgatggcccaaaagcagtccaggtccatctgggacccctggagatacagcccaccaggtcttcaaggtatgccgggagaaagagaattgcagaactcctggccccaagggtgacagagtggcatagagaaaaatgctgaagcacagctggaaatgatggtgcaagaagtctttcaggtcctttgggccc

SEQ ID NO: 189774 - DNA, 1118 bp, Homo Sapiens
tgtacaaaaagttggcagctgccgcggtcgctccgagcggcgggccgcagagccaccaaaatgccagaagagatggacaagccactgatcagcctccacctggtggacagcgatagtagccttgccaaggtccccgatgaggcccccaaagtgggcatcctgggtagcggggactttgcccgctccctggccacacgcctggtgggctctggcttcaaagtggtggtggggagccgcaaccccaaacgcacagccaggctgtttccctcagcggcccaagtgactttccaagaggaggcagtgagctccccggaggtcatctttgtggctgtgttccgggagcactactcttcactgtgcagtctcagtgaccagctggcgggcaagatcctggtggatgtgagcaaccctacagagcaagagcaccttcagcatcgtgagtccaatgctgagtacctggcctccctcttccccacttgcacagtggtcaaggccttcaatgtcatctctgcctggaccctgcaggctggcccaagggatggtaacaggcaggtgcccatctgcggtgaccagccagaagccaagcgtgctgtctcggagatggcgctcgccatgggcttcatgcccgtggacatgggatccctggcgtcagcctgggaggtggaggccatgcccctgcgcctcctcccggcctggaaggtgcccaccctgctggccctggggctcttcgtctgcttctatgcctacaacttcctccgggacgttctgcaaccctatgtgcaggaaagccagaacaagttcttcaagctgcccgtgtccgtggtcaacaccacactgccgtgcgtggcctacgtgctgctgtcactcgtgtacttgcccggcgtgctggcggctgccctgcagctgcggcgcggcaccaagtaccagcgcttccccgactggctggaccactggctacagcaccgcaagcagatcgggctgctcagcttcttctgcgccgccctgcacgccctctacaacttctgcttgccgctgcgccgcgcccatcgctacgacctggtcaacctggcagtcaagcaagtcttggccaacaaaagccacctctgggtggaagagga

SEQ ID NO: 189775 - DNA, 1295 bp, Homo Sapiens
ttggaacttaagaaacaaaggcctaataagtggtgtgaagtcactcagtaaagaagaattgagtgcagagttattacgcttatctctgaacacagatgtgtgtcatcagccttgtattcctaagcaacagttgaaagcagaaacaacacccttgaaagagagctataaggaggaatctacaaattctggactgtccattctgcttgagagcattgtatctgatcttgaaaaatctcttggaacaggtttatcttcaatattagaaacagaaatgaaaattgcttttggaaacctttggatggagatcctgtacctgaaaccaccatggactctactacatttactacagtgctttaaaaaacattggttggctgtatttggattagttatggaaaagaacttgcttttaactattgagagcctatacaaaaatctccgtaaagctaataaggcagtggattttacaacagtcaaattcttgcttcaggattctagaagtttgttacatgctttcagtacaaggtcaaattatgatggtattcttccacagacctttgctcaagtaaacaacctccttcagacatttgcagaggtcaagacaaaacttaagccaaattcttcagaaaacacagtgactaaaaagcaggaaggtacttcattgaagaattctcataatcaagaaatcactgttttctcgagttctcatcttccccaacccagcaggcatcaagaaatctggtctatcctagagagtgtttggattacaatatatcagaacagcacggatgtatttcaaagattgggctcaaattcagctctgactacttcaaatatagcatcatttgaagaagcatttatatgtcttcaaaagttaatggcagctgtgagggatattcttgaaggaattcaaaggattttggccccaaacagtaattatcaagatgttgagaccctctataacttcctaatcaagtatgaggtaaataaaaatgtcaaatttactgcccaggaaatttatgattgtgtttctcagactgagtatagggaaaagttaaccattggatgccgccagctggttgagatggaatataccatgcagcagtgcaatgcatctgtttatatggaggccaaaaacaggggatggtgtgaagacatgctcaactataggatataagtactgatttgtaactttaaaggaattgcatttgtccttaagaataacagagtagttttcaatctggtcactcttttgggccaacccaagagaattttagaaatgtttcataagtataaaa

SEQ ID NO: 189776 - DNA, 605 bp, Homo Sapiens
  misc_feature (118)..(160): n is a, c, g, or t
aactcattaaaactccttagcaaaccaggtctacatcctgttttgtttgctgagtcgaggttagtgggagtggtcaaattggtactcttggaggaagaaaaactgtccttccttctcnnnnnnnnnnnnnnnnnnnnnnnnnnnnnnnnnnnnnnnnnnngaattctgtttcctggaataagcatttcttattcctagttgtagggactcctatttttaccttccgttacagtgttgattcataagaaatattgttacatttgagataacttcatctgtatggggtatttatttgcaatgatgtctgagtactgtattttttctgtgcattaccttagtgtcagaatgttggtctttattttaaagtcatatgcatgttctcctgccaaggaacctttacacagacccaaacaaaaaaataataatcaaatgccttcaatttctgagaaattgaggcagagcatggaaaaggaataggaaggagaaattaattgagattttcaggacacagacatatgatgtgaatgcctacaaagccagtgtgcataggaacagtgggcctgggtaaagagtcacattggtaggaccaataaagaataataaaa

SEQ ID NO: 189777 - DNA, 917 bp, Homo Sapiens
  misc_feature (336)..(390): n is a, c, g, or t
ttgggcatcactccccccccacaccgcacactggccccagggccctgctgcctgggcctccacatccatccctgcacatggcagctttgtctctgttgagaatggactctacgcttaggctgggcagaggcctccctgcactggtcctggcctcactcttttccctgacccttggggcccagggccatggagggacccttaggagttcaatgagagagaccatgaggccactgggctttccccttcccaggcctcctgggtgccacccccttacgttattcttgggcctctaataagtgtcccacaggtgcctggccaggcccacctgctgcagannnnnnnnnnnnnnnnnnnnnnnnnnnnnnnnnnnnnnnnnnnnnnnnnnnnnnnagcaacagtaccccattccagtcgtttcctgctgtgactaagtcagcaacacagttcctctgacatggggcttggctgtgcttctttgggggtgaagagattggggaggaagtctccacccctgggaggcagaagccaggtgagaaccagagtgggttggggcctccttgcagggctgggtttggcccagggagagggcagtgtcccagtcttagagatctgtcctggcttcttggggtggcggggggttgggggagcttcctgagggacacctgtggcttcctagacagaattgggggatcccagcgggatggtccctgctgcaatcccaccatgtcctaggacagcagcaagggttcctggggcttcagcctgagaaaagtccctgtgatttgacctggcgtccctctgccgggctccctgctgtggcctgggctagagtcctgatgccctccttccacagctggcatcaggcagggctggaaagtaggaggacttgcctgaaatctggctggatttcagagcct

SEQ ID NO: 189778 - DNA, 2304 bp, Homo Sapiens
  misc_feature (300)..(308): n is a, c, g, or t
ttgggaaagatgtagtggcctatgttgaagtgtggtcatccaatggaacagaaaattattcaaagacatttacaacacagcttgtggatatgggggcaaaggtttcaaaaacttttaacaaacaagtaactcacgttatcttcaaagatggctaccagagcacttgggacaaagctcagaagagaggcgtaaagctcgtttcggtgctctgggttgaaaaatgcaggacagctggagcacacattgatgaatcattgttccctgcagctaatatgaatgaacacttatcaagcctaattnnnnnnnnncgtaaatgtatgcagcccaaagattttaattttaaaacaccagaaaatgataagagatttcagaagaaatttgagaaaatggctaaagagctacaaaggcaaaaaacaaatctagatgatgatgtacctattctcttatttgaatctaatggttcattaatatatactcccacaattgaaattaatagtagtcaccacagcgcaatggagaagagattacaagagatgaaggagaaaagggaaaatctttcccccacctcttcccaaatgattcagcagtctcatgataatccaagtaactctctgtgtgaagcacctttgaacatttcacgtgatactttgtgttcagatgaatactttgctggtggcttacactcatcttttgatgatctttgtggaaactcacatgtggaaatcaggaaaggaagttggaaggatccattaatgacattaaaagtgatgtgtgtatttcttcacttgtattgaaagcaaataatattcattcatcaccatctttcactcacctcgataaatcaagtcctcagaaatttctgagtaatctttcaaaggaagaaataaacttgcaaagaaatattgcaggtaaagtagtcacccctcaccaaaagcaggctgcaggtatgtctcaggagacgtttgaagagaagtatcgtttgtctcctaccttatcttcaacaaaaggccaccttttgatacattcaagacccaggagttcctcagtaaagagaaaaagagtatcacatggctcccattcacctccgaaggaaaaatgcaagagaaagaggagcaccaggagatctatcatgccgaggctgcagctgtgcaggtcggaaggcaggctgcagcacgtggcgggacctgccctggaggctcttagctgtggggagtcttcatatgatgactatttttcacctgataatcttaaggaaaggtattcagagaatcttcctcctgaatctcagctgccatcaagccctgctcagttgagctgcagaagtctttctaagaaggagagaacaagcatatttgaaatgtctgatttttcctgcgttggcaaaaaaaaccagaacagttgacattaccaatttcacagcaaaaaccatctccagtcctcggaaaactggaaatggtgaaggccgtgcaacttcgagttgcgtgacttctgcccctgaagaagccctaaggtgttgtagacaggctgggaaagaagacgcatgcccagagggaaatggcttttcttacaccattgaggaccctgctcttccaaaaggacatgatgatgatttaactcctttggaaggaagccttgaagaaatgaaagaagcggttggtctgaaaagcacacagaacaaaggtaccacttccaaaatatcaaactcctctgaaggcgaagcccagagtgaacatgagccatgttttatagttgactgtaacatggagacgtctacagaagagaaggaaaacttacccggaggatacagtggaagtgttaaaaatagaccaacaaggcatgatgttttagatgactcatgtgacggctttaaggacctcatcaaacctcatgaggaattgaagaaaagtgggagaggcaaaaagccaacaagaacattagtcatgacaagcatgccatctgaaaagcagaatgtcgtcatccaggttgtggataaattgaaaggcttttcaattgcaccagacgtctgtgagaccacgactcacgtgctttccgggaagccacttcgcaccctgaatgtgctgctgggaattgcgcgtggctgctgggttctctcttatgattgggtgctatggtctttaaaattgggtcactggatttctgaggagccgttcgaactgtctcaccacttccctgcagctcccctgtgtcggaagcgaagtgccacttgtctgcagggccgtaccgcggaacccctcttttgccgaccagcccagcgatgtttgtctcgcctgccagccacccccc

SEQ ID NO: 189779 - DNA, 1115 bp, Homo Sapiens
ttggatcaaaaaagtccttcagtcgcaaggaagctgaagctacctttaagagtttggtgaagacgcatgaaaaatatggttgggtcaccccgcccgtgtccgacggctgatgtctgccacgtgcagtagacgctcgagcgcctgtccacacacacaccagtaccctgacatctcctcaatgctgtgcatcctccacccgtttttactccagccagaactgcatcctgaatgcccaggagacgtttaagttatttatgaaaagatgtgtgtacagagaggaagagggagcaaatgccgttcggattatgtttcgattataaatgaatgatcacctcgaagtcactttagaacacatgttgagatggtgacatttcccagcctgcctgcccctctgcccaccccggtcacattgccctgagcttctttccatgacagcagctccgacgagccggcaggaaactcaatgcccctgctggctccatttccatgtaaatggcgccgttcatatttcacagggacgccgtgcatctccgccgtgcgtccccggcacgtgtttgctgtgctctgtatctctgtttttcttcctggaaggtcaacataacttgaaaatgtgtctttctgtggcccatggtccgctgtgatgacatttagacctcatttgtgctatgacctttggctcatgaaaacacaaatttaacattgccaggttctagtgatttaaaaccacaactgcccacttggtgaaaacgtgctctcgatgctgatttgtggtgtgctgctgtccacagataaaccagtgccattagatggaaggcagaggatactgcgaccacccctggcagacggtggcgtagacaccaggtgcgccctctggggctcagagcaacggatggtcagctgcgaacagtctcgtccgatgttaggaaatggtcctacggccgcgcctttgtgttcctgtcttctctccaccaccaaaagcaaaagatgatttcccattcactgcagtcatctgactcattttaatatctgtgctagtgacaatgaatgtcagaactgccaaaggataccaagtgatcatacgatgatttgcatgatcgggtctatttcacccaata

SEQ ID NO: 189780 - DNA, 1966 bp, Homo Sapiens
ttggctctgaggccccttgaccaggagtgtctctgaagatacagtccaaagaaagttctccaaaacaaggagagcagtctgaagctggggatggcaacagcattggacccagaccagccaaagaaacaaaaaatacttgtggaggagatggcccctctgaaaggagtacaggaacagcaggttcggcatgagtgtgaagttacaaagcctgagaaagagaagggtgaggagacaaggattgagaatgggaagcttattgtagtaacagactcttgtggaagagtagagtcatctgggaaaatatctgaacccatggaggctcataatgagggctctaacttggaaaggcatcaggccaagcccaaagagaagattgagtataaatgctcagaacgtgagcagagattcatccagcacttggacctgattgaacatgcgagtacacacacgggaaagaaactctgcgagtctgatgtgtgtcagagttccagtcttacaggacataagaaagtcctctctagagagaaaggtcatcagtgtcatgagtgtgggaaagcctttcagaggagttcacacctcgtcagacatcagaaaatccatcttggtgagaagccttatcagtgcaatgagtgtggcaaagtctttagccagaatgcaggccttttggaacatctcagaattcatactggagagaaaccttatctatgtatccattgtggaaaaaattttaggcgcagctctcaccttaatcgacatcagagaattcacagtcaggaggagccctgtgagtgcaaggagtgtggaaaaacctttagtcaggccttactcctcacccaccatcagagaatccatagtcactccaaaagccatcaatgtaacgagtgtggaaaagctttcagtttgacctcagaccttattcgacaccacagaattcatactggagaaaaacctttcaagtgtaacatatgccagaaagccttccgactaaactcacaccttgctcagcatgtaagaatccacaatgaagaaaaaccctatcagtgtagtgaatgtggagaagccttcaggcaaaggtcaggtctttttcaacatcagagatatcaccacaaagacaaactggcttgatgaggtgttctctccttgtagaacatcagagaaggcacattgactagcaaacagcactttaggaaaagtcaccgtagcccactgtggcatcagaaaattcttgggggctgagttggaggctccctgcctctattctctctcctttgctttccttgaagtcagctttggaccacaataatttcactgtagatgatatgctaggatcaaagttaaacagcattcttcactgcaggacatctcagagcatgtaacataactgcatgattatatactctaagcaatagagagcttcatgactgagtaagagttttgaagtcagcagtgaatcaagtgcccacagatttgcaggcttaagcagaacaagggaagattgatatttttggatatgctatagcagctttctcctatgaaataaaactgatgatgtttggaagtatactactctcaaaggtgtctttaaagtacaggttaatggtgaacattttcccccagtggcttcacctcattcctcccactggccttaccccttccttccccagtggaagcattttcaaaagcaaagataattttcgctggtgaacttcagaacttgccttcacggttagcttcatgtaattttaccatttcccatccccattccccaccacattatgtcaagattcagttataaatttaacgttttacttagactttgaaagagattttcatgagtaatttgaatgaaccttgctgaattaatctgaatagccaactgtctgacttgataactcagtgccagttatagtggctgctgcatagaacctattcagtaaatgtctgatgaaagaaattggactttttc

SEQ ID NO: 189781 - DNA, 1090 bp, Homo Sapiens
ttggcggttgtcgcccgttggccgcgcggcgccgcgctcggcggccgccattgcagcttgttttcacttgctttttaaagacagaaagctcatggtgcaaattgttatttccagtgcgagggctggaggcctggcagaatgggtgctgatggagctacagggggagatcgaggctcgctacagcactggattagctggaaacctcctgggagacctacattacaccactgagggaatccctgtgctgatcgtggggcatcatatcctgtatgggaaaatcatccacctggagaaaccttttgcagtccttgtcaaacacactcctggggatcaggactgtgatgagcttggccgcgagactggcacccggtacctggtgacagcactcatcaaagacaagatccttttcaaaacccgccccaagcccattatcaccagcgtccccaagaaagtatgaaagaacctcggattttccctagagagcggccaactccttggactcgtgctccgctgccacctcgaggacggctcgacggttccctgggaccacaggggggtcctgttctgaacacaggccacccactgggtgtgaactcggatcccttccttatggcggccggttctcttggtggaaatctgaccccatttccaaggaacccatctccttttccagcttcatcaggctcattggcttcaaatccagcacctttcccggctggtgctcgtgacccaagtatggcttcttttccaagagggatgaatcccactggcacaggtgcagtttctttcccaaggcctggtggcctcttggggccaggcccaggcccaggccccaccctaaaccctaggacaggggctctgccaggcccagggcctctgtctaaccccaggttagggggtctcccaggaccaggtcctatgtccaacccaagggcaggtggtctcctgggagcagtcctgaccccagagtggtggtcccatgggccctggatctggacctaacctgagagccggtgttctgttaacctctgggaatggtcctcccaatcctaggccagttggcctgggcccaggacaaaccccaatctga

SEQ ID NO: 189782 - DNA, 1432 bp, Homo Sapiens
  misc_feature (170)..(179): n is a, c, g, or t
tgagccaccatgcctggcctaggctgattttcattgctatctttttcaagaaatcatggtatgtttctccatttcttcacatctttaaaaaacatttattttaatgaatttttacagatttcttcttatatgtctttcatgtttcttaagtttatttctaggtattgaannnnnnnnnnaactatggaagtaggatttaaaaacttactattatattttcacttttggcatgagagaaagctagtttctttctttacatatcttgtacctgactacttaactcttagttctattttctgtatattcttccctgtaagtttgcccatagttacctttgttctgaaaaggagggaattatttttccttctcctttctggactaaatagtctcttgtttttagggctgtggacctggacttgtgctattagggctatagttgaatagcagcatgggatatcatctttgtggccttgcgagggaacataaccaccagacataatcttatttctgtgggaaatgttgttctaaatgccaaagtccaaattacaagactttttgcatgcacttcgttcaaaaagaacaagatttgggctgcctttagattgtgcactgcgtttaaattacagaatctgtttgaatttcaggagcgtgaggatcatccccggagaggacgggaggatcggcagcacagggaaccatcagaacaggaacacaggagagctaggaacagtgaccgggacagacaccggggccattcccaccaaaggagaacgtctaacgagaggcctgggagtgggcagggtcagggacgggatcgagacactcagaacctgcaggctcaggaagaagagcgggagttttataatgccaggcgacgggagcatcgccagaggaatgacgttggtggtggcggcagtgagtctcaggagttggttcctcggcctggtggcaacaacaaagaaaaagaggtgcccgctaaagaaaaaccaagctttgaactttctggggcacttcttgaggacaccaacactttccggggtgtagtcattaaatatagtgagcccccagaagcacgtatccccaaaaaacggtggcgtctctacccatttaaaaatgatgaggtgcttccagtcatgtacatacatcgacagagtgcgtacctactgggtcgacaccgccgcattgcagacattccaattgatcacccgtcttgttcaaagcagcatgcggtctttcaatatcggcttgtggaatatacccgtgctgatggcacagttggccgaagagtgaagccctacatcattgaccttggctcagcaatggaaccttcttaaacaacaaacgtattgagccacagagatactatgaactaaaagaaaaggatgtactcaaatttgggattcagtagcagagaatacgtcttgcttcatga

SEQ ID NO: 189783 - DNA, 997 bp, Homo Sapiens
ttggccctccctttggcctgagtacttttcccgttcacgcctcagtcccgtggacccagcctttgtcagtggcaggtgcctgaacagagggtggatgggggggataccggagggggtcttgtcttcccagccgcagtctaggaatgatgcgggggggtggacgccttctccatagtctttccccacctggagcaggggcttcctcagtggtgaggggagctgcctacaggttggaccgggaggcagtggcttggagaggcagctttccagccttggtggggaagaaagtgtccattctttgccttcctggagctcccagccagagctgagcttaggcacccgagtggagcctgcagctgagtctgtgcccgagacaggctgtcagagattccagaagcctctcctccccgccgccctccacccctgcctttcagcgttgtggatccctagaggtggccccctgcccgatccaccgtcctgaggcagagtgttgagcctcatacctgtaccaggtccccggccagctgggcccctcccaggcactgccaggaagccccagctgcccctggcgggtgtggtggaaatggcaggagggtgcaggtactcttggggccccagcggtgggagtgcaaaagacccaacgccaacacctggtgccttttgcagccagcgcccacccatccgtgcccggacccttgggaatgcccgcggctccagaggaaaaagcccagggacggggcctccgttgcggggggtcggctgcttcttgggaactttgtcgtttccggcgctggctggctggctggctgtaaagcactgaagccccccggccgccaacccctgaaagcagaacctggcctccctggccacagcagccttacccaccgctctacgtgtcccgggcacttcccgcagccttccccgtccctttctcatcgggccttgtagttgtacagtgctgttgggtttgaaaagtgatgtgtggggagtgcggctc

SEQ ID NO: 189784 - DNA, 1370 bp, Homo Sapiens
ttgggtacatcaaccgtaatggtccctcctgtcaccccagacttgcctgcctgcagccctgccagtgaaacaggaagtgaaaacagtgtaaatatggctgcccacacattaatgattctctccagggcagccatttctaggactacttcagcaactcctctgaaagataacacacaacagtttagagcatcttcaaggagcaccacaaaaaagcggaaaattgaggaattagatgaacgtgagcgaaactctcgtccttctagtaaaaatcttacaaattcatcaataccaatgaaaaagaagaaaattaagaaaaagaagcttcccagttcatttccagcaggaatggatgtagacaaatttttgttatcattgcattatgatgagtaaacattctggacacataagaacagtaggtgttaaaaactcatatcccttaaactgagtgtagggaatgggatattgacagaatctgaaagcatgacctgcactttcattgtactgaaacttcactttatatctaaatcatgctgtttctgaaacagcttcctagtttgtaaatagacttacttggtatatttttattttgggaaaaacgtttgcagaaatgtaagtaaagccaatctgcaaaactgtatagctttgacaattccatattgtaaatactgtgtaaatcttgttgaaatagaggttaaatcaacctaatgttcttacactgtgttttttgacttcttatgatccctaattctgagacttactcatctggaatagtttctcacttgttttggaggaaaatgatgcttattcttataaattaccttcagtaactattcaataagacatttaaatacacaatcactaagtactacaaaataataaccacctcaactgatagcaaaatatctaattagaaatcaacagtttgatgagtttttttcctagagtgaattactacccctttcttataattgctgtaagtattatatttctggaatttcacactttacctactctgatcactctgttctctttgttttaaagagagaattttgtaaaccatttattgaatgttctgatctttcatttataacttaagattttttacagaactttaagtggttagactattgagccataaaattttggtttgtagtagagatttctcggtatgtacttttcccctaaatgctggggatttaaagaattgcactaattcatagaactctttacattgtagtgaccatgcacatataatttaaatcttgtgttctatgtgagagtttatgtggaggattatcttctggtgttgtgtccatcataagatgtaaaaagagaatcatagttttatattttagtttctcctacaatgg

SEQ ID NO: 189785 - DNA, 949 bp, Homo Sapiens
ttggctccccttcccctctccctcagagttttcactgccgtctcgtctttagaaagctgtttgaattccccccgcccccagtttggaccgtgtagatataactggatatacggatttttctctttgtgcaggcttcttatgccgttggtatacagggcaggaaagagaggaataaagggagagagcagtgtggaaaccacggtggttttgctttgttcttactaggttttggtgccaccttccctgcctgcgcttgtgccccctctcctccttggcactggcggcctccttgcctcccttccaccagtgctgccatcccgtgcctgtcgtgttggttcttcacacgtgctctgttctcggggttgttccattcatgccttcttggagggtgagggtggcttgggaaccgacccagtgatcatgcctactttcttctttgtatctccctccttcccagcccacccgggcagcagactctgatggaaggaaggtgccgtaggtgggcttttagaaactaacgggactggttttcaaagcagttatcttgggaaactgtttattccagcgatgtgacttttttcagaatatttcttggaatcatattcagagtctggggctgtgtgttgagcagccttaaggatgctagacactcatttagtgcccagggagtccagcgaatgacgtctgtggccaagcgaggtctcaggtgcaaagcaaaaggaccatttaaagtaaaatagcttggattcaatcatgtgacttttaaattggctcagaaagcaattttgtaatttcagagagtgttttgagccatggccacgttgtcattgtgagtctatagcttgactccttggagaacaatattcatttggttgtggagactgatttgctgggaaaaatctgtcctgtaactttctggtcatcccaggttctgacttttaccagggcc

SEQ ID NO: 189786 - DNA, 1339 bp, Homo Sapiens
  misc_feature (120)..(179): n is a, c, g, or t
  misc_feature (193)..(217): n is a, c, g, or t
agagacatctctctatgccttcttaaaccgagtttactccatttcagcctgttctgaattggtgactctgtcaccaataacgactgcggagaactgtagcgtgcagatgtgttgcccctnnnnnnnnnnnnnnnnnnnnnnnnnnnnnnnnnnnnnnnnnnnnnnnnnnnnnnnnnnnntctctctctccttnnnnnnnnnnnnnnnnnnnnnnnnnataccttttcttcccctggattttcaccctttgggctgccttgctcatctttatgccccagcactaggtacggggcccaacacgtggtaggcactccatcagtgtttgctgaattgaaaacattgttgactgtggcttctatcaaagtgtctaccttttgcagctcttcccctccctcatttaatttgctgcttttaatctacgtggctgagaatttgtgaaaccagtgttgttagaagtgtatataatctgaatcaataagctctgaatggtggccaagggcctctcttatggcacaaagatgcatggacttcatgacagctcttttggtggctcagaagccattttttatagaatcatggaatctagaatattcctgctggaaagaacctgagagttggtttggaccaattccctggttttccagcagatgaaacaggcccaaagaggttaaatgactgggtgaaaatcacatagctgtctggtgccagagccagcctatagtagagtcccctgaccccaagcccggtgctcattccactacctctcacacttcacaacaatttcctcaacacttgagggcccagaaagtctgatctctccagaatgatcagcccagaggaatgctgagaaatcacctggaggagggagcagaaagagaaggtttttaaggaggggcttctgaatacttgggagatacggaacggaccaaggaccacactccagggtgcattcgttgctccctggggcaccacttctggattacagtgtgccaggtcctttggaggccctaccccttccccattcattgccaccagtgagaaatgggggtgcccctgtgtaaagaaacctaccaaaggtttacatttgcaccttagcctcaatagctacgaaccctagagaagcagctagctggagctcatgtgcaactcctgattctcagagaaagatggattttaaccccaaaattatgagtgagctgttaactctaaaatgtacttgggagataggccaagcgagaggtcatgggccaccaagtgttatccagtagaaaagacagtacactgcttttctttagtgtttgcttttcctttgctatatgttttgctatttcttgtggct

SEQ ID NO: 189787 - DNA, 2391 bp, Homo Sapiens
ttgggcaaagctaaaaccaaggaaaatcgccaatcaattatcaatcctgactggaactttgaaaaaatgggaataggaggtctagacaaggaattttcagatattttccgacgagcatttgcttcccgagtatttcctccagagattgtggagcagatgggttgtaaacatgttaaaggcatcctgttatatggacccccaggttgtggtaagactctcttggctcgacagattggcaagatgttgaatgcaagagagcccaaagtggtcaatgggccagaaatccttaacaaatatgtgggagaatcagaggctaacattcgcaaactttttgctgatgctgaagaggagcaaaggaggcttggtgctaacagtggtttgcacatcatcatctttgatgaaattgatgccatctgcaagcagagagggagcatggctggtagcacgggagttcatgacactgttgtcaaccagttgctgtccaaaattgatggcgtggagcagctaaacaacatcctagtcattggaatgaccaatagaccagatctgatagatgaggctcttcttagacctggaagactggaagttaaaatggagataggcttgccagatgagaaaggccgactacagattcttcacatccacacagcaagaatgagagggcatcagttactctctgctgatgtagacattaaagaactggccgtggagaccaagaatttcagtggtgctgaattggagggtctggtgcgagcagcccagtccactgctatgaatagacacataaaggccagtactaaagtggaagtggacatggagaaagcagaaagcctgcaagtgacgagaggagacttccttgcttctttggagaatgatatcaaaccagcctttggcacaaaccaagaagattatgcaagttacattatgaacggtatcatcaaatggggtgacccagttactcgagttctagatgatggggagctgctggtgcagcagactaagaacagtgaccgcacaccattggtcagcgtgcttctggaaggccctcctcacagtgggaagactgctttagctgcaaaaattgcagaggaatccaacttcccgttcatcaagatctgttctcctgataaaatgattggcttttctgaaacagccaaatgtcaggccatgaagaagatctttgatgatgcgtacaaatcccagctcagttgtgtggttgtggatgacattgagagattgcttgattacgtccctattggccctcgattttcaaatcttgtattacaggctcttctcgttttactgaaaaaggcacctcctcagggccgcaagcttcttatcattgggaccactagccgcaaagatgtccttcaggagatggaaatgcttaacgctttcagcaccaccatccacgtgcccaacattgccacaggagagcagctgttggaagctttggagcttttgggcaacttcaaggataaggaacgcaccacaattgcacagcaagtcaaagggaagaaggtctggataggaatcaagaagttactaatgctgatcgagatgtccctacagatggatcctgaataccgtgtgagaaaattcttggccctcttaagagaagaaggagctagcccccttgattttgattgaaaatgaactatttgaaacacacagtgaccaagggaagtgaccaaggtgaagatggcctaggatcttcactgtcttactcaagatactggactaagtggaacgttctctaccttcaacatgtgctcgctctgcatgattagtgcaataaaactcccttccttatgcatactgagatagcttagtgtctcgtggaaggtgtcaatttggtttagaatgctgcgcttaccttcccatgcaggctaaagtgattccttcttgctcagtccctctgggtgggaaccatccagtacttgtggacactacacgtttcaacctctctactagcaccatcacccttgaaaactctcagtcagtgtcatgaatgttgcatgacaacagttggccgattagaaggcagactttctacatgcaaatctggcttagtaaatcgaggtgtgggccagagatcctctgacagctgtcctgagctaacactaaaagtcactgggtatttggttaaaggtctcccacaagactggtattctctttgcctgaagaaacaaggcattgaatctctaaaatgctgttctcaatcattgtcagagatgttttcaagttgcagtcagaagatctttcttaatagaaagtcagatgactaccgtgttggttgtgacttccccttaagtataactaatttgctctgtggtaagagatatgctcattattaccacttagaagatgttgttaaaaacatgtgaaaga

SEQ ID NO: 189788 - DNA, 1390 bp, Homo Sapiens
ttggggcatcttaccgactatttcaccttcaaacaggaatgtcgaatcaaatattcggaacaggtgtatgatgcctgtatggagacatttgactgtcttcctcttgctgccctcttaaaccagcagtttctctgtgtacatggaggaatgtcacctgaaattacttctttagatgacattaggaaattagacaggtttacggaacctcccgcctttggacctgtgtgtgacctgctttggtctgatccctcagaggattatggcaatgagaagaccttggagcactatacccacaacactgtccgagggtgctcttatttctacagttaccctgcagtttgtgaatttttgcagaacaataatttactatcaattatcagagcccatgaagcccaagatgctgggtatcgaatgtacaggaagagccaagccacaggctttccatcacttattacaattttctctgcccccaattacctagatgtctataacaataaagctgctgtgttgaaatatgaaaacaatgtcatgaatatcaggcagtttaactgttctccacacccctactggcttccaaactttatggatgttttcacatggtctttgccttttgttggggaaaaagtcacagagatgctggtaaatgtgctcaacatatgctctgatgacgaactgatttctgatgatgaagcagaaggaagcactacagttcgtaaggagatcatcaggaataagatcagagccattgggaagatggcacgggtcttttcaattcttcggcaagaaagtgagagtgtgctgactctcaagggcctgactcccacaggcacactccctctgggcgtcctctcaggaggcaagcagactatcgagacagccatcagagggttctcgcttcagcacaagatccggagttttgaagaagcgcgaggtctggaccgaattaatgagcgaatgccaccccgaaaggatagcatacacgctggtgggccaatgaaatctgtaacctcagcacactcatatgctgcgcacaggagcgaccaagggaagaaagcccattcatgacttagagtcctgccgtggctcaggtggatctaaaactcaagaacaaattctatttatttattattggaaaatgaaaagcaactcaaaacaacttcaacgtggaggtgcatttataattcagtctgcatttattctgtaaaaaggtggctgttttataaattcttttaatttatgttcaatatatataaaaagtgcatctgttttgtttttcccttttttctccataattttaagaaatgaatctgattgttgtcaacacattttgtgaagtcttgtgctataaaggggaacttcccctaataaaagggccttggaacctcaaacc

SEQ ID NO: 189789 - DNA, 1512 bp, Homo Sapiens
gaagaggaacatagagacagccagaaagacatggggaaagagtgttggagacagagaaaggggaaggcaagggaaagccaaaagaaaccaaaatccagagaaaaagaattaacaagatttaggagcaaacgagttcaggagcctaaggaagggagtaggagaggaaaccaagaccattctctgtaccgtcccagctggggtgggggcgtcaaggcaccaggtctggttaggttggggggacacctgggctctgggggcggctttgcactggactgcagtgatgtccagccccagcagggggccctgccacacagctctgaggcctggaagccacccggcgatgccggctggaacaggacccgatacaccctctctccctttgattgtccgagtctggagagatacaaggaaggctgggcagggaggaagttggcctctctgtgtgcctcagccccctggaactctcctggccctcctcctggtgtcgggggcagccacaggctgggctgcttcccgggacaggccagctcctcgcctgctcatgcctcctgcccgctcttcacagacctctgaccacccctccacacaacagagctcccagcctagtgcagtccgggaagggccatggaactgtcccttgccctcctcagagtcgtctggcaagactgtccctggcctcacttctcctccccatctagacttcacccatggtcttctggtgtaatgggttaggcctttctaccagaaaaagccagagttggaacccaaccccacctcttccccacacctgttcccttacacgggacaaaccaccatctttggtctgaccccttctcccctaattgatggggacaagccagccccagctccccgggagaagggaggggctttctagcagcaaaaagggtccctccagccacctacctgtccccttccccccagttccttcctagagcccctcccccttaacccaacaaagttcatggcagcagcaggctgagacccgaagatgtttgaaaactcatggcacttgtgagaaaaggaggggcagagagatgggaagaggtcagagcagaggtggaggggccacctctggggaaacggcaatgcaggggctgggctagggtggcctggggctatgctgcccctagagttgagggaagggggctggggaggctggcctgacaggctggagaggagggggccgggacaggtgctcaggacacatcccgagcctggagcttccggggtctgggatttggggtcaagccgcccagaacatgggtgtcctgaccccagccctggcacctggcttcgtcttccctgcgggaaggtggaggatagggaaggtgatctctcacctttgcccctccccatccgccagaccgccttgccgttcccagcaccctcctcagccatacccatgccctccacaaccccagtgcctccccattttccttctgccatcaacctctctaggtgggaaatcagccaacttttttgtacaaagtt

SEQ ID NO: 189790 - DNA, 726 bp, Homo Sapiens
actttgtacaaaaaagttggctcactgcctgccccaggaccagaggcctgtctcccccttccctccccaccggcccgggggagacctcttcacacccaaagatgctttgtcaagatggctgcgctgtccctttgagttcctgcttcttgtatattgctctggggactctcgccggggaagatggggctgatttcccacctagagaggttgatggcagaaggaaaatggggaggcactggggttgtggagggcatgggtatggctgaggagggtgctgggaacggcaaggcggtctgggggatggggaggggcaaaggtgagagatcaccttccctatcctccaccttcccgcagggaagacgaagccaggtgccagggctggggtcgggacacccatgttctgggcggcttgaccccaaatcccagaccccggaagctccaggctcgggatgtgtcctgagcacctgtcccggccccctcctctccagcctgtcaggccagcctccccagcccccttccctcaactctaggggcagcatagccccaggccaccctagcccagcccctgcattgccgtttccccagaggtggcccctccacctctgctctgacctctccccatctctctgcccctccttttctcacaagtgccatgagttttcaaacatcttcgggtctcagcctgctgctgcccatgaactttgttgggttaaaggggaggggctc

SEQ ID NO: 189791 - DNA, 978 bp, Homo Sapiens
ttggcggagagtaggagagaccgaaaaggctgggggtgggagtagcggatttgaagcacttgttggcctacagaggtgtggcaagcagagcacctcagaactcaggcgtactgcccgccgcccgagccctgcgagggccgatagcgagggtgtggcccttatctgcacccagcagagcgccggcggggtacggtcttaggacctcgatctccttctccctcattttctctcatccctacctattgtgggtttccgcatgggccggaccgtggtcgtgctgggcggaggcatcagcggcttggccgccagttaccacctgagccgggccccctgcccccctaaggtggtcctagtggagagcagtgagcgtctgggaggctggattcgctccgttcgaggccctaatggtgctatctttgagcttggacctcggggaattaggccagcgggagccctaggggcccggaccttgctcctggtgagaggcttgtgggatgtctaggagaggttgtggagggggcttccattggggaatagagtttaggggaggaagtatgtttggtgggtcagatcttcccttagtttctcctcttctgagggcatgtggagagcaggtttctgagcttggcttggattcagaagtgctgcctgtccggggagaccacccagctgcccagaacaggttcctctacgtgggcggtgccctgcatgccctacccactggcctcagggggctactccgcccttcaccccccttctccaaacctctgttttgggctgggctgagggagcctgacccagccccggggcaaagagcctgatgagactgtgcacagttttgcccagcgccgccttggacctgagccatggacagtctctgccgtggagtgtttgcaggcaacagccgtgagctcagcatcagtcctgctttcccagtctcttccagctgagcaaacccatcgttccctattactgggc

SEQ ID NO: 189792 - DNA, 1555 bp, Homo Sapiens
  misc_feature (646)..(655): n is a, c, g, or t
  misc_feature (1078)..(1086): n is a, c, g, or t
  misc_feature (1171)..(1211): n is a, c, g, or t
ttgggtaaatctcccttgggaagtcatgccttctaaaaagattcttatttgggggagtgggcaaaatgttgattattttctaatgctttgtagcaaagcatatcaattgaaaagggaatatcagcaccttcctagtttgggatttgaaaagtggaattaattgcagtagggataaagtagaagaaaccacaaattatcttgtgcctgaaatccattaagaggcctgatagctttaagaattagggtgggttgtctgtctggaagtgttaagtggaatgggctttgtcctccaggaggtgggggaatgtggtaacattgaatacagttgaataaaatcgcttacaaaactcacactctcacaatgcattgttaagtatgtaaaagcaataacattgattctctgttgtacttttttgtaactaattctgtgagagttgagctcattttctagttggaagaatgtgatatttgttgtgttggtagtttacctaatgcccttacctaattagattatgataaataggtttgtcattttgcaagttacatgttttaaacatttatcaatgaagtcatcctttagacttgtaatcgccacattgtttcattattcagtttcctctgtaaagggatcttgagttgttttaannnnnnnnnnctgcatctgaatctgcatgatttccaaaccctgtaccatctgaattttgcattttagcacttgcactattactcagcagcagtaacatggtaacacttaaaatggtactcggggacctccaaagactaaactgacaagccttcaaggagcccaggggtaagttaacttgtcaacggcatggtttaatcccttctttacacttgtgtaaatttcagttactggtcatagaaggctttcaatgttgagtggccttttattaacatgtttatggtactgcatagatacgggtatttattttaccctaagaagattttgaagtttaaaagtacttaaactatttggcaaagatttgtttttaaaaatctatttggtcaatctaaatgcattcattctaaaaaattttttgaaccagataaataaaannnnnnnnngacaccacagtttagtgtctggagtcttactggaaaaacacgatttctttttatatgtgatatacagatgctggaaagttacctnnnnnnnnnnnnnnnnnnnnnnnnnnnnnnnnnnnnnnnnnttgagtctcaagaagttgtacttcatatgcacaagagaaatgaggccaagactcacagtaagcttttacatggaatggtaacttttagttagactgaaaaacttgaatgttagctattaaaaccttttaggaaggaatagccagctaaaaccaaatgagatttttaaagttaaatcagcacttaagttgtgtccttagtagaaaaagtagaagttaactactccgtaatccaagagataatgtgtaacagtaagaatgattttgttgttgttgagtatgagcaaagtagcccctaagtgtgtattagggttctgtacttaactgttgtgtgatgtgtgcttttg

SEQ ID NO: 189793 - DNA, 920 bp, Homo Sapiens
aaaccccttcccatatccagctaaaccagctccaggaaaggagaaggtccgtttccccggcatccttggggcccagggactgggttctttcaccggatgatcttgcctggttgaaccacagcagcatttgggctttttcatcctttcctacatcaagaactttcccaaatgtgggccctggggccctagcaaaacagtggccttggccacaggctctgggcctctgggaggctcccatctggcatcaggtggcggcacagagcagggctgtcagcacgggcagagagctgggcacaaagagtagccagacggcagggcgtgccacagggctccgagggtgggtggcccttatggtagagaaaccagaaggtctggaaaagttgcatgtcgccccgcatgcgatataccaggttgtgccaggcggtaggcagtgtgttgggcagcccataggtttctcgagccctgtagagaagctgccagtgcggtatggctcccggtatgtttgcctgggtcagattcaggatgtaggtctcatggtccaggaccacgtgagagctcccggagtagtttccatctatttggtacacacggtaaccaggattaaggccgatgtaggtagttgcactgggtgccaggaaggctacagccagcggccggctcagagtctcttcatcatagaagacctcaaattcatccacatgagtgtggccaaagaactgagcagccagggtgttctcatacctggctacaattcggtaataattccagctccagctcttcagacagtgccctgggggaatgtggccaattatatgcactttgtctcctcgatcctcagcagcctgaagctcccccaccagccactggagctgtcctgcgggatccgtggagttgatcaagagccagaagttctcacccaa

SEQ ID NO: 189794 - DNA, 1205 bp, Homo Sapiens
  misc_feature (179)..(196): n is a, c, g, or t
ttggctaggacattcactctggacaaaaaccacaatgccatgacagtggccactcctggtagacaatatggatgttccggccaccccactctcagcctaccagatccctaggacattcactctggacaaaaaccacaatgccatgacagtggccactcctggggactcagccatagctnnnnnnnnnnnnnnnnnnaagccaagtcaggcagaaacacctcgatggggcagtcctcagcagagaccgccaatcagtgaaaatagcagatctgtcgctgccaccatccccagacgcaacaccctccctgcaatggacaacagccgacttcaccgagcttcttcctgtgagacctacgagtacccacagcgtggtggagagagtgcaggccggtctgctgaatccatgagtgatggagttggctctttcctgccagggaaaatgattgtgggccgatcggacagcaccaattctgaagacaactatgtgcccatgaatccaggttcttccaccctgttggccatggaacgagcaggtgataattcccagagcgtctacatcccaatgagcccaggggcccatcactttgactcacttggctacccatcaacaacccttcctgtgcaccgaggccccagcagaggaagtgagattcagccaccccctgtcaaccgcaacctcaaacctgatcggaaagcaaagccaacaccacttgacctgaggaacaacaccgtcatcgatgaactccccttcaagtcacctatcaccaagtcttggtctagggccaaccacaccttcaactccagctcctcccagtactgccgccccatctccacccagagcatcaccagcacagactcaggagacagcgaagagaactatgtccctatgcaaaacccagtgtctgcatctcccgttcccagtggcacgaacagtcctgcccctaagaagagcaccggcagcgttgattatctggccctggacttccagccgagctccccaagcccccaccgcaagccatctacttcatccgtcacctctgatgagaaggtggactacgttcaggtggacaaggagaagacccaggccctgcagaacaccatgcaggagtggacagacgtgcggcagtcctcagagccttccaagggtgccaagctgtgatgagagggccaccgcagagcccaggaggcagcatctccagagctgg

SEQ ID NO: 189795 - DNA, 1042 bp, Homo Sapiens
gtgctacctcagcaactctttccccatcagtccttctctgtctctttatcattatcagtccagccccagtgggctctcttctatgggttctttactctctgctttcttctctgggtctcttctgtttctgtaaccatcagctttccatgtgctctttggactcccccagctcagcacatgagtcttctaaaatatgcctcccagagtcagtcaccgggatctgcagttgttctggtgatccatggtctgtattcactactctcgccctctgagaaccactgggaaatttggctgccatctcgacaccattgctaccaatttttggagcatggaaacccattcctgaagtgcttggtgcttcttcactgtcatcatctgaactctcagagttggacccttctgcagtctctagtccctccatgcccaaccagaagcatctcctctttcccgcactggctcctctgtctgtttgagatttagtaggccattgccgtttccgattctcactgatttctgctgaaaccatcttgctggaggcagcctgcatacctttgaggacggaatcctccagacgctcagccatctcatggcactgctgctggtagtcggggctggtgaagcagtgcttgggttctacaagcttccgctgcagtcgctccagccgcttctgctccttttcagcctctcgctcggcttgttgttttacccattcagccattgctttttcatgattgacatcgcgtagtctccttccactgagatcccgacaagcttctcgattggttgtcttctcaatctgagcaccaagtgctcggagcatagatccaaaacctccttttccaccgcaaagtctgggttccaaactataaacagctccatgctgcactgtgtcactggtgttaatgagtgctccattgcatttcacaaagaagttttccactggaacattctagagacaaatttgtttttttaatgccttttatgagataataatctaagtttgttacaagaagggacctagctgtctttttattactcccaa

SEQ ID NO: 189796 - DNA, 892 bp, Homo Sapiens
  misc_feature (736)..(764): n is a, c, g, or t
ttgggtccttaaagcccctaaccatcccacactcttcactttcctttccaccttattcattctctgtacttaccacagtattttgcacttgattacatatccttcactctcttctcttcatcccatcaccccctaaataggtcaggtgagggaggctgggaagaggtgggaggaggggcagaagtgaaggaagaataggaaggatattacctcttctgttatttttttaagaaacattgtttggtggcagcaatctccctgtccctatcactgttagaggcctaattttatatctataaatatattaaaaagcaagtcaaacttggatgtatcaaggtaaaattattgtcaaagtttaaatacctatatattctctgaatgcaataaagggacttaagagtgaacaagagtaatggtgtggaagtgacacctggggtcagtttacctctgtgtatggtcactagagattgggacttaccctttaggttttaggaggcttgagaatggaaggatcctcatttctgcccttcctggttccctgctttggtgtaggggttgggaaaaacaggaaattcctctcagctctgcctcagatctcctacctctccttaagtcttgtagggggttccaaggatggctcttctaaccagaggctggcctgtctttaaaacttaactactttagggtggtgccaccactgcagactattgtggtactttgtgacagaagacatgtnnnnnnnnnnnnnnnnnnnnnnnnnnnnntctctcactctgtctctcttacctttagctgcttgatcattaagccatccaacttcatgccagttcccttctttatagaagagtgaagggaaagacttcctgggtttgacttaaaccttgtccacctc

SEQ ID NO: 189797 - DNA, 1255 bp, Homo Sapiens
ccaactttgtacaaaaaagttggcctagttttatttctgatatgttatctaagtgcaaagttcagaaagtgattcttcattgtttgctgtcatctatctttagtgctcagaaatggcatagtgaaaaaatggcaggtaagaacctggttgctgtggaagaaggtttctcagaggacagccttattaatttctcagaggatgaatttgacaatggcagcacgttgcagtcacaacttcttaaggtgcttcagaggctgattgttctagaacacagagtaatgactattcctgaagagaatgaaacaggttttgattttgttgtatctgacttagaacacatcagtccccatcaacccatgacttctcttcagtatttgcatgctcagccaatcacatgtcaaggcatgttcctctgtgcagtgatacgagctttgcatcagcactgtgcatgtaagatgcacccacaatggattggtttaatcacatctactctgccttacatgggaaaagttctgcagagagtggttgtttctgtgacactacaactgtgcagaaatttagataatctaattcagcagtacaaatacgaaacaggattatctgatagtaggcctctgtggatggcatcaattattccaccagatatgattcttactcttttggaagggattacagccattatccattactgtttgttggatccaactacacagtatcaccaacttttggtcagtgtagaccagaaacacttgtttgaagcacgcagtggaatcctctcaatccttcatatgatcatgtcctctgtgacactgctttggagcatactgcatcaagctgattcttcagaaaagatgactattgccgcatccgcatctcttaccactattaatcttggagctacaaagaacttgagacaacagattcttgaattgttgggccccatttcaatgaatcatggtgttcactttatggctgccattgcatttgtgtggaatgaaagaagacagaataaaacaaccaccaggaccaaggtcattcctgcagccagtgaagaacagcttttattagtggaattggttcgttcaatcagtgtcatgagagcagaaactgttatccagactgtaaaagaagttttaaagcagccaccagccatagccaaggacaagaaacatctttctttggaagtctgcatgcttcagtttttctatgcttatattcaaagaattccagtgcccaatttagtggatagctgggc

SEQ ID NO: 189798 - DNA, 648 bp, Homo Sapiens
ttggcgcgggtctcctcagcatcagacgggcttccaggaccgcagcaggcaggccccagcgccgagactcctggtgacaggtggcacctgtcccacagccctcgtcccatgtggaacttaccattgggattgtgtttctattcagcaagggaaaccggaccaagcgtctgcatgtgtgtgatcagatgtgggccgggtgtgtgcagggctgggtcccgctgcctgccgtcgactcatccaaggaccctccaaggctggcagtgtggcgttgctactattaaggaaacaggcttggggcagccccactgctggtccaagtgtgtggagggctgagtgtgctggccctgtgactcaggaccagctctggagtctccagcccaccctccgcaccgtcccctcctgagcagcactcggcgccagcagcctctgccagagtggaagccagagccctgcaggtgtccggcgcagccgtgggagctgaggatctggcacttgagaggcagcaactccttgaaggtcctctgcctccagctgtggccctgcatccagatacctgcctcgtccgaggcagacacccccacccctgcctcctccagacccccctccccgctgcctgcaccgccctggagcagcatgggggtcagaccc

SEQ ID NO: 189799 - DNA, 932 bp, Homo Sapiens
aagccaactttgtacaaaaaagttggatacagagaaagggaattttctgattatcacagataattccatgtcagacttttgatggtcctataacattattttatctagtttctctttatttacttttgaagatgatagtatgatcctatcatgttctttgaagtgctaggaaagatttctggtgattcttacgtatttcttctttttctcctggaactaatagcttcaaattgtaaatgtccagaaaacagtgggcaatccattgaattgcacaagttgcaaactactggaccatgttagctttatgtgctaatatattagccagtgtgtcccttaatactaataaaagattatgttgtttttagaatacagaatacaaaggggaatattgggcagaacatcctacgataaaaattttttgggaagtatttcacgaattaccattggaaaagaagaaacagtttctgttatttttgacaggtagtgatcgcattcctattcttggtatgaagagtctgaaactagtcatccagtccacaggaggtggtgaggagtatctcccagtttcccatacttgttttaatcttctggatcttccaaaatatacagaaaaagaaactctacgctctaaactgatccaagctattgatcacaatgaaggcttcagtttaatataactttggagttataactattcagtttagtgcaaaagcattaaactatttgtgtttttcttgtggtgatgaattcagcaaggtgacagaggtactattataattcttacttgcagaatgttcatctacgagtgttcatggaagccaaaaatatttaaggaaaatgaacaaactgttaatattattgtacagaaccatggattttttttgaccatcttctataaacatagcaagtattatgaatacattaagttttac

SEQ ID NO: 189800 - DNA, 2693 bp, Homo Sapiens
  misc_feature (2041)..(2049): n is a, c, g, or t
ttggcaaaaatcctttgccctcagaagtgcatttccttattctttagtgtaattgtaatttttcaaattaaatgtgtatatatctctacactttatggattagtaataatgtgattctctatggcttctagcttcaccattaagctgcagttaagggtctgtcagtatcatttgatgctgtgccatttctccttttgcctgccagtttgtcctacccgcaagctggttgatatggggcagaggtttaatagacttctctcatgggtcacattttgtctatcttcaacctagttcctcctcagatcactctgggctacagcatccctcctgtttagatcagcacactgaggcgtggtgtgattaaatgacttgtctgagattagttttcaggcatgtgaaggacttatactcacatgctagcccttggataaagagctatatgcttttccctggagagtggggagatgagaccagtgttcctcacactggagggtgatagaccccaaggggaactgaagagtggagctcagtttcctctcttctcaccctccacctgttcctcatttgccattattcaccttgtcccttgcctgcccctctctattagtacctcatcctccactcaccgttccttatcatacttctcacctctacttagcccattcttgtaggatggaaatatttgagaactactgagttagaactttactatcatatgaatgtgttatgttatatgacaaattaatgcagcagttttacttaccttatgcacaaaggtattcccaggtaggggacaatagtagcattcgcagtggtgataatgcttcaaggtggatgtgtttggaagttttggctttaggaaatggagagtagtgagcaaaacatcagatttcaccaaagaaccaaagtgactccacaattgggatgccgacacaccttgctaggaactgacaacaacttcagtatggtctggagcttaccagctcctaccagtccagtgtgcttataagtgcaaaagaaagtaaaggcaaccccagatttctaatctaccaagtgtccccctaacctcctttcctctctgctaatagattttttgtggttgttgtaaatgttttggtttggttatttatttatttatctatctattgatctatcgattttttttaatttgatgtttacctaagcctttaaggctgtgtcaccaaggtatggccacaaggaagaatagtgtacagagattttaattaatgcaagttctgggaccttttggggcacatgtatcattttacaaatgagctttcaagaccatttaaggaaacagatgcttcatttgctcttatctcatatttcatgacttaagaattttttagtgataataaacatagacttaattccaataattagggaaaattgataaatatctgtcaccaaaccacaagaaatccaaaatcattttaggtttaccaaacattggtggaattccatctttctgagaaaaagggaagatcatagctaatttataatagctcaaattactaatttaataactgggtcaccagtgtttcttgagccatttcagatgtatgtaaaacacaaaatatgccaaatatatattgctataatacactcaagcagtattaatcaatatggtatcacaatgcctattaagaggctttttacaaattactttacttagtaatatctgttaaattaagcattatcttctaagaccttttttggatagtcaaatataagagataaatagtttaattttttcagaccttttttggatagtccaatattagagataaatagtttaattttttcagatataatgccagtcgatgtgatctgaattttagtactagtttacacgtataaatacagtcttaaacctttatgtctgagtctgaaatgaacctgttcacttagactagattttatagtaacaaaatgtgcttttaaatgtctatgaatgaaattcttattcatggtttttattctctccatgattttattacaattttgacactagacaagnnnnnnnnntattatttgtctttcctgccccctatctgtttgctgtgatagtgcaaagaagcacaggaaaatgtttaattatccatttttctgtgatttgtaattgaaaattgttctgtggggttctgaaagtattatctttcttaagtagtaaaaatgacagtggtaatgtagatgtttttataacatactatgtactttcattttagaccaaactagagtcagaacgaatactagcatcagtggggaagaaacctccccaggaaattggaattaaagtgaaaaatcattctggaggtggcatgtccttgactcacaataaaaattttagaaaactattgaaagaaatcacaggggaaactgcacttagactgacagaattgaacaccaaagaatttgctggcttccaaattgggctcttaaacaaggatttgaaacctcagacatacagaaatgcttatgatattccccgtagaggtcttttagaccagctgaccagaatgagatccaatctgctgaaaacgcacaagtttattgttggacaagatgaagattcccttcatagtgttccagttgcacaaatgggtaactatcagaatatctgaagacatggcttctccactgcgagagattgatccagaccaacccaaaga

SEQ ID NO: 189801 - DNA, 2123 bp, Homo Sapiens
  misc_feature (1891)..(1951): n is a, c, g, or t
caaattgatgagcaatgctttaacatttaaagaacaactttgtacaaaaaagttgggaacaaacgaagtgttaatgtgaatgctgctagtggaggagttcagaattccggaattgtcagagaagcacctgccacgtccattgccacagttctaccacaacctatgacatcagctatggggaaaggaacagttgctgttcaagaaaaagcaggtttgcctcgaagcataaacacagacactttatctaaggaaacagacagtggaaaaaatcaggatttctccagctttgatgatactgggaaaagtagtttaggtgacatgttctcacctatcagagatgatgctgtagttaacaagggaagtgatgagtccataggcaaaggagatggctttgactttctaccgcagttgaactcagtgtttcctccaagaaaaaatccagtaacttcaagtacttcagtattgcattctagtcctcttaatgtttttatgggatctccagggaaagaggaaaatgaaaaccgtgatctaacagctgagtctaagaaaatatatatgggaaaacaggaatctaaagactccttcaaacagttagcaaagttggtcacatctggtgctgaaagtggaaatctaaatacctctccatcatctaaccaaacaagaaattctgagaaatttgaaaagccagagaatgaaattgaagcccagttgatatgtgaacccccaatcaatggatcctcaactccaaatccaaagatagcatcttctgtcactgctggagttgccagttcactctcagaaaaaatagccgacagcattggaaataaccggcaaaatgcaccattgacttccattcaaattcgttttattcagaacatgatacaggaaacgttggatgactttagagaagcatgccatagggacattgtgaatttgcaagtggagatgattaaacagtttcatatgcaactgaatgaaatgcattctttgctggaaagatactcagtgaatgaaggtttagtggctgaaattgaaagactacgagaagaaaacaaaagattacgggcccacttttgaaatttcagtgaataccttaatgttctgtaatttgggaagtttctggcaacacagaactacatagaatcagtattgttttcatggcctccagggaaaaaatgtttttcaagtaagagtaaaagggtgatgggattttataccaacaactgtttcatcttaaaaatatgtatatttttatattaaaaattgtacagtatgtcatctacccaataggaaagtcaacaggatctttattttttgaaagctttagccatccactaagtgccctttttcataagagaagaaaattgtgcataaaaattggttatgtttgttttttagtcatcttttttaacatatatttttgattgacaaattgcctttcaaatttttggggctagttgagatttaaagagtttgatatgccttctatttttatggagaaagtaattttaaaatggcaattggtgtttctaagccattgactaataaaacatagggttggctagtaattattttgttaacttgatgaagtcaagtatgactattatttattgtacatttgataagacaatttttggaattttgaattgcacaaattacatgatatcttttgcatttatgttactatattgtacttctgacaaatctttattcctgggtggtatttttaagatatctttacctataaaaaatgtttaaggttcataggactcgacaagagctatctggtgattttctcattagtaacatgcaacgttgtactgcaaaatttcaatcaacatgacaacttataatgagtggagatttcatattaggtactaaatattatagnnnnnnnnnnnnnnnnnnnnnnnnnnnnnnnnnnnnnnnnnnnnnnnnnnnnnnnnnnnnnatcattaactttaattctttctgtactgtgtataatatttttatattattggccttaccataaaattatttagaaaggttgtcaaaataagttatacctctttggcaatacacagatgtatacatctacctactatgatctacaattttaggttaagtgaagcttggggggg

SEQ ID NO: 189802 - DNA, 1025 bp, Homo Sapiens
ttgggttcgcaccaacatggagctctcgcagatgtcggagctcatggggctgtcggtgttgcttgggctgctggccctgatggcgacggcggcggtagcgcgggggtggctgcgcgcgggggaggagaggagcggccggcccgcctgccaaaaagcaaatggatttccacctgacaaatcttcgggatccaagaagcagaaacaatatcagcggattcggaaggagaagcctcaacaacacaacttcacccaccgcctcctggctgcagctctgaagagccacagcgggaacatatcttgcatggactttagcagcaatggcaaatacctggctacctgtgcagatgatcgcaccatccgcatctggagcaccaaggacttcctgcagcgagagcaccgcagcatgagagccaacgtggagctggaccacgccaccctggtgcgcttcagccctgactgcagagccttcatcgtctggctggccaacggggacaccctccgtgtcttcaagatgaccaagcgggaggatgggggctacaccttcacagccaccccagaggacttccctaaaaagcacaaggcgcctgtcatcgacattggcattgctaacacagggaagtttatcatgactgcctccagtgacaccactgtcctcatctggagcctgaagggtcaagtgctgtctaccatcaacaccaaccagatgaacaacacacacgctgctgtatctccctgtggcagatttgtagcctcgtgtggcttcaccccagatgtgaaggtttgggaagtctgctttggaaagaagggggagttccaggaggtggtgcgagccttcgaactaaagggccactccgcggctgtgcactcgtttgctttctccaacgactcacggaggatggcttctgtctccaaggatggtacatggaaactgtgggacacagatgtggaatacaagaagaagcaggacccctacttgctgaagacaggccgctttgaagaggcggcgggtgccgcgccgtgccgcc

SEQ ID NO: 189803 - DNA, 770 bp, Homo Sapiens
ttggctctcccgtatttgctgactcattggtggagtagacttctggctcccagctccactggcccatggggcctccattgtatgaagtcagcataggctgcccacctaatggtggagagcatgaaactgggagcatcctgtggggggcttgtgggggaaaaaggtggttgttttaacccaccgttgttttggggtggtgttgcacactagtagagaatagagtctatgcctttggcaaatttaactgggagtttggattcccacttaagggttttacttcttgggtcctgtggatggtggttcttcgtgtcatgatcccagcccgattctgcaaatgcctccatggggtttaaaaacatgaggctttccaagttcttgcccagtatctggggcagcctccagagtatcacctgggagttcaggttctctccagggctccaggtgtgtgtttatctcgccccctccagctctcctcatcctgctccccattgctccatgtcaggctgttccccattgtgccctgctgatgctttgggtccagggcctcctcccaagtgtggctttaaggagtaagcttgaggatgatgttttttaattattgtaaatcattacctcatttccagcctcccaaggctccatccatcccagcatcttttattctgccattttcctcaccttgtgctatgacaatggggcgttgtgtttcccactagagacttataggagtgttcagtgtataatttcttaataaacactttattattctaatg

SEQ ID NO: 189804 - DNA, 1261 bp, Homo Sapiens
ttattggttacaaagactgcatcaaagaaatcttcaaagcacaaggtacatttaagtgagcaggaagtttgggaaggcatacaggaaaagtctccaaggatctaaattgtagtcttctttttggtctagatgagagaggtggggaagagggacttaaatttctgttagctgggcatgccttattcatatggaagcatttggcccgttagcttgcaaatccctccagtactcctgtgaagtaggtgtatctaaaatagtataccccgaaggaaaaactgaggcactaagaggttaagagtccagtctatatagttcatcagttgcagaaaagtgattttcgtgtttcctttttgactgttgtaaaaacagtataaataagttttcattttatatttcaaagcaccctatgaagcagacactagatatcctcagttaaacaaaaatgattacaaaggaatacatttatatgattgaataaaaacctgattaatcatctacaggctcagaatacacttttaaacctacatgaagctcattcttcaccatttccatcagtgggttatgtctagcctgcaaatcatttgtaaaaactcagtctggtacataggactccactttttaataatgatgcctgaacaccaaactcaagagttgtgaatgcccaagaaagattatgggcagcccacaaagtgaatatgaccattcttcctgtggttttctactacatgccatggcaactccgtgactaagatataaagtcgattacatctcatttgaaattcactcctggtttgcattctttcttttatttaatttagaaaattaaaaataataacttataaatttgatctcattatcacaatggtacctttgaaaagcagcttatgttactctatggaagataatcaggtaaacatgttaccaaatgatcattaataatttaatgtccttcaagttcaagggcagggtaaatctgtgtatactacttataacctagtagagattgattattcaagtatcagcaatattagtccttaaaatgttatcgtttgtgtagtgcaaaatatatatgtgtatatatgtacacaaactaaactactggacaacaaaaagcaatgtaatcatcacaaactaagattttcttgtgaacaccacaatccagttcattctgaggtcatccagttccagtagtcttcttgaggaaaacaccattttcctcagttcagttttcttctccttctttgatagtataaatacccaa

SEQ ID NO: 189805 - DNA, 1599 bp, Homo Sapiens
  misc_feature (360)..(369): n is a, c, g, or t
ttggctggatgtagactcagaagactgggagaaaatcctacaacttgtttatatttttaatcttttcctttcagaattgtgataactaaaagtgcttgttacaatgtctcaacttatcaaacattcataaatataattcttaaaattaactatattttttaaaaagatagaatatctagagaatattatcaggaaaaaggaactgaaagagctctgggaaattttatctgtctaaatatatgcagcactaagattcttagtatatgttagacatcagagtgtaaacccaattttcgtatgtagtcaaattgatttatcttttattttatgcttttgagcttgttgtaattcagggaaagnnnnnnnnnncaattccgaggttcttaaaaactctctagtcatttcttttgtactttcatgaattcgttgtcttcaaataaatgtttgaactttggggaatttatgctctatagcatttaaagttttgattcagtggttcttcaactgatacctacttataaaaaccctttcattgtataaatgtacaagttattctttagtttcagaggaaccatgatatgccattttattgagtgctagctaaaagtttattttgttttatttaggtttctcacactcatgaaaatgaaaattatctcttacatgaaaattgcatgttgaaaaaggaaattgccatgctaaaactggaaatagccacactgaaacaccaataccaggaaaaggaaaataaatactttgaggacattaagattttaaaagaaaagaatgctgaacttcagatgaccctaaaactgaaagaggaatcattaactaaaagggcatctcaatatagtgggcagcttaaagttctgatagctgagaacacaatgctcacttctaaattgaaggaaaaacaagacaaagaaatactagaggcagaaattgaatcacaccatcctagactggcttctgctgtacaagaccatgatcaaattgtgacatcaagaaaaagtcaagaacctgctttccacattgcaggagatgcttgtttgcaaagaaaaatgaatgttgatgtgagtagtacgatatataacaatgaggtgctccatcaaccactttctgaagctcaaaggaaatccaaaagcctaaaaattaatctcaattatgccggagatgctctaagagaaaatacattggtttcagaacatgcacaaagagaccaacgtgaaacacagtgtcaaatgaaggaagctgaacacatgtatcaaaacgaacaagataatgtgaacaaacacactgaacagcaggagtctctagatcagaaattatttcaactacaaagcaaaaatatgtggcttcaacagcaattagttcatgcacataagaaagctgacaacaaaagcaagataacaattgatattcattttcttgagaggaaaatgcaacatcatctcctaaaagagaaaaatgaggagatatttaattacaataaccattttaaaaaaccgtatatatcatatgaaaaagagaaagcagaaacagaagtaagtatcaaaaatataaataccttgtcaacttcctgaaagaaagtttaaagtc

SEQ ID NO: 189806 - DNA, 1430 bp, Homo Sapiens
  misc_feature (101)..(113): n is a, c, g, or t
  misc_feature (126)..(149): n is a, c, g, or t
  misc_feature (570)..(587): n is a, c, g, or t
  misc_feature (591)..(599): n is a, c, g, or t
  misc_feature (620)..(646): n is a, c, g, or t
  misc_feature (776)..(827): n is a, c, g, or t
  misc_feature (883)..(906): n is a, c, g, or t
ttggatctactctatttacactcccaaatagcgccatacatgctaaaccgtagagaatgagctcgcttgtgtctattcatcatgtttagcctttggattcnnnnnnnnnnnnnccttctattcctnnnnnnnnnnnnnnnnnnnnnnnntttttttctctcttgcaaaaccattttttgggctgataacgtatgagcttttccctttgcactgaatgatgttctctccgtctcatcggcagtatggggggcagctgtcccagtgtcaatgtttactcaagggtgttcttaggaggcgtgcgctctctactatgccttgatgttgcctaccttattgtggtatcgtggagtttaaaagatcaagttaggatgctgacttaggattattaatgaaagtgttgcaccagttttttcatgttgtaaaactaaagaatttcgctctgcagtttgaaaaactgtggccacagctgtgacttgcagcccacctgccacccaggacgggccctgcactttgaataggctttccattttgttttggaggttctcactttgaaccttcttgtttacagannnnnnnnnnnnnnnnnngagnnnnnnnnntgtttactcttccatcatttnnnnnnnnnnnnnnnnnnnnnnnnnnntggaggatgatttaaaagatgctttctatctctgggaaaaaggagcagcatttggccatgttcttttgtttttctattcctgtcccaaatcaaagagcatggttctcaggaaaaccagttccccagtttnnnnnnnnnnnnnnnnnnnnnnnnnnnnnnnnnnnnnnnnnnnnnnnnnnnnccccaacttttagcactgatactacatattgctctgttaaagaattttctctgccnnnnnnnnnnnnnnnnnnnnnnnncgcttaaagctggagtttgacattctgctttcagatgctgtctttttattagtgagtgatgatggtttgctaataatcaataggtaataattttttgtaatcccatcaagtggctccatatgtttctgctctctcgtgactgtgttaatgtttaactgttgtaccttaaagccgaaatcagtaactatgcatactgtaaccaaggtattgggcttacagagttgtttgttgtataaagaaaattttaaatgttgttgcaaactaacgagttacaccattttaaactttctttcctcccccctttttttgcccacaaatggtattataatgcttgcttagtcaaagaagagagactaaacaaggggtaaaaattttaacagtacagaatttgcccatcatatcattgccttgattctaactgtttgtgtcctaagatgcaaaagaagtcagtgggcttttaactgtttacaatagaatgtgattgtaaaatgtacagtttggttgtgtttgaattatgaaatttc

SEQ ID NO: 189807 - DNA, 1682 bp, Homo Sapiens
ttggcacaagtccagctgcaacccagagatagtggaaactgaaattaggaaggaaatcatcaataactcagtgggctgacccatccctcccaggcgctggggaccaacctagcaatgaaggttgggaaggttgttcccttcccggtgccaggtccagatttccctccatgatttgggaaccagcttaggcaaaagagtccccacaagatgaaaataaagatcctagttaccattcaaaggatgctaactgtgtgtcaggccccacactaagtgctctgctctgatatactcaaggccattaatcttcaggactcccattgacgtaggtgtttcattccccttttacagatgaggaaactaaggcttggaggttaaatgacttgccagaagttggaatttttttcctctttgaacataacctctcccttctccctaaaggtaaccactattctgagtccaatcatcaaggttttgcttttctttttagctaagtatgcattcctcaatagtagacagtacaacatgtttataacaagccaattacattatgttctttgcatgttctaaagttgtgtatgtgtgtgcacatctgagcacgtgcacatgtacacctgagccaaaaacacgagaacccactgatctcaccactggggcaagctaggtcagagcttagtgattcacactgaaattggcaaattggatttaacccaattaatagtgtgtgtgtggcaggagtcatgtccctcacatcctttgtacaaatgaaaattactcttaattccttcagatttataataactctgtactttggtttcagggtgacatttgggaaggattttgtttagaattaatggagtggcacattttgcagcctttttgcttgattgcatgtaatggaaatgccctatattttcctgcaaaataagtactaaattcattatcgttaagcaaatgtacaatatgctcaggcaccgcagagagctgggcacgggcccatgtgagcatcactttggaagtagggctcttcaacagggacccttgaactttaaagaaaggaacttctttttgccttctaattgatcatttagactattctggctaagtctgcccacatgtaattaccggctaattcaagcgaggaaaaatgtaagtcatttagaccaaagccaagcagtttctttgcgtgggttactcaagggcttgtggttacttgtatctcctctatgtgaacttgactttgaaagacagagctctagtgtgccagcctgctaagtcctgtaagaatagggaagggcggaggggggtgggcagtgactaggggacgagaagcatggggaaaatatttgcactctaaacatacagagatagaggtggggcttgtggtacttaacacttgtagccatcaactgactgagaccttgggctaaataatcaattgtgctgatattacatctcgttatggaatgttcctaaatatgccaggtagacaccagcccaagtaccctcctccagaagtctgtgactaccttgtcactactttaggcccattccacaaagcccatctctggtttgagaattcattttgatctgtatctacaccacccaaagttaggcctcctataatgtccaaaacattcctttcagcctttttatttcttactgtactgtctcttactgtactg

SEQ ID NO: 189808 - DNA, 1481 bp, Homo Sapiens
ttggctttcgaattctgcgggtgcaagtgaatcatgagaaaaaccagaatgttcacatggagtccgaggtttatgacaccccagagaacatcgtgcacggcagtggaagccagctttttgatcatgttgctgagtgcctgggagatttcatggagaaaaggaagatcaaggacaagaagttacctgtgggattcacgttttcttttccttgccaacaatccaaaatagatgaggccatcctgatcacctggacaaagcgatttaaagcgagcggagtggaaggagcagatgtggtcaaactgcttaacaaagccatcaaaaagcgaggggactatgatgccaacatcgtagctgtggtgaatgacacagtgggcaccatgatgacctgtggctatgacgaccagcactgtgaagtcggcctgatcatcggcactggcaccaatgcttgctacatggaggaactgaggcacattgatctggtggaaggagacgaggggaggatgtgtatcaatacagaatggggagcctttggagacgatggatcattagaagacatccggacagagtttgacagggagatagaccggggatccctcaaccctggaaaacagctgtttgagaagatggtcagtggcatgtacttgggagagctggttcgactgatcctagtcaagatggccaaggagggcctcttatttgaagggcggatcaccccggagctgctcacccgagggaagtttaacaccagtgatgtgtcagccatcgaaaagaataaggaaggcctccacaatgccaaagaaatcctgacccgcctgggagtggagccgtccgatgatgactgtgtctcagtccagcacgtttgcaccattgtctcatttcgctcagccaacttggtggctgccacactgggcgccatcttgaaccgcctgcgtgataacaagggcacacccaggctgcggaccacggttggtgtcgacggatctctttacaagacgcacccacagtattcccggcgtttccacaagactctaaggcgcttggtgccagactccgatgtgcgcttcctcctctcggagagtggcagcggcaagggggctgccatggtgacggcggtggcctaccgcttggccgagcagcaccggcagatagaggagaccctggctcatttccacctcaccaaagacatgctgctggaggtgaagaagaggatgcgggccgagatggagctggggctgaggaagcagacgcacaacaatgccgtggttaagatgctgccctccttcgtccggagaactcccgacaggaccgagaatggtgacttcttggccctggatcttggaggaaccaatttccgtgtgctgctggtgaaaatccgtagtgggaaaaagagaacggtggaaatgcacaacaagatctacgccattcctattgaaatcatgcagggcactggggaagagctgtttgatcacattgtctcctgc

SEQ ID NO: 189809 - DNA, 814 bp, Homo Sapiens
gaagggaaacagcacgcccgaggagccgtccaggtcctcctccatcagaggcacagagaggttatcctggtcccacaaggccactgccggttgttccatcgggatgtgcctgtggacatcagcttcttcaggttccccagaaacagcactttgctggcccggtgccctttgtagctggcctcctggaggacggtcccctgctcgggggtcaataacccgaatcttgcggtctttgcaggtggtggccaacaggctgccgttggtgttgaaggacatggagaggatcacatcttggtgacagctaatcgtactcatggggcttgtgatgacagactcctttgtatccaggttccagatcatcaccttgtagtcatagccagcactgaagaggatgttggcggccgtggggtgccactccaccaggcctactctgcgcgcgtggcccacgagttccttcctgtaggccgtgaggttcctggtcagcagctgcttggggatgctccagatcttaattgtggcatcttcagaacaggaggcgatctcaaaatcatcaaaagggttccacttgacatccaaaacgttgcctctgtgcccgcagacttttgggtagtgggggtccaacttccctgtctggtgcagggggatgacgaggaaggcccctccaccagcacactcagtcacaactgcaatgaagtgggggttcacggcacagaagtggttgtcgtgaacgctgcgggtgataggcacggagtcgtagcagttctccttgctggctggtttgccaaagacatgacggaacttggagctccgccaa

SEQ ID NO: 189810 - DNA, 886 bp, Homo Sapiens
ttggatcatttgcttgagcgtgacactcagctatttgagaataacattgagatggttaaatttaaattaaacatgatatgagacgccctctagtcctccttccccagttcttctgcttcacccatgaaggcttctttgtgaagctctggaaacttctgagccaaacttgcttcctgctgtgatgctgttcaaaactttgttgtttctcagaataacactccagttgggactaatatgagttacgaggtggaaagcaaaaaagaaatcccaattaagaagaacatttttcatatgtttccagtgtcccagccttttgtggactacccttataatcagtgtgcagtggtcggaaatgggggaattctgaataagtctctctgtggaactgaaatagataaatccgacttcgtttttaggtgtaacctacccccaaccacaggagatgttagtaaagatgttggcagtaaaacaaatcttgtgactataaatccaagcatcataactctgaaatatgggaacttaaaggaaaaaaaagccctatttctggaggacattgcaacctatggagatgcattttttcttctgccagcattttccttcagggccaacacgggtacctctttcaaagtatactacacgctcgaagagtctaaagcaagacaaaaggttctatttttccatcccaagtacctgaaagatctggcccttttctggagaactaaaggtgtgactgcataccgcttgtccaccggcttgatgatcacaagtgttgcagtggaactgtgtaaaaatgtgaagctgtatggattctggcccttctctaaaactgtaaagacatacctgtcagccatcactattatgacaacaagctaccctaaacatggtt

SEQ ID NO: 189811 - DNA, 832 bp, Homo Sapiens
ttggctcaaaatcacccccgcgcttccttcactccttccttagagccggagcgcgcagggaccatgtcggcggagaccgcgagcggccccacagaggaccaggtggaaatcctggagtacaacttcaacaaggtcgacaagcacccggattccaccacgctgtgcctcatcgcggccgaggcaggcctttccgaggaggagacccagaaatggtttaagcagcgcctggcaaagtggcggcgctcagaaggcctgccctcagagtgcagatccgtcacagactaaggagatggcaggcattgacagcttcactccatgaaggccatctctgtttctctcctccgcttaaccaagctgttgtggtttttcagcatagtgttgtatgttccattgctagctgtcctgctgtttaacacagtgttgtattttttttctaaatgtacataattagaaaagaaaataacaataggaagctatgtgtatcttctgtgtaaagcagtggcttcactggaaaaatggtgtggctagcatttccctttgagtcatgatgacagatggtgtgaaaaccatctaagtttgcttttgaccatcacctcccagtagcaatttgctttcataatccatttagcaatccaggcctctgttgaaaagataatatgagggagaaggggaacacatttccttctgaacttacttccctaagtcactttccttatgtatcatctaatacaatgatggttgagtgaaaatacagaaagggtgtttgagtattcagatttcataaacacttccttggaatatagctgcattaacttggaaagagcctgttggg

SEQ ID NO: 189812 - DNA, 1557 bp, Homo Sapiens
  misc_feature (1174)..(1232): n is a, c, g, or t
ttggcacagatttttgtagtgtaataagaattaattccactgctccatttgaagaacaagagaattattttttgttatgtgacgttttaccagaagatagaattcttagagaagagcttcagaaacagagactgagagaaattctggaacaacagcagcaagaacgaaatgataccaattttcatggcgtttgtatgttttgcaatgaagaattccttggaaacagatctgttattttgaaccacatggccagagaacatgctttcaacattggattgccagacaacattgtaaactgcaatgaatttttgtgtacattacagaaaaagcttgacaatttgcagtgcttgtactgtgagaagaccttcagggacaaaaatacacttaaagatcacatgaggaaaaaacagcatcgtaagattaatcctaagaacagagaatatgacagattttatgtcatcaattatttggaacttggaaaatcgtgggaagaagttcagttggaagatgatcgggagttgctggaccatcaggaagatgactggtctgattgggaagaacaccctgcctctgcagtctgcttattttgtgaaaagcgagcagaaacaattgagaagttgtatgtccacatggaggatgcacacgaatttgatcttctcaaaataaagtcagaacttggattaaatttctatcagcaagtgaaactggtcaattttattcggaggcaagttcaccaatgcagatgttatggctgccatgtgaagttcaaatccaaagcagacttaagaactcacatggaagaaactaaacacacttcgctgctccccgatagaaagacgtgggatcaactggagtattattttccaacctatgaaaatgacactctcctgtgtacactatctgacagtgaaagtgacctgacagctcaggaacaaaatgaaaatgttcccatcatcagtgaagatacatctaaactgtatgctttgaaacaaagcagtattttgaaccagttgctactataagagtacttgaaaacctagaagaaactaccacagaagcaatttttcatgtttttctcctatgagacagatatgaaagaacaatttaaatttgaacatcaacaaaagattggtccttggtgaaataaacttttcaaaaatgaatgttcttttcnnnnnnnnnnnnnnnnnnnnnnnnnnnnnnnnnnnnnnnnnnnnnnnnnnnnnnnnnnntaagatgaagactttgtattttggctgtaaagttttattgtgtgatcatcttaaattatctcacttcattaaactcataattatatatagaagtatatgtcaattacaaagaaatgaaatgttcaaattatttataaacctgatttttcaatcagtagtttcagtctcctccccaaggaccttcttcatccaacaagtttgcaaatttgaatatcccttctgtactatattgggtgagctgtaaatgtaatgactaaaagaaaagccacagaagaagaagaaatggtcaaagacgtggataatatgcaaattggccattatatta

SEQ ID NO: 189813 - DNA, 1054 bp, Homo Sapiens
ttggccttaatttaaattcttttcttttccatttagagatatgtttttttctttaccttcatacctttctatttcttgctaatttctatcactaattccttataattgtccctgctccccttcttgatctcttcagggggaatactaggcagttttgtatcttctgatctcgtaccctgagacttcatctgaatgtgctctgccgccttcttatctgaactagatgaattggccataattatgaataggaatattaatgaaccagaggacatactagtcacatgttattatacactaaaaaataggaagtcatcttgaaaggcagttaatgtactgcaaatgtccctatgacttctttgctttctcttataccaaacatgcaggtatttaatttgtttaatgagggttgagtggagttatgtgtcgcttttattcggattgacgaaaatcaaccataattttcaagggatcttcatgggttgtgactggaagctgaccttagtcttgcgtctcatcctttatgatgttgagaaatcatctaatttctcagaactttttcttatctctaacacagttattaccataataatattgtctccatttatcatacaggatcattatgaaagtaaaatgaagtagtatatatgaaaatgctttttaaacacaaaagctttatacaaaatattgttgaatttaaataaggtaaatcttttttagtttatatatttgcagactatacatgttggattaaatgggcaattaagttttataggaatttgcttcctaagtctacttttgaagaggaaaacaggaacgtaccatatattttgctaagggtaaaatatttttggtgaattgcagacatttaatttcacttgtctgaggtaaaacaataaactaaaatacatgggcatgcatcttacactgatcttattagaggtcagtgctaagtacccatcttgattgaagttagctcagatgtggagaattcataaaatgagggtccaggaaaagaaagttaaggggaatctcattttctctctgtaattcattc

SEQ ID NO: 189814 - DNA, 864 bp, Homo Sapiens
ttggctcgttgatgccactaatagtggtcaagcagaggatgcagatgtacaactcaccataccaccgggtgacagactgtgtacgggcagtgtggcaaaatgaaggggccggggccttttaccgcagctacaccacccagctgaccatgaacgttcctttccaagccattcacttcatgacctatgaattcctgcaggagcactttaacccccagagacggtacaacccaagctcccacgtcctctctggagcttgcgcaggagctgtagctgccgcagccacaaccccactggacgtttgcaaaacactgctcaacacccaggagtccttggctttgaactcacacattacaggacatatcacaggcatggctagtgccttcaggacggtatatcaagtaggtggggtgaccgcctatttccgaggggtgcaggccagagtaatttaccagatcccctccacagccatcgcatggtctgtgtatgagttcttcaaatacctaatcactaaaaggcaagaagagtggagggctggcaagtgaagtagcactgaacgaagccaggggttcagatgacactgctgcatcctggtcacattctctgtctcctggaatgctcccacctcaagtggagttagaaggaaggtagaggggctctcccccaggattttggtgttttgactaacaccagttcctgccaacctctgttgccaccacctttccttccaggccctaagcacgtgcagcaaagcacaccacagcacctttgataacctctctccatcctgggcctgatgacctgctctagactgttataaagggataagcagctcattcccctggttccctaataatagccctttaa

SEQ ID NO: 189815 - DNA, 1604 bp, Homo Sapiens
actttgtacaaaaaagttggggttttccaaccttatgacacagcctctgaacaactccacgaggcaggctacgatgcctacatcacagggctgtgcttcatctccatggccaattacctaggttcttttctcagccctccaaaaattcatgtgtctgccagatcaaaactcattgaacctttttttaacaagttatttcttatgagggtcatggatatcccctatctaaacttggaaggaccagacttgcagcctaaacgtgatcatgttctccatgtgacattccccaaagaatggaaaaccagcgacctttaccagcttttcagtgcctttggtaacattcagatatcctggattgatgacacatcagcatttgtttcccttagccagcccgagcaagtaaagattgctgtcaataccagcaaatatgcagaaagctatcggatccaaacctatgctgaatatatggggagaaaacaggaagagaagcagatcaaaagaaagtggactgaagatagctggaaggaggctgacagcaaacggttaaacccccagtgcataccctacaccctgcagaatcactattaccgcaacaatagttttacagctcccagcacagtaggaaagagaaatttgagtcctagtcaagaggaagctggcctggaggacggagtgtcaggggagatttccgacactgagcttgagcagaccgattcctgtgcagagcccctctcagagggaaggaaaaaggccaagaaattaaaaagaatgaagaaggagctttctccagcaggaagcatctcgaagaacagccctgccacactctttgaagttcctgacacatggtaaccaagacctgagggcagcaaaccgctggtgctgtcgctgtgagcaagagccggctggcacatttggaagccgcactgtatttaacttaatcaaatgtggtatgggaggggttggaaaccaagttgtctcctgggggggagaaaacaggttttatttttgtggctgtggttttttcccctttttaatctaactgcctgttgacattgacactcatcacggttgtaggctgtcatgaatgtgtacgtgcttaaccagtgaattccgtgttgctcttgtgaggcctttcctgtcatgacccagtgtgcttaagaacctgcctgatggggagtgtcggctgtgaaatctgcaaaaagagctgacattccagctgctgtgatcatgaatttgggggtgtactgtcctgcctgtgcatcttctcgcactgagattttgaggcagttgcagccctcggttagtctcccagtggaaaaatcggttgtgcctccctgcttcccaccatagctgcctgaaaacatgacgctctcaagcttgtccttccttcaggaagatgtccactcatgcccacccatgagagggcttgccgtatgccctggcctttgggcatatttatgtagagttcctttctcctaagacgtgagtttctcatgggggatgtacgagtaaaaaggttaacttctgttcttatgcgtggcgctgtgttcactttccagagtctctgttcgtttgtttggatggcggtctcggggtacggcagc

SEQ ID NO: 189816 - DNA, 547 bp, Homo Sapiens
  misc_feature (213)..(237): n is a, c, g, or t
ttggggcccattgccgctgaaacttctttggaaggaggaagggggtgagggagcatccctttgagtttcgcctcttctcgaggcggtggtgggaagggagacatacttaatactgccctcttaatccaacggaccttacatcgtgtagactgccgggagggcggcgggaaaagggcaagacgggagttggggaagggaaggagccaggaagcnnnnnnnnnnnnnnnnnnnnnnnnnccctttttcaccagtgtggcggggttccatgcacgcccgcctcggcagtgggtcacattttgccatcctggggggggcggtggaggtggcggcggcaaaaaactctttttgacacaaaatagactggcatgctggctttaagtgttctgaacgccccgcacctagcagccagactgggattagatacccaagaatgcttaccacaaggcctcgtcagttacatcggcaaaactgctcgccacaacactacaaaccccaacttaaaactcagaggacctggcggtgcttcatatccctcgagaggagcctg

SEQ ID NO: 189817 - DNA, 1238 bp, Homo Sapiens
  misc_feature (951)..(959): n is a, c, g, or t
  misc_feature (1037)..(1081): n is a, c, g, or t
aagcgttttcaggcacaagaggtctttcccagctcccgctcatctcagccctgcctgccctcccagcctctctggtggagatgggcatgaggccgtgatcagttgcagcctgattctcagtattcctcattctccccaacagagtgtgatgctggatcttgccaagcgcagtctcagtggtaaattccgcctcgtgaccaagtttaaaaaggagaaaaacaacaagaacaaagaagctcacagtagcctgggagccccgggacctgggcgtgaccaaggtgggccacatgaagaggatcctgtgtggcatcaaggagctgatccgcagcgcccccgccgtcgaggcctagcctctgtcctctcatcctgtggcctccacatccccgccgccgaggcctagcctccgccctctcagcctgtggcctctgcgcctcctgccactgaggccctgggcagatgctgcagcccgcccccttctcatggtgctacttcctctgtcagctacagaaagcctccgtgacaccgtccaccagagctctggggtctcgaacataacaacacagctacctttgaaacaacactttctccagctcagagtcacctggggcacatgtgtcacggccactcagctctcgcccgcctgtgctgtgggccagggaatccagcggcgtctggcctcctgggcactgcttgcctggcctcgtgcttggattgtcccgggggctcctctccgtgtgtccttctgtggccgcaccgtgtggctccgcctcctggcccccagccagttctcagaaacgtggctggggcccagccaccctgtggcttcacagcagcctgcaagggcccctgtttgttgatgcagcttttgttgaacaaaaatcgtgctctttcctggtttgaaagtagcatggatgtttccagtcttgttgattgtaatttgacgtgaagagnnnnnnnnnttcctcctgcgtgagccaaggcagcgggtgctgtttcccaggcagggagcccctccctgggtgtcacagggcctgtgnnnnnnnnnnnnnnnnnnnnnnnnnnnnnnnnnnnnnnnnnnnnnactgtgggctggggacgcctgcccttctgtctccggacgctctagcgagttcagcttggggtgtgagtgagacagctcgccagctgcatccctgcagacagagatgtgtgtccacatgagtgtttctgtgtgggaaatgcttcctggctctgggaaa

SEQ ID NO: 189818 - DNA, 959 bp, Homo Sapiens
ctttgtacaaaaaagttgggaagtctcattcctgtcactgagccttataggtgtaatatatgtggcaaagaattttatgaaaaagctttgttcagaaggcatgtaaagaaagctacccatgggaagaaaggaagagcaaagcaaaacctggaacgggtgtgtgaaaaatgtggaagaaaattcactcagctaagagagtataggagacacatgaacaaccatgaaggagttaagccatttgagtgcttaacatgtggagtagcttgggctgatgcccgatctctaaaacgccatgtcagaacacatactggtgaacggccctatgtctgtcctgtatgtagcgaagcctacatagatgctcgaacactccgtaaacatatgactaaattccacagagactatgtgccttgcaaaattatgctggaaaaagacacccttcagtttcataaccaaggaactcaagtggcacatgctgttagcatcttaacagcaggcatgcaggaacaagaaagcagtggtcctcaagaacttgagactgtggtagtgacaggagaaactatggaagctctggaagctgttgcagctactgaagagtatccatcggtatctacactttctgaccaaagtattatgcaagtggttaattatgtattagcacaacagcaaggacagaagctatctgaagttgcagaagctattcaaactgttaaagtagaggtagcacatatttcaggaggagaatgagtatgttaatgaagataaaaagaagtgacatctcttgtacactgaactcacagaacatttgtttacaattctgtgtgactgtctgcttggagtttacatatcaaagttctgggctgtttggtaacgtaacgtttccaaacattttgtctggccaatgggttctatagaaaagtccgtttagtgtagagaaattgaaaacagatctattaggttgg

SEQ ID NO: 189819 - DNA, 1107 bp, Homo Sapiens
ttggggagcagggcccagtgctgaggttgctccctggccactgtccacctccagaaatccttccacaacctgatgatgagtgacaagaagtcagagcgcttcttcaaggtgctgcacgaccgcatgaagcgggcccagcaggagaccaagtccacggtggcagtcaacatgaatgacctgggcagccagccacatgaggaccgcgagccagtcgaccccaccaccaaaggccgcgtggcctccttctcgatacctggttcctcatcccgctactcgctgggccccagcctgcgccgggggcacgaggtgagcgaacgtgtgcagagcagtgagatgggcacatccgtgctcatcatgcagcccatcctgcgctttctgcagctgctgtgtgagaaccacaaccgggacctgcagaacttcctgcgctgtcagaacaacaaaaccaactacaacttggtatgcgagacgctgcagttcctggacatcatgtgcggcagcaccacgggcggcctggggctgctggggctctacatcaatgaggacaacgtgggcctcgtcatccagaccttggagaccctcactgagtactgccagggcccctgccatgagaaccagacttgcattgtgactcacgagtccaatggcatagacatcatcaccgcactgatcctcaatgacatcagccccctgtgcaagtaccgcatggatctggtgctgcagctcaaggacaatgcctccaagctgctcctggctctgatggagagccggcatgacagtgaaaatgctgagcgaatcctcatcagcctgcggccccaggagctggtggacgtcatcaagaagcctacctgcaggaggaagagcgtgaaactcggagtgagcccacgtgaagtgggccataacatctatatcctggcgctgcagctctccaggcacaataaacagctgcagcacctgctgaagccggtgaagcgcattcaagaggaggaggccgagggtatctcttccatgctcagcctcaacaacaagcagctgtcacagatgctcaagtcctcagcgccagcacatgagaggaggaagaccccctggcctactatgagaaccacacgt

SEQ ID NO: 189820 - DNA, 1210 bp, Homo Sapiens
ggaaatcagtagtaaacctacaattatggcaaacaattctaactatctagttcattattaattaccattaagaaaaagtctgtcatcacactgatttagtaagttttagggaatggtcaatttctcaacaagatattaattgtattaattcagcagtattattaaagtcctctttatgtcaaataagaggttgtaaagattacactaaccttttcttttatctgccatgatgaatttccttctggatacttccttttcccccactgcagtatgaccatgccacgagactgaagcaggctgccacacacatccctcattaacttggatacacatgagagctgacataagctgaagccatcgagaaagcctgcaatatgctgcaggacctcaaaaggaagactacttagatggtcattatgtaatcccaacacacagtttctagcaggctccactaatactgtagatacacatggctgaactccaaatgacctcaaatggcggtcatgtataatctttgctccttgtattgatggacaaaatctacgctgagaataggtacaaccatagtaagctaaagggcacctctgttccatccagccattgagtccagcatgaatgtcaccatgcacattcttaaagtgggaagaaaattctttccttctaaataactgtccacacacaaaggtaaacattgaacgctgcttgggttggtacctagcgacacattccaatactaaatccagcccaagtgtctgaaacggacttggatttgaaagctgtggattggcatgatcacaagctgaagctgaagctatctccccaaccattgtacttgtagctaatattgcagatggaagtgaaaaagtctgagtcccaacgtcaatgtgataaatatcagccatgcggctatcagatatacccctccctcctggagaatctcctagacaaaaaagcaatgctgctgtgatcagatctattccttggaggcccataggatcttctgcaacttccaaatctgatgtatctactgctttatcttcctttggtttagaccaacatgaattagaaagaaaattgaatgaaggagcatgactgaaagataagacatccacattcttcacgtcccctaagtctacttttttccaacacaattcaccttcaccttcatcatctggcatgaggatatgctgaactgtgccattaggcccaa

SEQ ID NO: 189821 - DNA, 1099 bp, Homo Sapiens
ttgggtgcattgaattttaatttatttgaaaaatctgcagctgctactgaagaagagaaagataaaaagaaagaacctcatgatgtaagaaattttgactatactgctcgaagttggactggaaaatctcccaaacaatttctgattgattgggtcaggaagaatcttcccaagagtccaaatccttcctttgaaaaagttccagtaggtagatactggaaatgtagggttagggtaatcaagtctgaagatgatgtcctggtagtatgccctacaatcttaacagaagatggcatgcaagctcagcacctgggagctactttagccctttaccgtttagttaaagggcagtcagttcatcagttacttcctcccacttaccgagatgtttggctggagtggagtgatgcagaaaagaaaagggaagaattaaataaaatggaaaccaataaaccacgtgatctttttattgccaaacttctgaataaactgaaacagcagcaacagcagcaacaacagcattctgaaaataagagagaaaactctgaagatcccgaggaatcttgggaaaatttagtttcggatgaggatttttctgcactgtccttggaatcagcaaatgtggaagatttggaacctgttagaaacctctttagaaagttgcaaagcacacctaagtatcagaaacttctaaaggaaagacaacagctacctgtatttaaacatcgggactcaattgttgaaactcttaaaaggcatcgggtagtggttgtggcaggtgaaacagggagtggtaaaagtactcaggtaccacattttctattggaagatttgcttctaaatgagtgggaagcaagtaaatgtaacattgtctgtacccaaccccgaagaatctcagcagttagtttagccaacagagtatgtgatgaattgggctgtgaaaatggacctggaggaagaattccttgtgtggatatcagatccggatgggaatctcgagcttgtgaatctaccaggttactctattgtacaacaggggttttgctaaggaaacttcaagaaggatggtcttctaagtaatgtgtctcatgttattgta

SEQ ID NO: 189822 - DNA, 857 bp, Homo Sapiens
agcaggctctgctatatcacctccaacagctgcaaacccacacgcagccgaccgtcgcgcccggctgcccccgtggggcgcacctaggagatgaagatgccctcgtctgtggggtcgcaagagaaaccagcgtggcccctggcacccccgcggatgctgatgcccagcctctccccaggtgccttctggatgcacagttcccgtaggcccgggggtgccgggtccctccgcaccagcagcgacagctccaggcagggccggagcagggcactgactgcttcttggtgcgtggcatcccgcacgtcttgcccgttcactgccaggatgcggtccccaacccgcaggccgctgcgagcggccaggccccgcgggagcaccttggagatgaacacaccaggctcctggacaccaaacgggtggctggaatggtcggagcctccgacaatactaagccccagagggcccccagctcttggcagacggatctcctccactgggtatggcccttccaacgcggcagccagcaggctgggggccaggctcggcaacccaggcaccccgggggtggcagtggttatgctggtggtggcaacagcagcggtggggggtgaggaatgtggcagagggctgggaggaagagggcccccagcctcccgctccaacagcagggcgatggtgggggaggcagcggtcagcagggagacggcgtggtcatgcctggcctcagtcacgtccactccattaatagagaggacgcggtcgccaacctgcagtgtgcccgcgcggtgagcagcaccgccctcggcaatgcgggagacgaagatgcccgcatcccaacttttttgtacaaagttggc

SEQ ID NO: 189823 - DNA, 1519 bp, Homo Sapiens
ttggctctcttttcctcgtacatcctggtttgacgcccttgtggtcacccagtcatttctcctgctggcgttggcctgcggagtgagcggctggcgggagaggccgtgcaggaactggctcctggtgggagacataggctccacttctaaatcctggcctgggtgctgaggccagaggccggaagccgggaacggaatccacccatcgctcctgggtcctgccaaagggtagggtagctgctggggcagttcccttaagcctgccaggcccccgaggatgcaggggaagaaagaacctatcattgctgccaaacttcagagtgccagagcgtcacccaccacctggtcctgctaaccaaagcaagcaggaaatgccacgtagctcccccgaccccaccccgcctcaccttcaccaaggcctatggcagcaaaacttactgtgtttcaggcttttcatcttataaaagctgtgtcagtgttgctgaacttttcccaagaggaggagaacatgctcaaggaaactctggagtataagatgtcatggtttgggtccaaaccagctcccaagggcagcatccggccgtctatctcaaaccctcggataccatggtcctagaggggactacccaaggatggagctccgtgggttgacactttttctgtgaaaagaacactgacacaccagtctgggtgggtttttaatcactgtaactgcagtattttgtacaagtgtctaaacattgtttacaagactaaggcccacttccctgcaggctgacctgaacctcagggggtagctgatcctgtcattctggtcaccaaacaggagggtcctggcactacccagatttccacagtgctgctaatatcccagctccagccagcaccccatctgcacctgaatcctctaacttcacggtagcacttacagctgaagccatcagcatctggcaggcacacctgagtcaccatgtagcgctgctactggaggtagagacggccctttgagatggtgcccagcaggccaaacccacctgcctctgccaggaacagccaactccatgggaactctatgggagtggcttttaaaaattcagatgagttagaagctttttatcccttcctctcaagaaaatattctttcaccctgtctctcaaaccacctagaactttagaggatccatctttaagggccggtgtggatgaatgagaaaatgcacctttctgacagtatctccactttacttaagaaaactagcaaatatatgaaaagacccttagtaccaaatacactcaattgcctttttaatgaatgtacttgtcttggataggttgctggtaaaccattttaaactattttttatagctgaagttcttcactactataaacgtcttctgtactataaaatccatttaactggtgttcttaaaatcagagcgtccagaggaaattcttccctaaactaggattcctgttcctttgtcttctcactcgcactctggcactgctccctctgaa

SEQ ID NO: 189824 - DNA, 938 bp, Homo Sapiens
aggatttgggaagagtcccatccagggatcttcccggcaggtaatccagcagggttaatgttctggcaccgactccagaaccagggatccaggagatgatgaactgccgggcatactggttgttggagtaaatcctctctcgcaaacaaggggatgaagctcaccaggtcaaacttgttgctctcagtcacaatgtcctttaaaaggcggtctaggagctcagatccgcttttcacattggggtctgggtcggctgccagcttgctcagcccgtcaaagagcacgttgaagtggggcagcacagcgccccgggccaccttgacgatgttgtagagggcctcgcaggcatagtagcgcagcctgctgtctgcatcattgaagcaggtcagcactggctcgatcagctccttcaggtagagccctgagtccttgcccagtgcgatggagcaggcggccaggccgatgaggccccctttccggctgtgggggtgctgagacagggcaaactcctgggacagggtctggatcacatgcttgatttgcacggtattgttctgggccacgaactcccggaccagcttctcgatctccagcgctgccaccttccgcttttcgtacagcttgtcattgagggcgcgcacgatgttaggcgtgagcggcgcgaaatccttctcggggttcatggtggcagctgggggaacctcgcgactccttagcccgcggctgccggggccgcgccggggccaggggagtctgcggctccgctctgcccccggcgccggcgcatggaccacgccgctctaggcttgcctgccacgctccgccgcctcgccctggaacccgggcccggaccccgctccagcacacctgaccctggccgcttaacaactcccgcccggcactagcgggactcacgagacagcggccatgttacccaa

SEQ ID NO: 189825 - DNA, 1339 bp, Homo Sapiens
  misc_feature (913)..(961): n is a, c, g, or t
aggagtccttcaaactaaagctggccaaaaacttcagcataaaaactatcctgtctgtgtattatatatatttattaccaaatttaataaacaaaaaccacttttgaaccaggtaattttatctagtgtgaaaagaaattaatcacatggtcatatactggctagtgctctctaaaagtagacattaaaatatttcataattggagggaatctttggagattagtggcatctaatcttggggcctcagacacccaaaatctatatattgaccagtggaagttgatgatttgttatcaaatttcaaagcacctaatggaaaccccacttcatctctgtgaagattttcagttcctttacagttatttgaaattatttcaattctgtggagccacttcagaaactccaatgggcctttgcaatattaaaatgtggagaatgcattaatcattatttaatcaatgagtttaaaaaatagacaaaagcttctgaaacatgggactgaagtaggcggagcattataaaagcctaaggtaattggtagtgaagagttggaaaaacttacttagtctaatattgtaatttacagataaggaaactgagaagataaataatttattcaatatcactcgatggttcattagtagaagagccagcattatgatgtactcattttgtactctaggagttgttaaaaagcacttaatatcttcttttcttgggtgttagcatttttcattttttaaatcatgctatttagtgttcttaacatttgaaacccaaatggttcacattttgtttttggattgctttgggaatgagtatgtactgttagagaagggcccaatccaaacactagaattttaataatttctactccctctgctggccaactttccagtaaaatggattttnnnnnnnnnnnnnnnnnnnnnnnnnnnnnnnnnnnnnnnnnnnnnnnnntttaaaaagtgtcttcattataaagaggtgccatgcataaaagcctaggtagtttcaaggtccattcttccattcctcatgattttagggttatcctcattcagatctactctagttataatagtactttaaacagagcacagaattaaaccattagtatgtgaatctgcaaaaagagaacttgttttagactcttctacagtttagacttcaatgtgcatactaaatgcataacattcgtatcaaataattaacatttatatacaattaacaaataaggacaaattttatacaaaacttctactactgctataatttttgaaaacatttaacccactagcaagaggtaagacagcactgcctttttaaaagacccaa

SEQ ID NO: 189826 - DNA, 1596 bp, Homo Sapiens
  misc_feature (263)..(326): n is a, c, g, or t
  misc_feature (367)..(426): n is a, c, g, or t
  misc_feature (858)..(881): n is a, c, g, or t
  misc_feature (902)..(1137): n is a, c, g, or t
  misc_feature (1217)..(1235): n is a, c, g, or t
actttgtacaaaaaagttggccgaagtatcccttacggaaaaacttttacttctcagcactttgttcagacaccaaataaaccagatgttacaaatgagaatgttttttgcatttatcagagtgctatcaaccctccccattatgagctcatctaccagcgtcatgtatacaacctgccaaagggcagaaataatatgtttcatacattgttgatgtttctctacatcataaagaccaaagagtcaggaatgcttggatggannnnnnnnnnnnnnnnnnnnnnnnnnnnnnnnnnnnnnnnnnnnnnnnnnnnnnnnnnnnnnnncccaagtagctggaactacagatgcccgccaccatgccggnnnnnnnnnnnnnnnnnnnnnnnnnnnnnnnnnnnnnnnnnnnnnnnnnnnnnnnnnnnntcaggagagttaatcttggtctatctggtgtgaatatattgtggatctttggcgagtagcaagtcatatatttaattctgacatttagactatttcactgaaccagaagtcgaaactaaacatctctgagccactgactcttctgaaataaaatacacatgggtgtatgttacagactctttagatttaacagaaaatgtagctgttatgaaatgtaattgtaaaaatatgtcccgtatcttctatatcgagacattgcctttaattttatatcgcttttcagaaatttcagttgactacaaaactgcaacccttcggatttttattgactcaaaatagtgccattccccttaatgaaatagattttgagtctttttttcattgtaacccccaaatgagaatcatctacctgattcttgtaccaaaaaaaannnnnnnnnnnnnnnnnnnnnnnnagagagggtctctgtcaacgnnnnnnnnnnnnnnnnnnnnnnnnnnnnnnnnnnnnnnnnnnnnnnnnnnnnnnnnnnnnnnnnnnnnnnnnnnnnnnnnnnnnnnnnnnnnnnnnnnnnnnnnnnnnnnnnnnnnnnnnnnnnnnnnnnnnnnnnnnnnnnnnnnnnnnnnnnnnnnnnnnnnnnnnnnnnnnnnnnnnnnnnnnnnnnnnnnnnnnnnnnnnnnnnnnnnnnnnnnnnnnnnnnnnnnnnnnnngtgcgagccactgcgcccagcctcagttattttatttaacagtgtaagtacttagaaagtaagaaaattgctgatttagnnnnnnnnnnnnnnnnnnnaatgtttccccagcattctgcaagttaggccaaagcccacattcaaagaaatgagattaactcttaagtaatgtattaagtttatgtatattttaaaatattattaaaggaggtttgaaagtattgacatttaaaaagtcaacacttagattaaatttagctggtagttttaatttgggttttagttaagagtgtgaggacatcaggaaaactgtttactactttggttttagcagctcagttttactattcccataatgtgttatttttaaagttctctttttaagatcacagtgatatcctatcttcaattttttaatatggttcaaatatctgggagggtgagaagttaccaagtttg

SEQ ID NO: 189827 - DNA, 858 bp, Homo Sapiens
ttggcccagcacgaggaatcagcagatgagcagaaaggttctgaagcagaggggctcaaaggggatataatttctgtgattatcgccaataaacctgaggccagcttagagaggcagtgcgtaaaccttgaaaatgaaaaaggaacaaaaccccctcttcaagaggcaggctccaagaaaggtagagaatcagttcctactaaacctaccccaggagagagacgttatatatgtgctgaatgtggcaaagcctttagtaatagctcaaatctcaccaaacacaggagaacacacactggggagaaaccttacgtgtgcaccaagtgtgggaaagctttcagccacagctcaaacctcaccctccactacagaacacacttggtggaccggccctatgactgtaagtgtggaaaagcttttgggcagagctcagaccttcttaaacatcagagaatgcacacagaagaggcgccatatcagtgcaaagattgtggcaaggctttcagcgggaaaggcagcctcattcgtcactatcggatccacactggggagaagccttatcagtgtaacgaatgtgggaagagcttcagtcagcatgcgggcctcagctcccaccagagactccacaccggagagaagccatataagtgtaaggagtgtgggaaagccttcaaccacagctccaacttcaataaacaccacagaatccacaccggggaaaagccctactggtgtcatcactgtggaaagaccttctgtagcaagtccaatctttccaaacatcagcgagtccacactggagagggagaagcaccgtaactttcaagcgctcctgttgttgtcgttgttttaaacttt

SEQ ID NO: 189828 - DNA, 1065 bp, Homo Sapiens
  misc_feature (672)..(681): n is a, c, g, or t
ttggcgagaattctatctacattctattctgcggatgttatttctgttatacatctgaattttaaaatgtttactgatagataatggatttaaagggcggctaattgattgtctgccattgttgataaactgttctaattggtttgtgaaagaactctgagaattagctaaatggaggctagtgtatttatttttagaggtacatgttttaagtaaatgtatttaaaacaaattttcatggtctgaattgtatatgtaaatgcatatctgtgtaagtatatgcaagtgtatattcttctactgattcagtcagacacgaaatccaactgaattacccggtagactgaatatctgacgggatttctatatggacatagcacagatgaaccaaaaatgtatttatattcacctgagttttaatgtttttaaacaaagttttctcctgcagtgcttttctatatgaaatagttgagtcaagcttgggcttttttcttcgttgttcccaagtcatgtaatgtatagtgaatttatccaaaacgccattgtaacgttttttactagagtgtttttgcacatttgggcgctaaagggattaaaacaactgatgccacaatgactattgaaggagggaaaattctcaaggttccatagtatcttttacaaaatggattnnnnnnnnnntgcctatgcaacttcaaatagtctgatgcctgcttccccaggacgagtgactcttccacggtgtgctgctttccctccgagcctgtggaaaggcagagcccttttgcagatacgaaagcaagcttttgccatgatctttaatggagttaaaatgtttatggtaattgtaacctttcaatgagtacgtgaaaaagagcatctcacttttaatacacccagatattttcttcaagtctttgtgcattttagcaggacttaattttcttaatttattctttcctttcattatagtgacatagagtagttgcctttaaagtagatcccatttagcccctgaacatataccatctgcagtattataaaagtcatttaaaagtcaggggg

SEQ ID NO: 189829 - DNA, 1690 bp, Homo Sapiens
aatttcatcatgtcttaaatttgatgtgtcatgctgctcatccagagcaagaacctgtggtctcagctcgctttgtgtaaataaaactggacaacagtggaggaaggagtgaaactgctgcacaaactccggcccaacagtccaagtgctatgatccagcacctggaatttcaacagatcttctacaagaacacatctgagatgcaatattaacaacaagcccaacattaatcttttattatgaaatgggctggttctcaaattgtgcaacagcaaattcccattaaaaataactgtcttaaacggtgaaaacaatttgattactttatatgacaaacttggaaaaagccttcatatctactgcatgaatggaatgtactgttttagaaaagctacagagtgtgtgggcttaaagttgaaacagagacagttgtggcccgactgaggtgtctctaacaagtgttaatgggtagataaggtcctttgaaacaaaaggaggaagcaaagtctgcactggcctgttgtcagtcttctgtacatcttgaaagacatagtctgcttggggctcttctgctcttgcactctgcttccctggggacagcttaatctacacatggagactggtttctatattacatctcgattagtcacttcaattgaaagataatctcggtccataccaatcagccgttagaagtcttgctcccgttggggatcagtgggcttcctaggactactcttggggccatagaggaaggtcgtaaatgaatatccaggagcattagcccagccttcacgtggacttctgacggtaatggagggtgaggtctccaccgctcttccatatgaagtgtttcactgttcgaaggtccatatttggatccaaaacctggtcctggcacaaaagttcaattttctcctctgccaacacagcaatatcttcttctttttcctgttctcctggtttttcattattagaagagctagtggtttgagactcattatccaagttgataattttttcataaacatgttccataacttttcggacttggagcatgtcactagcagagagtctatctttttttaaggtttttgctcctgaagatgcatgaggttggaggtagaaaggaattttgttgaatttgggcatatttttatccacagtgatgtcaattacccattgtggcactgtttcattaagaagcatagactcagtctcacccccggaatctcggcagagcagcctgaacagtgtgcgacctccagcttcaccaaagatcacgggtgtatgtgggggcacttgaaaatatccatttcccttctgcactcggttctcctgctccccatttacatggtttacttcattttcctcttcatccattggattcacatgtgttctaggccaatattccaggagtgcttggagtaaaagtcctcctaaattcaattttggatctgacccatcagggctgctgaaaccagcatcttttgcagaaacccaggcagcaaaacaatcactttcatccaaagtaatagttaacatccctgtttttaagtctactgagaaccaatttggcacatacaccattttaaatcttttcttaatttcatcttcaaaatccactttgcccagatcttcaactttacatgccttcaatacatcccaatatgccacattatttgtaca

SEQ ID NO: 189830 - DNA, 1751 bp, Homo Sapiens
acaaaaaagttgggttggagaaagtcgcttaagccactgtttatgttgctgcctcctctctcaaaaccagccaagatctgttcacacacctctgtggctgtctttccctgaaacatggtaactcaagactgcctgcctaggtttcttagattaattattcacataaattttgtttaatattggttgaacaagaaatctgactttaaaagattattaaggagaatattccttaactatactggcttgatttgaaacaggctcttattgccatttaaactgccagaaatctttgccaaggtcctggttaaaaaaattggaaacggttttcttagccccagctttaaaagctagagatctcagagaaatagctggcttaacaatgacagaacagcttaaaatttgtgcctacaccatgttctgagagtcgttcacatcaaattcttatcttttccaagccagtaagttggcttctccattcctggtgtctgatattcttgacaatcatcagcaacaaagatcacagcactttccagaagcatggagcttcagaaagtgccagtgaactcttggtcctcagtagtgagatgataacagtgttataatgcagcttccttgagccatcagacagagtgtatgttcaccctatctggctgtatcccattggcagtggacagattgaggaaattcctagatcactgagagctaagcaccatgcatagacaacagtttgttcttgcctgtgttgcttttagggactttgactaccacatgttcttttcttggggtgatttaatcacctgggagcatctgagtctgctcctaagtggctttgcaactgggcctaagttctgtttcctttatggatctcaaattttcatctgcacaatgaggctgttgaaaggaaaaaaagtgagcctctaggaattattcaaaaaaagtctgtgatacattccttttcctgccaaagttctgtctctgtctttggcttctgtccaggcaaagctaaataagacagcaaagtcaaagcagataaattcttgttgaaacttgactaaaatttatttgatttgttgttttactcccacttggaatcctgaggtagaagacagaatgcagaagtcttacatcttgggcaggaaactggtttattcctatactcttgtttcctctgcttcttcctgaggtctagaacaaggtctggaaatgtttagacaggatattttcttgatgaagtgataaggaaaggacccatttttttgctcatcacctagcccaaccttcactctctctagttatgcataacaacactagaagaaggtgttagcccagctaactttgcttctgggaaggctatgtctgaacatgttgctctgtaggataatcacacttagaaaacatctgctccatgacattcacaataccagggaccatgggagacacaagaaatgtgtgtctgctgtcataacttacagtgaaaaagcccaataatacagaacaagacatgatgggcaataccctagcatattgggattaagagctttctagccagaatctggacctataccatgggaaaatttaggggtgctgggaatcccaaagccaagttctggcttcattggcaacccactaggaacttgaatgtgagattcagctctagtttgcaccttgatttccccagtgaaaagggagaagagccaaagtattgtctaggtgctgagttcccttttctgagtggatttcaagcatttgcc

SEQ ID NO: 189831 - DNA, 969 bp, Homo Sapiens
ctttgtacaaaaaagttggcaagctgaaccatgcaatttgtgcacttcacccagctggacctgtcttacctgcagcgggaggcctatgaccgagatttcctcgcccgcgtctacggtgctccccagctgcaggtggagaaagtgaggaccaatgaccggaaggagctgggggaggtgcgggtgcagtatacgggcagggacagcttcaaggctttcgccaaggctctgggtgtcatggatgaccttaagtcgggggttccgagagctggctaccggggtattgtcaccttccagttccggggccgccgtgtccacctggcgcccccaccgacgtgggagggctatgatcctagctggaattagcacctgcctgtccttcctgggcccctccttgccacatcatgagctgaggtgggaccacagtccccaggctgcatcggcctgcctgtgtttccctcttaggtgcatttatctttttgatttttccgagtggcatttaagtgcacaaatgataacaagaggattattctcccgttctcaagggagtcagatcaggggaactattctagggtatgttgcggggtattaagcaggaaaccactgtgtggtggggggcactgggcttgttggggccagaaatgtccacgtcctgagctttctcctggagcatgtgcagagagtttggcaacgttcgctctcttgaccagaccccttctccctgacctggctcttccagccagggcacgagccctccttctatacctgctccccttcccccagtggggactgattatgggagaaggggacatatttgtggccaaatgatactaaccaaagggcttccttgtcagggcctggtgaagttggtgggtcatcggggctcactgcctcctgcctttctctcctgtctgacccccacttagcccttctctccttgcagcctagcagtttatagttctgagatggaaa

SEQ ID NO: 189832 - DNA, 1472 bp, Homo Sapiens
ttggcaggtagtgaaacacagactattgtgattgagaaaacagaagacaaatacacttgtccatgaatggatccactttaaagtattacaactcaaagccgttttttttgtgtgtgtgtgtctctgcattagtactttgttatttttccatcactaaaggccaatcagaatttggaaccatgctgctacccaagaaatctaatggaatgaattagttctgtagatgacaatttcttcacccatttatgagacctaaatcttttccataacactcatgtattcagtataacaacatactaactgaaagagggacctgattgtttaaagtttgattgcagacactgtagaacataactcattatgtttcagataaggtaactcctagatatcaaactaatttgttggggtagagattttacaagtcatgccattagaagattttctctgatattatatgtgcagttcagttacaagatgaaatcatgtttttttaacaaaagagataaaatacaattgaagcaaaaaataacagctagtatataatatatacagtctgtatttgcttttcacagtaggcctgatgactaaaagatatgctttattacacgctattttcacctcttgaaagtcaaaggtgatgattaatttcatttagcagggaagtggaataatatcttttgaaataactaagtccactaaattatacagtatgctattctggttctaagtacatattagtcccttggcaaatctgttctttcaaagcataccttccccaaatgagcctacctacttcttaaaaaacacataacacaatgtggtagtagtaggtgtaaggaaggtaagttttttcatagtggtatgcaaacatatcattgaaatattacatagatataaagacttagggaataaaaatagcagcaacaaatacttgatagatttatcctacttgggagaaatattttgtagcagagtatttagtatacttagaagttgatttagcaattaggctttaatgaccttacaaagtgaacataactgaacacaagtattttttcaatgcaagatgaggatgaaaattttacatttcaacccatctggctaaagttaagacttagcaaaaattaaaatgttgcctttgtccaagtatagattaaggcaacaaacatatttgggtgtgtaatttgaagttttggactgaaatatctttgcaagtatccacataaaattctgtaatgccttataattatattctaataattatgcattatactaagacaccattaagaacagttgaggcactacactaaatcaaaccataaatgaggaaaaaacttttaatgttcttttctagaagtgttcaataggtcttgatatgaagctaaaagccttatttatattatcttaatatttcggctaaaatgttaagctccataacatgaattgatacaattccaattttatcaatattt

SEQ ID NO: 189833 - DNA, 1061 bp, Homo Sapiens
ttggcttgatgccctctgatgaggccagcgagagctcccgccaagcctggacaggatcttcacagcgtagctcccgccacctggaggaggactatgcagatgcctaccaggacctgtaccagcctcaccgccaacacacctcggggctgcctagtgctaacgggcatgacccccaagaccggcttctagcccaggactcagagcacaaccacagtgaccggaactggcagcgcaaccggccttggcccaaggatagctactgacagcctcctgctgccctaccctggcaggcacaggcgcagctggctggggggcccactccaggcagggtggcgttagactggcatcaggctggcactaggctcagcccccaaaaccccctgcccagccccagcttcagggctgcctgtggtcccaaggttctgggagaaacaggggaccccctcacctcctgggcagtgacccctactaggctcccattccaggtactagctgtgtgttctgcacccctggcaccttcctctcctcccacacaggaagctgccccactgggcagtgccctcaggccaggatccccttagcagggtccttcccaccagactcagggaagggatgccccattaaagtgacaaaagggtggggtgtgggcaccatggcatgaggaagaaacaaggtccctgagcaggcacaagtcctgacagtcaagggactgctttggcatccagggcctccagtcacctcactgccatacattagaaatgagacaatcaaagcccccccagggtggcacacccatctgtttgctggggtgtggcagccacatccaagactggagcagcaggctggccacgctcgggccagagagagctcacagctgaagctcttggagggaagggctctcctcaccctgccaggaagcttcttaacatgtgacaggaccagggaccaggagcatggtgaagccaagtggcagatgggagccaacctgggatgggggtttggggaaggagggcatgtgtaacagagaacttaaaggggcctccatgcccttctcattcttt

SEQ ID NO: 189834 - DNA, 980 bp, Homo Sapiens
aagaagggtttacacaatattcaataggcaacagtatttggtcagtgtgcaataaaataaaaaagtgctaacctggaaacacagaaaaagaatttatgtatttaagtttcagaaataaaagtaacagaatagtgtataatctgtaacaagctggtcctgtaatttctaaactacagtccaatttaaaacatttaagtaatagaaacaatctacatgtttttctacccaggtaaatataccgagagggttacctataaagaaataggctttaaaacttttaaccacaaagaaccttctgctgcgacattatgaagatgggctatgcatgtggccagactaagtcatttcccggagattctgctcactgcttagctgcaggtagtggtccatcaatgacagagtattttacatcaataccagctcattcaaccaaagaagcacagtaatattttaaaatcacctgtttatattcattagtatgtaaaaatcacaatacacagatttggaaacatataacgtgtccataaaaaagagtatattatgtaagcataagctttttaaaaaggccttagcaatgcaataatgagggaagcagactctacatgttgactacagtgaagatatgttaaaattataattattgtcattgccaagagcttagaaataaaaacaaatttaaaaaattaagacattctggtagcaaaaattacagctactgtaacaacagctccaagcaaaaaatcaattcagagcttgaatgcaatttgtgctttgtttctataagaatgcagtgttactctcagacatttctaaatgattagattcataaataagcagttaatttcttttcatcacaatttatttctaattcatcctacggagattatagatagaactaaaaattacttagcttttttccagtactttatataaattgagatcttttttaaacagtgatttattgtgtttcttaaggccaa

SEQ ID NO: 189835 - DNA, 700 bp, Homo Sapiens
ctttgtacaaaaaagttgggctgaggcggccgctcctgctgctgctactgccgccgccgcagcggctgctcgggctgagcacgccccggaacaggccgccgcgcgctgcgcgccggacccgctgcccctgccggcccggccgggtcgggcggcccagggaccgacagacttgacaacggtgacagcactggggcggcaccttcctacttctgcccagccacagccctcccctcacagttgagcacctgtttgcctgaagttaatttccagaagcaggagtccccagagccaggcagggggatgaaccgcgagggagctcccgggaagagtccggaggagatgtacattcagcagaaggtccgagtgctgctcatgctgcggaagatgggatcaaacctgacagccagcgaggaggagttcctgcgcacctatgcaggggtggtcaacagccagctcagccagctgcctccgcactccatcgaccagggtgcagaggacgtggtgatggcgttttccaggtcggagacggaagaccggaggcattaactgctaagcccttggaacaccctggatgctgttgatggccaagagatctgtgtggctcctgggccggctgagtggcatcaaccacccttgccccacctcccccttcccctacctatacctgccctgcctccatcccatctcacatctactcttt

SEQ ID NO: 189836 - DNA, 1646 bp, Homo Sapiens
  misc_feature (916)..(928): n is a, c, g, or t
gcctatactttggcaggttatgaactttgaatgtgatgaaatgacacgtttggctgcatttggatggtgtcttagaaccctcattgctcagacctgaaggctacttctaggagcatgaagtttgagttttgtgtttttccaaaggatacttccttggccctttttctttattgactagaccaccagaggaggatgtgtgggattgtaggcaaacccacctgtggcatcactgaaaataaatttgatcatacctaagaggttaggaaatggtgccattcccaccttagagtgctacataggtgctttgggcgtatgtaacattagtgtccttccttgaagccacaagctagttttcttagttttaaaatcctgttgtatgaatggcatttgtatattaaaacacttttttaaaggacagttgaaaagggcaagaggaaaccagggcagttctagaggagtgctggtgactggatagcagttttaagtggcgttcacctagtcaacacgaccgcgtgtgttgcccctgccctgggctccccgccatgacatcttcaccttgcagcttgtgctgagactgacccaagtgcagctagcactgggacacagatccttgtcttcagcaccttccaaggagccaacttttattccctttcctctctcccctccccacctcgcttcttcccaatttagtaacttagatgcttccagcacatacgtagtagctaccccagccggtttggattacaggcctgtgctggaacatcatctcagttggccaccttctggcagctgtagacctgacattttgagacaagcctagagtcaggagcagggactttgactcttaggaagagcacacatgagggcaaggctgctggcagacgtctccattgtccttatgttgtctgtgttgtannnnnnnnnnnnnattgaccatggtgattatttttttaaaccatcgttaatatactgaagtgagctatagcacatatcatgtgcttagtttgtttatttttctccatctccccttggcttcctagagtttggacatattccaggctaaatgcttttactcaagactacagaaaggtttgaagtagtgtgtgcatggcatgcacgtatgtaagtaatctggggaagaagcaaagatctgtttcattcttagcctcaggcctcatgagggtctccacagggccggagctcaggttacaccactccttcgtccttacaggagatgtagggagaagaatctgcaggctgcttgtgggactgttcaccaagggggataccagcagcaagagagtgcacccgtttagccctggaccctgtttcttactgtgtgacttggctagagttgggagttcccccaaaataaacgtgtccccattttaccagaaccaaacctcaacacagcgaagctgtactgtctttgtgtggcaaagatgttcccttgtaagcccctttcaggtaaccgtcttcacaatgtattttcatcacagtttaaggagcatcagccgcttctcaagtgggtagggaaagcagaaaaacgtacgcaagaggacatggatcccaaatgatgatgaagcatctcccatggggaggtgatggtggggagatgatgggctaaacaggcacctttcaaaaac

SEQ ID NO: 189837 - DNA, 902 bp, Homo Sapiens
ttggccctgctggttcctggcatcgccagatgctgcgcagcagtctccgattccccatcaccaattcggctggcgtctccgagaccgcggactcccgtagggtccccgtggccccgagttgtagtcgggacaccccggccgcgggtgatcgtcgggtctccacgcgcccgggtcgctgacgcggatccggcctcggcgccttctcagggcgccctgcaaggccgcaggcaggatgaacattctggcacccgtgcggagggatcgcgtcctggcggagctgccccagtgcctgaggaaggaggccgctttgcacgggcacaaagacttccacccccgcgtcacctgcgcctgccaggagcaccggacaggcaccgtgggatttaagatctccaaggtcattgtggtgggggacctgtcggtggggaagacttgcctcattaataggttctgcaaagacacctttgataagaattacaaggccaccattggagtggacttcgagatggaacgatttgaggtgctgggcattcccttcagtttgcagctttgggataccgctgggcaggagaggttcaaatgcattgcatcaacctactatagaggagctcaagccatcatcattgtcttcaacctgaatgatgtggcatctctggaacataccaagcagtggctggccgatgccctgaaggagaatgacccttccagtgtgcttctcttccttgtaggttccaagaaggatctgagtacccctgctcagtatgcgctgatggagaaagacgccctccaggtggcccaggagatgaaggctgagtactgggcagtctcatctctcactggtgagaatgtccgagattcttcttccgtgtggcagcactgacctttgaggccaatgtgctggctga

SEQ ID NO: 189838 - DNA, 954 bp, Homo Sapiens
tacctgttctacgtagaacacctttggtggagttccatcaactcgcaaagtagaatccttacctactactcttctgataataattttaatattttttatgtttggttgatgcgagcagctgcactgctcatgcagttagctagcatgtgacatcatgtgacaaagttcatgtaattagatggaagaaacctcactgattaattttaagaaccttttagggatgcaggaacaatgaagtggccacagtatgtgctgtttttgaagcatttttaaaaacgaattgtagttgtttttcttcatttaaatggatctgttggaggttatgtgtgtatgttgtagttttattgcagccacaataattttaccaaagttttcacataggcagttagcctttacttaatatcaagacaagtgaaaaaatattggcatcgatgaaaccgataacattggcctcattggatttctttacccattcacagtgtaaagaagttaccttcatgctttcattgtacctgcaggcctgtgggcttgtacagtagataattaatttctaaaaagaacagctgcctattttcttcctaggttaggttatatcttcataatcacaagaattagtgatggcaaaataaaattttgcttatgaatcttttacattgtttatatatgattaatatcatcatatatattttctgtattaagctcatttggcttcatttaagctgtatacttagtcatatatctttcattagttctatggatatgagcagatccctttactggagcccagtatgtgctgtgtgagttagaagtcattcttgctgagaaggtgaataggtagggatttgccttgttttgtaagtctacaatttgccaagagtaaataacactggaccagctgtaaaagtaaacagtgtgtttatgcattgagatactaaagcatttaagaaaaaattt

SEQ ID NO: 189839 - DNA, 919 bp, Homo Sapiens
gccaactttgtacaaaaaagttggctaggttgcgtggcgctgtctactacttcaagatcgccgtggccctggcggtggcggccatccccgagggcctcccggctgtcatcactacatgcctggcactgggcacgcggcgcatggcacgcaagaacgccatcgtgcgaagcctgccgtccgtggagaccctgggctgcacctcagtcatctgctccgacaagacgggcacgctcaccaccaatcagatgtctgtctgccggatgttcgtggtagccgaggccgatgcgggctcctgccttttgcacgagttcaccatctcgggtaccacgtatacccccgagggcgaagtgcggcagggggatcagcctgtgcgctgcggccagttcgacgggctggtggagctggcgaccatctgcgccctgtgcaacgactcggcgctggactacaacgaggccaagggtgtgtacgagaaggtgggagaggccacggagacagctctgacttgcctggtggagaagatgaacgtgttcgacaccgacctgcaggctctgtcccgggtggagcgagctggcgcctgtaacacggtcatcaagcagctgatgcggaaggagttcaccctggagttctcccgagaccggaaatccatgtccgtgtactgcacgcccacccgccctcaccctaccggccagggcagcaagatgtttgtgaagggggctcctgagagtgtgatcgagcgctgtagctcagtccgcgtggggagccgcacagcacccctgacccccacctccagggagcagatcctggcaaagatccgggattggggctcaactcagacacgctgcgctgcctggcactggccacccgggacgcccccccaaggaagaggacatggagctggacgactgcagcaagtttgtgc

SEQ ID NO: 189840 - DNA, 997 bp, Homo Sapiens
ttggataaatgtttgcatttctgctgaagccagaagcttttccttcttcctagacaccatttcatccttaattattacttctggttagttttccattgccaccataacaagttacaaaatgtggcttaaaatagcacaaatttattatcttcacaattctgtaggttaggagtccaggttaagactttcgcggtgccaagatcaatttgttggcagggttgcattctgttaggaggctctacaggagaatcatttccttgtcattccaccttctacaggacatcctcattccttggcttgtgacctccttcttccatcttaaaaaccagtgctgtttcatctctatgacccttctgttaccacatctctctgacaccagtgtggagaggttctctgcaggactcatgattaaatgaggcccaccggatatccaatctaggcttatctccttgtcttgaaatccatagtaaccttaattacatctgcaaaatctcttttaccatctaaggttacatacaggtttggagattaggacattaacattttacatggaacattattcttgcctactacagttcccacccaccccccgctccactcctgtgttaaagattcagattcatcacaaataaatttacatcactcataggtgctcaaaagtcacaatccattattacagcatcaactctaaatccaaaatcttatctgagtctcaccaactcaaaagtctcaaatctcacattgaagccatctaaattaagtttgggagaggatctgtgtgtgatttctgggacataattccaactgtgcacttgtgaacctagaaaacaagttatctgttcccaagtatgatggcatgacaggcagacaataatagttacacacgttcctgttcaaaaagcagaaacagatggaaaaaggagccatcagcaccaatcaatttacaaaaccagcgaaggcacccttctttagtttacaaggcctgggagtaatcttc

SEQ ID NO: 189841 - DNA, 863 bp, Homo Sapiens
ttgggtttaatgtaggaatgtgtatatattatctacagccacaggaaatgtatagttacgatttttacatacgtgtatgtatattattgtacaacttgctatttctacttgggagttttttattttggtacattcacatttacctaatctcttgtgcactgtccaacagtactttgcctataatagacacttaaggaagttttccttctttttattcctttataattacaaacaatgctgaaaggaacatcatcctacatgagccctttttgtacatataaggctctctctgtggtatatgcttaggatttgaatttcaggccagagtataaccatttttaatttgaagagatacttccatttgggttccagaatggctgtatcaagttacagttcccctgagcaagatatgagcatctgcttccccatgtaattaatgacacttgctattggatttttgtaatttaattactctgaaaaaattattttggttttaaatcagaaatttctcactagtgaagatggacatatttttgtatgtttattttagaacatataaacatttgttaattttctttttcctctcatttttctattgaatgatttgtccttttatctcatggatttgttaggagttctcttgtattttctgtattttatgtctgttgccaatgttttctcctacttagccatttggctttaattttacatggtgtctgtttaaataaatgttttatatttgtatacaatcaaattgattaattttcatgacttatttcaggatataaagcaaattattttctaagacatttacagtgtatgttttcctatgtttacatgtgctcatttcacgtcatgtattt

SEQ ID NO: 189842 - DNA, 1298 bp, Homo Sapiens
tcattatataaaatattaatgtctgaggagctgtggatgccatcagtgatttctttttgcctcaaatctgaaatgcagtctagatacattgcaggaattgctccatcccccccagggtcctctagttcagctcttgaacttggcaggagctcagccatgctatcaaatcctcccagaggccctggggggtagaatatggggcaatctgcagtgaagagcggctccgggctggccagaacatctccaggtgggtctctgatgctccggaaccgggctgcccagatggggtccctcgctgccaaggcattgacacagaacatgtgggccttgctcttcgcgtggtatttgagagtctccaccttgaatggtcctgtataaccttctattagtcttgaccgtttgtccctgatggaggggtattctcggcaagcagagcagaacagagccgtctgctcctcattcatgatcagccacggaaactgcacaaaccacgacttctggatggaccggggcttcagaagtttcctgtttcttccggcccagtctccctcgatgtgtccactgcctgtactgaggtgggaaaggtaggctttcttctgaggcgggagggactgtccactctccctggtgggaccttgcacctccatttctcccatgtagcccatctgtttttttcctgggtgatgctccagaaggctcctctggccctggacgctgccaagccatggctctggccctcgtccgaacttgcagaacagctcaggattggcaacagttggtcccagtggtgccaccagcttgttggaaccacagagctccttctgttgctggctcagcagcacccattcctcctggagtaagtacacagtgatgtcatcaaacgtcacaggagcctgaaaggaaaatgacagctgctaagtaccactctcttccttagatttatcttccaaaagtgttcctgaccacctgagggcaccctacacggggaggggtgttgtcaatttacatgcatggcccacaccccatctctccccacctgggtacagatcacagtgacaacgagactcgtttcttctgggaagtgccacgcactgaaatgaaactgagccatgaaggaggctggctcaggagcttctccgtcccctccctgtgtgctcttcacccgcctcccacacgcccgtttcttctcagccaggggctgggcaacaacttagggcacattctttcatggaaccttaaacatggtaaaccttcgcttaggaagatgtgtctaatttctagaaatagctgaaagccaa

SEQ ID NO: 189843 - DNA, 954 bp, Homo Sapiens
tttgtacaaaaaagttggcagacatttccctaaagacatgggatcttaactcatctaaaggtttccttctcaagagatgctcctgttggggaggaggaagccccagcaaagtatgtgcaagacaacatccagcttcatggccagcaggtggcaagaatcctcctccaggagaacggccatatttatgtgtgtggagatgcaaagaatatggccaaggatgtacatgatgcccttgtgcaaataataagcaaagaggttggagttgaaaaactagaagcaatgaaaaccctggccactttaaaagaagaaaaacgctaccttcaggatatttggtcataaaaccagaaattaaagaaagaggattaagcttttttgactgaaagtactaaaagtcagctttactagtgccaaacctttaaattttcaaaagaaaattttctttcaacatttcttgaaggacatggagtggagattggatcatttaacaatataacaaaacttcctgatttgattttacgtatcttctatctacgcccttcctgtgcctgtgactctccccaaattgccctgttgccttgagctcttctgagctaaggcagccttcagtccctatcagcgcctcctttacttcccagagaacttcacagagactctgtccttccatgcaaaggcttcctgaaatagggagactgactgagtagctcattcttgtgacttacagtgccaacatttaaaaaagtatgaaaatgatttatttttatatgacgtatacccataaagaatgctcatattaatgtacttaaattacacatgtagagcatatctgttatatgtttatgtaactatcaaatggttatttgttactaaagctatatttctgataaaaatattttaggataattgctaacagagggatttattttatgatgctggaaatatgaaatgtattttaaa

SEQ ID NO: 189844 - DNA, 1185 bp, Homo Sapiens
ttggagaacatcttcctaaacttcaacccagaccatattcgtgtgcaagctcaagtttatttcacccaggaaagctccattttgtcttcaacattgtggaatttctgtctactgccacaacagaggttctgcggaagggagtatgtacaggctggctggccttgttggttgcttcagttcttcagccaaacatacatgcatcccatgaagacagcgggaaagccctggctcctaagatatccatctctcctcgaacaacaaattctttccacttaccagatgacccctcaatccccatcataatggtgggtccaggaaccggcatagccccgtttattgggttcctacaacatagagagaaactccaagaacaacacccagatggaaattttggagcaatgtggttgttttttggctgcaggcataaggatagggattatctattcagaaaagagctcagacatttccttaagcatgggatcttaactcatctaaaggtttccttctcaagagatgctcctgttggggaggaggaagccccagcaaagtatgtgcaagacaacatccagcttcatggccagcaggtggcaagaatcctcctccaggagaacggccatatttatgtgtgtggagatgcaaagaatatggccaaggatgtacatgatgcccttgtgcaaataataagcaaagaggttggagttgaaaaactagaagcaatgaaaaccctggccactttaaaagaagaaaaacgctaccttcaggatatttggtcataaaaccagaaattaaagaaagaggattaagcttttttgactgaaagtactaaaagtcagctttactagtgccaaacctttaaattttcaaaagaaaattttctttcaacatttcttgaaggacatggagtggagattggatcatttaacaatataacaaaacttcctgatttgattttacgtatcttctatctacgcccttcctgtgcctgtgactctccccaaattgccctgttgccttgagctcttctgagctaaagcagccttcagtccctatcagcgcctcctttacttcccagagaacttcacagagactctgtccttccatgcaaagggcttcctgaaataggagactgactgagtagctcattcttgtgacttacagtgccaacatttaaaaagtatgaaaatg

SEQ ID NO: 189845 - DNA, 1126 bp, Homo Sapiens
ggactagggctttctaaaatttcttttatcaccatccatggttcttccaatatgggaatcacagttgggtctgtacactgtaagtcccagagaaaccatgttccaatagttctgtaacgtcacagtcttgtatattccttctgcacaggacgcattaactcccagtcctcctgggtgatgtctacagccacatctttgaatgtcatcgattctttggtcaccaagtcatttagccatcctgtctggaaagcatgttttcctctggggtcttcctctggggtatcttgggaaagggtagagttttgaggagcttcctcttctagaatctgagtcaaatcctccaccagagtcactgcttcctcgctgctctctggatactgggactttacccaagtcctaacctcaccaggcaggatggtcaggaattgctccagcaccagcagctccaaaatttgttcctttgagtgaatctcaggtctcagccacttaaggcagagctctcggagttgactcaatgcctttcgaggaccagccaggtctgggtatggaaaattcctaaaattctgtcgacaggtctcagtgtcacgcaagaatcttgaagtaaggatttccttctcaacattgtagggtccactctgagccttgtctgacttccaccttagaaggatttgagaacgtgaagaactgttcatcctcttgcttgaggctaacattgctacagacaggagagtcaatctggcaatatcctttatttctccagtagtgagccaactgcttgaagtctcatgctagagtcacaaggacactatatcaaaggctgctgcagccgagggcagaacagaatcaaggtagagttagcagccttagtgacaaattctgagcccagaacttgcagggatggataagagaccctgtcgctgggacccggccgacgggcagccggagcggccctaaggccacaggcaacaatggcgacgctggcacaggcgcctgcgtggcgggctcagtcccgagcggcagcggatcctcgggctccgccacttcccttccccgcaaagcacagagtgtcccggccaggagctgcacgttccagcccggtcctgagaagcccggcccagaaacccaa

SEQ ID NO: 189846 - DNA, 1368 bp, Homo Sapiens
aattatttctggtatattgaggcactgtagagttttatatttttcctgggacatgcccacttttgaacttaaaacatcagcaatggctaggaagactttctcttttccaatagagtaagtgccacagacaacaagagcatgtgggtttagagttacagcctcaaaggcagtgttgatggcaaaccggataacctcttgctgagatggaaaggtgtattctgggctacaatatgtggtatctaagtacagcatatggactttctggtccgcaagaagagaacgttccatgctgggatctgctctgaagtctcccgtgtgtaatatgacagtaccattaggaagataaaagaggatcatgacagcacctggacagtgattggcatcaagcaaaacaactttgacaccattcacaatacattcagtgtccagtggcaatgggtgaatatattgttcttgcacatgaagcttgttcttcaacaaattgccagttatctcactacaataaactggaaatgtgaagtgtttagacaatccagcataatgatcagaatgaaaatgtgtgagaaaataggctgtgcaaccttcaaccacgccatactgaaaggcatcaactgtaaagccggttccaggtattttcttatagaatggacatgtcttttttcttgatcctcctacattagatgactctgggattttcttgttgcccctttgcagcccaccatgagctgattttgtgaagactttgactttacttaaattgactgcttcagattctgtattaataaggtgatctgatctcttctgacacgctccttcctgcagtgaatttgactttctacatctctttttttgacgctgtgacctctcactagaaagttccacagaaagctgactctcatgtaaagtacttgcatcaaattctaaatcacttaaagatttttctgctttcctcttgcactgcgaggacctcttttgattaggacttggaactggatttaagtttatcccttctaatgcactttcccctagcaatttctcttcctttcttttgggaggtagtccaaaatacacacctatatccatttgcttcattaccttggtagaaggatgtcttgcattatacttaagaccagaaggcaatattttcaaatacttcggagcaggtgtactagacaagttttctgtatttaaaattgtagctttaccaactggcacaccctctaatgcctttctgcagaaacatgctgagttagtattattcttagcattcaagttctcacttgataattttctaattgtattttgggttggttgggaagaaagatacccttctacctgactttcaaaaggtttcaacattaaacccaa

SEQ ID NO: 189847 - DNA, 854 bp, Homo Sapiens
ctttaaaaaacaactttgtacaaaaaagttggatttagcagacaaggatatgaattcaaagcctgaattcttagaaactgtctttttactggagaccatgctgggggggccccagtacgtcaagcaccatatgattttgcctcatacccgatcttctgacttagaggtccagcttgatgttaacctgaagccattaccatttaatagagaagccacgccggctgaaaatgtagccaaattaaggcttgagcatgtgggagtcagccttacagatgatttgatgaataagttactaaaagggaaagcaagaggacatttccagggcaaaactgagtcagagcctgggcagcagcccatggagttggagaataaggcagctgtacctctggggggcttcctttgcaatgtagcagataaatcaggggccatggagatggctggcctgtgccccgcagcctgcatgcagaccccaagaatgaagctggctgttcagttcacaaacaggaaccagtattgctatggctccagggatctccttggactgcacaatatgaagaggcggcagctggctcggcttggctaccgtgtggtagagttatcctactgggaatggctcccactactgaaacgaactcgcttagaaaagttggcgtttcttcatgagaaagtattcacctctgctctctgaagggcatttaggggcatttctatggcaaagctataggtgtatactgtaccaggtgttgcaaaatgattataaaagccagaatgtaagtttggcgataaatagtgtgttgaggagacttaattgtatccaggcaggttagagctagtgtatgttactgtgaattgta

SEQ ID NO: 189848 - DNA, 1556 bp, Homo Sapiens
agttgggtcagagttaatcaaaataatctccaggctcaagtcattgttgattatttgtgtaagctgagctctttgcctgcagagcagcatcctgtcttgctgggcagtaccagctttgctctgctctgccagctgagtgtgaagaagatacagctctttgatacccaagatctgatcaatgttttgaaagcttttgtcattttaggaatccctcactcccattcaatgctagatgtgtatgagaccaagtgttgccatcaggtatgggagatgaatatggatcagctccttttggtggctgatctctggaggtacttaggccgcaaagtacctaggtttttaaacattttttctagttatcttaatttgcactggaaggatctatccttgtctcagctagttcacttaatttatgttataggtgaaaatcgtcaggtatcccaggacctaatgcaaaaattggaatcattgatccttaaatatatagatttgatcaatttggaggaggttggtaccatctgtttggggttctttaaatcaagtactaatctctctgaatttgtcatgcggaaaattggagacttggcttgtgctaacattcagcatctgagtagtcgctccttagtgaatattgttaaaatgttccgtttcactcacgtggatcacatcaatttcatgaagcagattggagagatagctcctcagcgaattccttccctgggagttcaaggtgtcatgcacctgactctttactgctcggccttacgcttcctgaatgaaggagtaatgaatgcagtggctgcgtctttgcctcctagagtggcacactgtcgaagtaaagatgttgccaagattctgtggtcatttggaactctgaattataagccacccaatgcagaagaattttactccagcctgataagtgagattcacagaaagatgcctgaattcaaccagtacccagaacacctgcccacctgcctgctgggcctggcatttttggagtactttccagtagagttaattgatttcgctctcagtccagggtttgtcaggttagctcaggagagaactaagtttgacctccttaaggaactatataccctcgatggtacagttggcattgagtgtccagattacagaggcaatcgtcttagtactcaccttcagcaagaggggtctgaattgctgtggtatttagcagagaaggatatgaattcaaagcctgaattcttagaaactgtctttttactggagaccatgctgggggggccccagtacgtcaagcaccatatgattttgcctcatacccgatcttctgacttagaggtccagcttgatgttaacctgaagccattaccatttaatagagaagccacgccggctgaaaatgtagccaattaaggcttgagcatgtgggagtcagccttacagatgatttgatgaataagttactaaaatgggaaagcaagaggacatttccagggcaaaactgaattcagagcctgtgcagcagcccatggagttggaaaataaggcagctgtacctctggggg

SEQ ID NO: 189849 - DNA, 945 bp, Homo Sapiens
ttggcacttatattcctggtacacagattactttccctcccaggccgtacaactctgcttccatgtctccaggacacccaacacaccttgcagctgctgcaagtgctgagagggaacgggaacgggagcgggagaaggagcgggagcgggaacggattgctgcagcttcctccgacctggcagtcatggatatgttcgctccccttccccttcagtaagaactcaggagaccatgttgcaacagagacccagtgttttccaaggaaccaatggaaccagtgtaatcacacctttggatccaactgctcagctacgaatcatgccactgcctgctgggggcccttcaataagccaaggcctgccagcctcccgttacaacactgctgcggatgccctggctgctcttgtggatgctgcagcttctgcaccccagatggatgtgtccaaaacaaaagagagtaagcatgaagctgccaggttagaagaaaatttgagaagcaggtcagcagcagttagtgaacagcagcagctagagcagaaaaccctggaggtggagaagagatctgttcagtgtttatacacttcttcagcctttccaagtggcaagccccagcctcattcttcagtagtttattctgaggctgggaaagataaagggcctcctccaaaatccagatatgaggaagagctaaggaccagagggaagactaccattactgcagctaacttcatagacgtgatcatcacccggcaaattgcctcggacaggatgcgagggaacgtggctctcaaagttcagactcttctagtagcttatcttctcacaggtatgaaacacctagcgatgctattgaggtgataagtcctgccagctcacctgcgccaccccaggagaaactgcagacctatcagccagagttgttaaggcaaatcaagcggaaaatg

SEQ ID NO: 189850 - DNA, 1108 bp, Homo Sapiens
  misc_feature (94)..(103): n is a, c, g, or t
ttggcactttttaacaaatacaattctacattgtcaagcttatgaaggttccaatcagatctttattgttattcaatttggatctttcagggannnnnnnnnnaaattattatgggacaaaggacatttgttggaggggtgggagggaggaagaatttttaaatgtaaaacattcccaagtttggatcagggagttggaagttttcagaataaccagaactaagggtatgaaggacctgtattggggtcgatgtgatgcctctgcgaagaaccttgtgtgacaaatgagaaacattttgaagtttgtggtacgacctttagattccagagacatcagcatggctcaaagtgcagctccgtttggcagtgcaatggtataaatttcaagctggatatgtctaatgggtatttaaacaataaatgtgcagttttaactaacaggatatttaatgacaaccttctggttggtagggacatctgtttctaaatgtttattatgtacaatacagaaaaaaattttataaaattaagcaatgtgaaactgaattggagagtgataatacaagtcctttagtcttacccagtgaatcattctgttccatgtctttggacaaccatgaccttggacaatcatgaaatatgcatctcactggatgcaaagaaaatcagatggagcatgaatggtactgtaccggttcatctggactgccccagaaaaataacttcaagcaaacatcctatcaacaacaaggttgttctgcataccaagctgagcacagaagatgggaacactggtggaggatggaaaggctcgctcaatcaagaaaattctgagactattaataaataagactgtagtgtagatactgagtaaatccatgcacctaaaccttttggaaaatctgccgtgggccctccagatagctcatttcattaagtttttccctccaagtagaatttgcaagagtgacagtgggattgcatttcttttggggaagctttcttttggtggttttgtttattataccttcttaagttttcaaccaaggtttgcttttgttttgagttactggggttatttttgtttaaataaaatagtgtaccataa

SEQ ID NO: 189851 - DNA, 487 bp, Homo Sapiens
gatattcctgaagcccagggtaaagtcctgttctcagaagccaacccagctgcttgtctgggccatgctctctcacaccgcagctaggtcatctgcggcgactctcctctgtgctgggcagcagctccagctggtccacgtcctgcacagtgctgcaggggggcagcaaggcacgcctgtgacatgagagtctcggcacgtgaggtagggtcaacagtgatgtccacaactcaataccagccctccacacctcggcagcactcgtgggtcctcctcaaccaggcggacacgagaaacagatgataacatggtgcaaggacagacttcagctcaccaatcagatgaaggttttggggttgggttttttcagacaacgatgtacattttagcttccaaatgtgcacaggggcacaaaggtctggatgctgggcactacgggtaccacaagaggatggaaagaaccagctcattcggttttattgtatgt

SEQ ID NO: 189852 - DNA, 895 bp, Homo Sapiens
ttggtgctttctttgtaggaggctactgtgtctccaagtatggagtggaagccttttcagatattctgaggcgtgagattcaacattttggggtgaaaatcagcatagttgaacctggctacttcagaacgggaatgacaaacatgacacagtccttagagcgaatgaagcaaagttggaaagaagcccccaagcatattaaggagacctatggacagcagtattttgatgccctttacaatatcatgaaggaagggctgttgaattgtagcacaaacctgaacctggtcactgactgcatggaacatgctctgacatcggtgcatccgcgaactcgatattcagctggctgggatgctaaatttttcttcatccctctatcttatttacctacatcactggcagactacattttgactagatcttggcccaaaccagcccaggcagtctaaagaaaactgggttggtgcttcttggaatgaaggcaaaaatctgaaattgttagtgtctcagtaatcctgatttagaacccaggctttttgtaacaatgtgttttcttgcctaaattcatttatctggcatcatcagagtactaacatgtttatatttcagatatccaaagcttaccactttaggtgatgaatctttactattttagcccttttttgatgagactatttgtctaaagtgaatcatttgttcttgccttattaaacagagtagatggaaaacaatttaacctattttgaagtcatttctttatgaatatgaataatttgttctatgctttaataatctattgtgaggaaactactaaaaaatatgtttggtgtgtttgtcccttacttgaaatgggtctgtatttatggtacctttaataaataatttgattttt

SEQ ID NO: 189853 - DNA, 315 bp, Homo Sapiens
catataaagagaaactttgtacaaaaaagttgggcactttttattcttaaaatatttgtattgaaatattttagaaatgttgattaattttggtgaaaaaatatccccaaagtggaaattattggaattttaaacttttgttcttgctgggttatttattttgattttagcattaaatgtcatctcaggatatctctaaaaggggttgtttaattcctaattgtatagaaagctagtttggtgaattgtattggttaattgactgtttaaggccttaacaggtgaatctaaagcctacttttattttggttaaag

SEQ ID NO: 189854 - DNA, 967 bp, Homo Sapiens
ttgtacaaaaaagttgggccatgtacaacatcaattacagtcaggatggcactcgctggatctcttggcggaaccgtcatgggaaacaggtgctggatggaaatagtaacccctatgacattttcctaaaggacttggagccgcccattgtaaccagatttgtccggttcattccagtcaccgaccactccatgaatgtgtgtatgagagtggagctttacggctgtgtctggctagatggcttggtgtcttacaatgctccagctgggcagcagtttgtactccctggaggttccatcatttatctgaatgattctgtctatgatggagctgttggatacagcatgacagaagggctaggccaattgaccgatggtgtgtctggcctggacgatttcacccagacccatgaataccacgtgtggcccggctatgactatgtgggctggcggaacgagagtgccaccaatggctacattgagatcatgtttgaatttgaccgcatcaggaatttcactaccatgaaggtccactgcaacaacatgtttgctaaaggtgtgaagatctttaaggaggtacagtgctacttccgctctgaagccagtgagtgggaacctaatgccatttccttcccccttgtcctggatgacgtcaaccccagtgctcggtttgtcacggtgcctctccaccaccgaatggccagtgccatcaagtgtcaataccattttgcagatacctggatgatgttcagtgagatcaccttccaatcagatgctgcaatgtacaacaactctgaagccctgcccacctctcctatggcacccacaacctatgatccaatgcttaaagttgatgacaccaacactccggatcctgattggctgcttgggtggccatcatctttaccctcctggcccatattgtcatcatcctctggaagccagttcgggcaaaaaatgctggaaaa

SEQ ID NO: 189855 - DNA, 954 bp, Homo Sapiens
ctttgtacaaaaaagttgggctagggatcgcggtcttccttcggggattcttcccggctcccgttcgttcctctgccagagcggaacacggagcggagcccccagcgcccgaaccctcggctggagccagttctaactggaccacgctgccaccacctctcttcagtaaagttgttattgttctgatagatgccttgagagatgattttgtgtttgggtcaaagggtgtgaaatttatgccctacacaacttaccttgtggaaaaaggagcatctcacagttttgtggctgaagcaaagccacctacagttactatgcctcgaatcaaggcattgatgacggggagccttcctggctttgtcgacgtcatcaggaacctcaattctcctgcactgctggaagacagtgtgataagacaagcaaaagcagctggaaaaagaatagtcttttatggagatgaaacctgggttaaattattcccaaagcattttgtggaatatgatggaacaacctcatttttcgtgtcagattacacagaggtggataataatgtcacgaggcatttggataaagtattaaaaagaggagattgggacatattaatcctccactacctggggctggaccacattggccacatttcagggcccaacagccccctgattgggcagaagctgagcgagatggacagcgtgctgatgaagatccacacctcactgcagtcgaaggagagagagacgcctttacccaatttgctggttctttgtggtgaccatggcatgtctgaaacaggaagtcacggggcctcctccaccgaggaggtgaatacacctctgattttaatcagttctgcgtttgaaaggaaacccggtgatatccgacatccaaagcacgtccaacagacggatgtggctgcgacactggccgatagcacttggcttaccgattccaaaa

SEQ ID NO: 189856 - DNA, 1233 bp, Homo Sapiens
ttgggtacatagtgcatttcccaagaaccgtgggtaaagaaaaaagcattgatgacggggagccttcctggctttgtcgacgtcatcaggaacctcaattctcctgcactgctggaagacagtgtgataagacaagcaaaagcagctggaaaaagaatagtcttttatggagatgaaacctgggttaaattattcccaaagcattttgtggaatatgatggaacaacctcatttttcgtgtcagattacacagaggtggataataatgtcacgaggcatttggataaagtattaaaaagaggagattgggacatattaatcctccactacctggggctggaccacattggccacattggcagggcccaacagccccctgattgggcagaagctgagcgagatggacagcgtgctgatgaagatccacacctcactgcagtcgaaggagagagagacgcctttacccaatttgctggttctttgtggtgaccatggcatgtctgaaacaggaagtcacggggcctcctccaccgaggaggtgaatacacctctgattttaatcagttctgcgtttgaaaggaaacccggtgatatccgacatccaaagcacgtccaacagacggatgtggctgcgacactggcgatagcacttggcttaccgattccaaaagacagtgtagggagcctcctattcccagttgtggaaggaagaccaatgagagagcagttgagatttttacatttgaatacagtgcagcttagtaaactgttgcaagagaatgtgccgtcatatgaaaaagatcctgggtttgagcagtttaaaatgtcagaaagattgcatgggaactggatcagactgtacttggaggaaaagcattcagaagtcctattcaacctgggctccaaggttctcaggcagtacctggatgctctgaagacgctgagcttgtccctgagtgcacaagtggcccagtacgacatctattcgatgatggtggggactgtcgtggttttggaggttctcaccctgctcctgctcagcgtcccacaggcactgcgcagaaaggctgagctggaagtcccactgtcatctcctgggttttctctgctcttttatttggtgatcctggttctttcggccgttcacgtcattgtgtgcacctcagctgaaagttcgtgctacttctgtggcctctcgtggctggcggcaggtggggtgatggtgctggcctc

SEQ ID NO: 189857 - DNA, 739 bp, Homo Sapiens
ttgggaattgattcccacattcacacagcttgaagaagatctaaaagatgaagatgagtcattgagaagcaccaacaaagtaaacagaacgaaagtttcagtcccggatgcaaatggaccctcagtggaggagataccccagagtgaactcatcttgtatttatcagcttgcaaattcttggacacagcgctttcttttccacctgacaagatgccattatttcaaatttataggtgggcatttattccagaagtggacacagagggccctgccttcctgtcggatgtagaggagaatcaccaagaatgcaaaccccacactgtcagaattctagaacttctaaaattaaagtttggggaaatcagtagctctgatgagatcaccatgaagagtgaattcccgcttctgcgccaacattctgtttccagcatcaggcagttgatgccattcttcatgactctaaatggtgcatttaagacccagagacagctgcctgctgatagcccaggaactccattcttggactttcctgtcacagatagcccaaggatcttaaaacaactggaagaatgcatcgaatatgattttctggaacatccagaatgttaaccatgtgagagagaatatgtttaatccatgtattggtactttactgaaaaccaggttatattctaaagaagaaagaaggcaggatagtgcttttgaacaagactatttccattttgaaagtagatttca

SEQ ID NO: 189858 - DNA, 424 bp, Homo Sapiens
aatagctatctcttctacagttagaattgcataatcttcattattacttttagaaaactcaattgttcttggtagacacattgttaacttaaggcttgccacaaaatgataatgggaagggaaagaacctccttgatatatgcttcctcctatcggccaggagaaagcttttaaggacaattctaaggccagaatcagatgaaactttaaaggctttgaacttctgggttagttttttccccatgaggtggggaaattttaaatccatgattccaggtggaaaatttaagtaacaatcaatggaattagtttaaagaaataaaggtaatttaaaaattcacatcattgaaattttggggatgcttttcattattattttctaaatatgatataaaactaaagccaaggaaattttctaagccaa

SEQ ID NO: 189859 - DNA, 1157 bp, Homo Sapiens
tgcttttctataatgccaactttgtacaaaaaagttggtgtgtgcaggcccctggctgctgactttcgacactgtcgagggggcctccccgacctggtggtgtggaactcccagagccgtcactttaagctggtggaagttaaaggccccaatgatcgtctttcacataagcagatgatctggctggctgaactgcagaagctgggggctgaagtagaagtctgccacgtggttgcagttggagctaagagccaaagccttagctaaaagattccctacaggagaaaatggaaatgaggaggagagaaactccggtgtccccgaggtgtcggtgtggtgagggccgctggcgttgaagtacatcctgctctggcccagctccccatagcaggcctccagggggccactgcgctgttgccgcagcatcctgctcaatacgtcgacttcatcagccaggagggagagcttgtgaaaggctgtgatggagccacccaggctgatctgggcctcgggaacccagcggaagtagcacagtttccacagttttatgtgtgttccagagacacgtggcagaataacaccgtgcaggttggcgggtttggaaaaccattctctaaaatactgctccgtatcactgttctggctgtcggtttgctgagctggatctggctttggttttaatatcaatgaatttctccttggaagtaattcttggtcactgatgattccattctttaaggcagacggcattcctcttagtgtggagctgtagcttttctatacagaagagattttattatgttccggggattccctttttagaaagattgaaggatgcaatggcaaatataaactcaatactatgaaaaattaatggaatttcagcctcaaagaacattttcctcccttcctttgtgtccttattctaatcctcctcccctggaattacacttttttatgtgttgactctacctaactgttactatcagcctgaatgggggcgggatgagagtacctcctatccactaatttgcttaagataagttctaagacgggctagaaaaaacactagacctggccgattctatcaagaacaatggcaaactgaacagaggcagtcaagaagccaaatgtctgattctttgttctgtaccttt

SEQ ID NO: 189860 - DNA, 1298 bp, Homo Sapiens
  misc_feature (213)..(223): n is a, c, g, or t
ggcattccaggataataagaatattatcaaataaaaggtcaatatctgtcttcctgaaatactccaaactgagtcaacacacattcttttcggattggttctgactggcgtaagaagagaaatacagcattttgttttttattttgtttatctaatcacagggaaggataaacaaagggcaaaagtgagagaaaaagttagatgtccttgaannnnnnnnnnnagtggttgctactgcatttcatgtttcatttttgttagatcatatacattagaaaagaatgatacattttagagaagaaatatgtacatacatagtatcagaaataattttcttgtattgattcatttaatatggttgtgcttatattcaatcagaaggtcaactcctttgctctaaggttcttacactgctaacaagaaatggcttttttcctgttgcaggtcatgagcagcacacagtgtcctttctaggcacataggatcatcgatcactgtgtggacgcaggctaatcagaattgcacctgaaatcacttgtgcaattagtgatgcaagagtgatcacaggaatcaagactgggagccaagagaaagaacaagaggtgcacaaagaagcagttcagatgggagaccaggaaagctgaggggaaaactgggaaacagattctggaaaactcacagtttgtttgatacccagggttaagagatgggactttgataggagtggtgcttatgaattaagggaggaagaaagaggtgagatcctaatgttggtaaaggtacagagacaaagggagccaaccaagtggtaagaaaatagaaatggaaagtaaaaatgagacttaattctttagtcagggaagccaagccaccaggaaaacttggtaagagtaagagaaagagggagaaaatatgagataatattttggtattttgatatactagagaacaaaatattattctatagtataaaaagaacaaagtaagcaatatgatctattggattcctattcacaatgaaaattatcaaacaataatttgtctctcaggcaatgctactagaagttacttatatagttgccttattgttcatttaatttcagtttaactgaagcgattttgcccttttccttccttctacgtggtcactctgctgttcaaagggtaagcaccatttgttcaggtaaagcaattggtgtttgaaatccttccgatagatacgccatctcagagggctgctaatataactaactgtacatagacacggcataattttagccaacttttttgtacaaagt

SEQ ID NO: 189861 - DNA, 1273 bp, Homo Sapiens
ttggctgagaagtggcaaaaaagagaaggaccgcatcaagagcttcaccaccaatgagaaggccatcctggagcagaacttccgggacctggtgcgggacctggagaagcaaaaggaggaagtgagggctgcgctggagcagcgggagcaggatgctgtggaccaagtgaaggtgatcatggatgctctggatgagagagccaaggtgctgcatgaggacaagcagacccgggagcagctgcatagcatcagcgactctgtgttgtttctgcaggaatttggtgcattgatgagcaattactctctccccccacccctgcccacctatcatgtcctgctggagggggagggcctgggacagtcactaggcaacttcaaggacgacctgctcaatgtatgcatgcgccacgttgagaagatgtgcaaggcggacctgagccgtaacttcattgagaggaaccacatggagaacggtggtgaccatcgctatgtgaacaactacacgaacagcttcgggggtgagtggagtgcaccggacaccatgaagagatactccatgtacctgacacccaaaggtggggtccggacatcataccagccctcgtctcctggccgcttcaccaaggagaccacccagaagaatttcaacaatctctatggcaccaaaggtaactacacctcccgggtctgggagtactcctccagcattcagaactctgacaatgacctgcccgtcgtccaaggcagctcctccttctccctgaaaggctatccctccctcatgcggagccaaagccccaaggcccagccccagacttggaaatctggcaagcagactatgctgtctcactaccggccattctacgtcaacaaaggcaacgggattgggtccaacgaagccccatgagctcctggcggaaggaacgaggcgccacacccctgctcttcctcctgaccctgctgctcttgccttctaagctactgtgcttgtctgggtgggagggagcctggtcctgcacctgccctctgcagccctctgccagcctcttgggggcagttccggcctctccgacttccccactggccacactccattcagactcctttcctgccttgtgacctcagatggtcaccatcattcctgtgctcagaggccaacccatcacaggggtgagataggttggggcctgccctaacccgccagcctcctcctctcgggctggatctggggggctagcagtgagtacccgcatggtatcaacctgcctctccc

SEQ ID NO: 189862 - DNA, 594 bp, Homo Sapiens
  misc_feature (331)..(340): n is a, c, g, or t
ttgtacaaaaaagttgggccaggcaaacccttcttagagaaagacagggtagctggtcaacaactagcttttaaaaaaacagagacacggtctcactatgtagcccaggcaccaccctgaaggagcttcttttcctctggggagaagcaaattcatgatgtgtgtgctggagatctggcactcatggccagtgctttccagtatcttgaactcttcgggggtcctgttgacccatttcgtgacctacctccgtgactgctctttttcctctgtctcttaagtgtgatggttttccagagtccaatcctcaggactttcccgtccacacacnnnnnnnnnnagtcaggtggctctaaaccattaggtgggttgtacacctctctcaagctgccacctccttgctgtcgccagatcgtatttcagtctgtcaggggttatctgtatctggaggttccactgttgcttcagtctcagttacttagaatggaacccagagtcctgcccctttccacctacatgctcttacttgaaagcacctgagacttattgggtccctgattcctgcttcgtctgtatcctcaaagtagttgcatg

SEQ ID NO: 189863 - DNA, 1412 bp, Homo Sapiens
ttggcttagtcgaggcaagacgtgcgcccgagccccgccgaagcgaggccacccggagccgtgcccagtccacgccggccgtgcccggcggccttaagaacccggcaacctctgccttcttccctcttccacttggagtcgcgctccgcgcgccctcactgcagcccctgcgtcgccgggaccctcgcgcgcgaccgccgaatcgctcctgcagcagagccaacatgcccatcactcggatgcgcatgagaccctggctagagatgcagattaattccaaccaaatcccggggctcatctggattaataaagaggagatgatcttccagatcccatggaagcatgctgccaagcatggctgggacatcaacaaggatgcctgtttgttccggagctgggccattcacacaggccgatacaaagcaggggaaaaggagccagatcccaagacgtggaaggccaactttcgctgtgccatgaactccctgccagatatcgaggaggtgaaagaccagagcaggaacaagggcagctcagctgtgcgagtgtaccggatgcttccacctctcaccaagaaccagagaaaagaaagaaagtcgaagtccagccgagatgctaagagcaaggccaagaggaagtcatgtggggattccagccctgataccttctctgatggactcagcagctccactctgcctgatgaccacagcagctacacagttccaggctacatgcaggacttggaggtggagcaggccctgactccagcactgtcgccatgtgctgtcagcagcactctccccgactggcacatcccagtggaagttgtgccggacagcaccagtgatctgtacaacttccaggtgtcacccatgccctccacctctgaagctacaacagatgaggatgaggaagggaaattacctgaggacatcatgaagctcttggagcagtcggagtggcagccaacaaacgtggatgggaaggggtacctactcaatgaacctggagtccagcccacctctgtctatggagactttagctgtaaggaggagccagaaattgacagcccagggggggatattgggctgagtctacagcgtgtcttcacagatctgaagaacatggatgccacctggctggacagcctgctgaccccagtccggttgccctccatccaggccattccctgtgcaccgtagcagggcccctgggcccctcttattcctctaggcaagcaggacctggcatcatggtggatatggtgcagagaagctggacttctgtgggcccctcaacagccaagtgtgaccccactgccaagtggggatggggcctccctccttgggtcattgacctctcagggcctggcaaccagtgtctgggtttttcttgtggtgtaaagctggccc

SEQ ID NO: 189864 - DNA, 578 bp, Homo Sapiens
actttgtacaaaaaagttgggctgctttgctctctgggagatccagctccttgctctgtgtcccagtagaacatgatgtggcccatgcacaccccactgctgctgctgactgccttgatggtggccgtggccgggagtgcctcggcccaatctaggaccttggcaggtggcatccatgccacagacctcaatgacaagagtgtgcagtgtgccctggactttgccatcagcgagtacaacaaggtcattaataaggatgagtactacagccgccctctgcaggtgatggctgcctaccagcagatcgtgggtggggtgaactactacttcaatgtgaagttcggtcgaaccacatgcaccaagtcccagcccaacttggacaactgtcccttcaatgaccagccaaaactgaaagaggaagagttctgctctttccagatcaatgaagttccctgggaggataaaatttccattctgaactacaagtgccggaaagtctaagggtctgtgcaaggcctgtcacactgaccacctcctactcccacccccttgtagtgctcccacccctggactggttg

SEQ ID NO: 189865 - DNA, 1119 bp, Homo Sapiens
  misc_feature (274)..(283): n is a, c, g, or t
  misc_feature (966)..(979): n is a, c, g, or t
ataaactattagatctttaaggcaattccttattttatggttttaggcaaatacttatagatacagcaatataaatgttagtttccctagatttggcaactgctaaaaacagtcttcagaactacattagatgctaatgatagaactacaaagactaattttaaagtgcatatcaggagataataaatcctgcagaagcttagcctctgtacatataatcataggttaacagttttacaaattcacgaacattaaattaatatggaacaatctnnnnnnnnnncactctttaagatgcatccagtttcttataggcttcttcaatgaaggttgacatgctcttcatctgtgatgaattatgaagaatatccaagtcctttagaagagcattctggtttggaattagcgccaaaatttctttctgaagtgtgggtgctttgagagttttctgagaaagttccggaagagagagtactccactactatttatttgatgcatctgttttactctctcctcttcttcttccacctcacttgccagaatctgaattttgttctttaggctctgaatattcccagtcattaactctgtggtctctaccattttatctatttcttcctgtagtaatgccagaccttcttcattagctttgtctcgtgccctttccatattcagtagacttgatacattagttaaatcttccatctttttgggagggactttcagagtttcacactgttgtagcaatcttttcttcaggaagttgagatggtattgtatttcttctttttctttaatactgttactcaaaattgtcattattactgattccatcatagtttgcaaatggtctctggtactctttgacagaggttgccaggtttttctcttgctggctgctgtctttccgtgttttaggttagtgtgctttgtttgtccttcagaagacagatctttcagatgannnnnnnnnnnnnncactgtgtttctaaccttattctctgacaacacaacttcctcattatccttttttctctttggatttctttttaactgttgagcgtttttcttggaagcatttgctttaccagacatcttgatctaaacacagtgcttcg

SEQ ID NO: 189866 - DNA, 1480 bp, Homo Sapiens
tccaggcccttgggctgcctgtcggtctgtggcaccccctggagcaccccatgaagaaacgctactgcagccttgactcccagacagctgctccgggtcggctccagcccggacttgggctcacactgccggctctgggccagctaggggcacccgtggagtttgggggtgaggttagtggttagtcccaaggggggacagcaggggctgagggatgttcacagccagctcgggtccagcccctcaggccgggctcctgggatgctgtacctgtcatggatggaaatggaaccaagaagggagggaaggggggtgccagcggtccccctcagcccgcagccccagcctgccctagagatgacaaatgtggttagtgcaaagaacgaaccagacacagctgcccagtctctgggtgggggaagggggtttggcaccaagaaggcggccagcactgggtggcgggtgagcggcccgggctccacgtggcccctgctgtccacggagggctggggcctccagcagggcaggtgctgagggagagagtgaagctggggcaacggagagaggccctgctggagggggcctctggcagccggcaggaggggtgagcctgtgggtgggcgggctgcacaggcgaggagggcactgcagagagatgggcacgtggagggaccacggggtgacctcagggcagagatgagcaggtggcacgtgtccctgtccctcagtggccagcaggcgccagcacagagcggccccagccgtgcctgtgaactaagaaggggtccacagaagtgccgggcgggaggaaggagagctgtggagggaagggccgggcggcaacaacacaggttgggtgcggccagggcttgtaggtgcggcgaccatctgcagagggagcgtgccgggatagtgggtggcgtgcagggctggggcatcggctggcagcagcgttcaggtgtgacccgagttggcggtacgggcccagagcccctgcgtctccactgtgcccctgcggggaggggacaggagggcaagcggcctgcagacgcgtctggggcaggcctggcacggcgtgcgagggtccggtgggtggcccaggtggaagcggcagtgctggcacggggaggggaagttggcacgtggggtgggtggctgccgggcgcggtctagtggctgccgctggagtcagggcgaggctggctcgtggcgaggtatttggctctcatgctggaggtgtatgagggcggcggggactcgcgcccaatgagtggggtgttctcacagcgggggttctggaaattagcgttctggctcatgtactcagtgaccggggcgttgctgacggtgtgggccgcggccgggatgctggtctcactgccgtagctgctgccacagctgtacaggctgggcatgtggacgcggtagaggctgtcgtgcgcctgccgcggccctggagcggcctcctcctccccgtcct

SEQ ID NO: 189867 - DNA, 895 bp, Homo Sapiens
ttgggttctggttccgccatggatccaacaaggatgaagctgagcgctgtatcagcatcgccctcaaggccatccagagcaaccagcccgaccgggcgctccgcttcctggagaaggcacagcggctgtatccgacgccgcgagttcgcgccctgattgagtccctcaaccagaaaccacagactgccggtgaccaacccccacccacagacacaacccatgccacccacaggaaagcaggtgggaccgatgccccctcggccaacggtgaagctggaggagagagcaccaaaggctacactgcagaacaggttgcagctgtgaaaagggtcaagcaatgtaaagattactatgagatcctgggggtgagcagaggggcctcggatgaggacctgaagaaggcctaccgcagactggccctcaaattccacccagacaagaaccacgcacctggtgccactgaagccttcaaagccattggcacagcatatgcggtactcagcaacccggagaagaggaagcagtatgaccagttcggcgatgacaagagccaggcggcccggcacggccatgggcatggggatttccaccgtggctttgaggccgacatctcccctgaagacctcttcaacatgttctttggcggcggcttcccttctagtaacgtccacgtctacagcaacggccgcatgcgctatacctaccagcaaaggcaggaccgcagggacaaccagggtgatggcgggctaagggtgtttgtgcagctgatgcctatcctcatcctgattctcgtgtcagctctcagccagctcatgggtctccagtccaccctacagtctgagtccaagaccgtccgtgggccacatccacaggcgagtcactgaccacctgggtg

SEQ ID NO: 189868 - DNA, 966 bp, Homo Sapiens
cctataaaagccaactttgtacaaaaaagttgggtcaccgctgcggctgcctcagctactgccgcagtcgccgcggaattcggcgagtagaaccgctgaggcgggcgcgggcccgggtggggccaaggttccggccactctgcagaatggagataatcaggagcaattttaagagtaatcttcacaaagtgtaccaggccatagaggaggccgacttcttcgccatcgatggggagttttcaggaatcagtgatggaccttcagtctctgcattaacaaatggttttgacactccagaagagaggtatcagaagcttaaaaagcattccatggactttttgctatttcagtttggcctttgcacttttaagtatgactacacagattcaaagtatataacgaagtcatttaacttctatgttttcccgaaacccttcaatagatcctcaccagatgtcaaatttgtttgtcagagctccagcattgactttctagcaagccagggatttgattttaataaagtttttcgaaatggaattccatatttaaatcaggaagaagaaagacagttaagagagcagtatgatgaaaaacgttcacaggcgaatggtgcaggagctctgtcctatgtatctcctaacacttcaaaatgtcctgtcacgattcctgaggatcaaaagaagtttattgaccaagtggtagagaaaatagaggatttattacaaagtgaagaaaacaagaacttggatttagagccatgtaccgggttccaaagaaaactaatttatcagactttgagctggaagtatccgaaaggcattcatgttgagactttagaaactgaaaagaagagcgatatatagttatcagcaaagtagatgaagaagaacgcaaaaaagagagcagcagaaacatgccaaagaacaggagagctgaatgatgctgtgggattttctagagtcattc

SEQ ID NO: 189869 - DNA, 953 bp, Homo Sapiens
gaaagagtcagaacgaactcacaatagcaccatttcctagactctggaattagattcctttccgtgtaggagaacgcaggcgcccagcttccagctttgtgctttcacaggctcccaatgcatttcagcagaagtgggtggtctgcttagctacttctgcagcaacatgaattttccctgggaagagttaaaaatatgggtcttacaaagtgaagttggccacaggtgagaagcctgaggaagcctgtttctggtggtgagatgtgacaagcctgtagatggcaggagggagtccagggaccttttcccttgcccatctcaattcaagtcagtgaagaatctgcatgcagaagcatggcaagttcaaggaatactgagagatgtaaaccctaatacagcaatccgaacaccagcgcactaatggtatcttatgtattcaggtccaccagtgagtttgccctggataatgctgggatttaataagcccttctaatgattataaagattgtcctcttgaaactagacattggaaacaacagaatatttgatatcactatattttacatggcacatataaccatataattaccagcacttaacatggcaaatattgtaaatacacattcttggagttgactttgtaattacaccgatgttattcaacagaacaaagattaaacactctccaatttgcactttgggagatttcagtcccctccttcctttcacaacaaaaggataaccctctaattacgtaataatgctcggtggtcatgtgggcaaagagaatcacagggtgacttcataatcaattgtggcctgtaaaataaagtaatacacagtattttcatttcaacaaaatacaacagaccatataaaaatattttccaatctggaatcagaaacatgaaagctgaattttttttctttgtataaaaagaaacaaaatccaa

SEQ ID NO: 189870 - DNA, 960 bp, Homo Sapiens
actttgtacaaaaaagttggcattggtgcagaagaatgcaacaggtgaaacggacccatcccatagtaagtttttaaaaattttgtcaggcgatccgtactgtgagaaggatgctcaggaagtccactgtgatgaggccaccaagtggaacgtgaatgctcctcccacatttcactctgagatgatgtatgacaatttcaccctggtccctgtctggggaaaggaaggctatctccacgtctgttccaatggcctctgctgttatttactttacgagaggcccaccttatccaaagagctgtatgccctgggggtctttgatgggcttcacactgtacatggcacttactacatccaagtgtgtgccctggtcaggtgtgggggtcttggcttcgacacctgtggacaggaaatcacagaggccacggggatatttgagtttcacctgtggggcaacttcagtacttcctatatctttcctttgtttctgacctcagggatgaccctagaagtccctgaccagcttggctgggagaatgaccactatttcctgaggaaaagtaggctgtcctctgggctggtgacggcggctctctatgggcgcttgtatgagagggactaggaaaagtgtgtggtctgtggggcggactctggccatcatgttgacagccttgcacttccacaggctacaagccctgggaccatctttctgccttaagggcaggagcccacttctgtggcaccagattccaccctgggaactgtggaaaaagtatgagaggcagattctcctcagtgtcttcctcttaaacctcaatcatcgagacattatggggtattttctgttcacatttatctttttcaagccaccatcttcctctaaccaatctctcaataatgcgaatgggtctcaagcttaaaacaaaaataaaatgtcagttttataatttttacacatcc

SEQ ID NO: 189871 - DNA, 933 bp, Homo Sapiens
ccatacattctattgctcgttaaggggttgcgcacatggacaatgtacaaaaaggagaaataggtctttgcgttaatgaaaaatacattttttctctacaaaggaatcttttctaatacaagaaaataaatattgcaacataagccaaaaataatttaaaattgctcttttcaatatattttcaatatttctcttgtatattaacaaatggcacatcactttctttgaaacaaagacagaaggtgtctcctcctgtgacattcatatcatccccccaccgtcccctcaaactgacgtggaacacaaagtgtttgtgcctctgagggagaaagtggcaggaggtgccttaaagaacaaccaaaggtctcagactccagccctggctcattggccaatgtggccagcgaggccaagggcatgggagagtgccctccccaagggccttgctatagaaatccagatcatttttcagtggtttgcatatggacaaaggttggccacatctggcagttagcaaggaaatgccaagttcagccgctgccaatgttggttagaattgggcagttgaatctctaggaattgtcccagctagtcccacagtgtgcccatacacagtatacacaggcatgcctgcatacggacacacgagacgtggcctggcacaccccccacaaacaattcaacatctatgtctggaaacctggggtggcttctccaaggaagctgaggcccttacattgcaaatgctcacacactgtcactaagtcaggctcatttaataaaataaacccttctacctttcttcttctcatttgtttcaaaatacatttatgatacataaaaatacttttcttgcacattatcctttgtcatgtgatgagggggaaggaggtggtgggcggtcaggtcagtgagaagggggacgatagccaa

SEQ ID NO: 189872 - DNA, 1228 bp, Homo Sapiens
tggggaagtttcagtcctaaaaatccatccaaaggaccaacctgccttacacatctcaaggaattcagctgttgaaatcatttgaactaatcaaggaataaatcctaatgttctgggactttattttcacatgttaaatgctggaatatattatgaaaatgttttcaagaaatcacttaagtgttcatagaccagtatttctgacaggtaaaatgctaaaataagctacctgtaataagtgtggattatatttttgggttttgtataatattgcaaattaaccacacaaaaaatgtttaatttatgcaacaagcatgtttgtgcaaatttcatgggactttaaaaagaataagtatttgagaaaatatctggttcacttacactacatttactgtattattcttttatagcattaggtgccttgtattttaaatctgtgacaaaccatggcaaatttttaaaggggaagtattattataaaatgaagaaatatgtatttctaaaggctatattgctgtaaacttaattgataaagctctgtttaatttagagttttgaagaaatagtctcccttcaattaagaaattttcataatggaatgatttaaattgaagtgacaaagagtattattaaaatacaatgtttatacgtctatttgtgtattgtagatgtatcaagtgatttctaatttttttcacatatgaatgtgccagattactctagaactagatgtctcttctttaaataattttagttttcctgaataaatttgtaatggttaaagtaccaagtaagtaaggcgagaagggattctgtttttaaaatcacatcagaacttttcctctactaagattataaattaaatgtaaaatactcctaattgcaattcttaaacttaggccttacatgtacttattatgcaactgctcctggactctattcaccatagatatcagtaaacgtatgtcccaggattcacaggcttttgattaatcaatattcttttcaagtttgctgtgaagagtttagttctcttcaaaatttcttaactaatctgatttttaagaattctctttgcagtgtttagcttcctattcacattcttaaaattgctttggtgttaccatgagtctaaaatgaagtttagccttccttttgtttcattctgagaacttctatattatatttacctttaaaaattgtttatgatattaaatttaaaatacaa

SEQ ID NO: 189873 - DNA, 831 bp, Homo Sapiens
gaattcatagttaagaaaaacacacaggcatgatttaaataggacacagtaatgagaatgggcagttctgcagtgtacactttctcaagcacctcagaggacacacacttaaagtacaattcttcacagacacatgaagcagaacatttgaaaatcaaaacttaaatacaagattctaaaagtgaatggcaatttaatggttaaaatttgaccagtggtgaaacaagcagcaagctacaaaatccatcaccaccaacagtttcaatgttagcactaagtattaaaccaaagtaatgcatattctggttttgcttcttcaagaacagcccgtttattctgtttcaatctctctgaacaatactggtaggtaatagttacactgacaattctcacaaaaaaacagtgttggttcttgccatcactgaatttatagtataaatctcccaaggctttaatctagttcatcagtgcagtttagataagaaagccataaaaacaaatgggcatactgtcagttaatgagaaatacaactgcacatgcacaattaatattactctctcttaatctactaagagaacagtttattagtagatttaacaaaaaccatctctagaattcaaaatagtgcccatatttccgttggttctataatataaagaattagtgtagtcaagatctgttaatactgaatcaaacccaagttcaaatgtgctgagtttccaatagcaagaagggtaatggtagccagctctcagaataatgctgtcggaaatctagcttggagcccaccgcagataaagttgctgctctatgtaggacacagaacccaa

SEQ ID NO: 189874 - DNA, 1470 bp, Homo Sapiens
ttgggggagttggtttgggagctgccgagctcctgggaggatcgcagtcagcagagcagggctgaggcctgggggtaggagcagagcctgcgcatctggaggcagcatgtccaagaaagggagtggaggtgcatcgaaggaccctggggcagatcccaatctggggatggaccccttctaggacacgctgcggcggctgcatgaggccttcaactgagggcgcacgcggccggccgagttccgggctgcgcgactccagggcctgggccacttccttcaagaaaacaagcagcttctgcgcgacgtgctggcccaggacctgcataagccagctttcgaggcagacatatctgagctcatcctttgccagaacgaggttgactacgctctcaagaaccttcaggcctggatgaaggatgaaccacggtccacgaacctgttcatgaagctggactcggtcttcatctggaaggaaccctttggcctggtcctcatcatcgcaccctggaactacccactgaacctgaccctggtgctcctggtgggcgccctcgccgcagggagttgcgtggtgctgaagccgtcagaaatcagccagggcacagagaaggtcctggctgaggtgctgccccagtacctggaccagagctgctttgccgtggtgctgggcggaccccaggagacagggcagctgctagagcacaagttggactacatcttcttcacagggagccctcgtgtgggcaagattgtcatgactgctgccaccaagcacctgacgcctgtcaccctggagctggggggcaagaacccctgctacgtggacgacaactgcgacccccagaccgtggccaaccgcgtggcctggttctgctacttcaatgccggccagacctgcgtggcccctgactacgtcctgtgcagccccgagatgcaggagaggctgctgcccgccctgcagagcaccatcacccgtttctatggcgacgacccccagagctccccaaacctgggccgcatcatcaaccagaaacagttccagcggctgcgggcattgctgggctgcggccgcgtggccattgggggccagagcaacgagagcgatcgctacatcgcccccacggtgctggtggacgtgcaggagacggagcctgtgatgcaggaggagatcttcgggcccatcctgcccatcgtgaacgtgcagagcgtggacgaggccatcaagttcatcaaccggcaggagaagcccctggccctgtacgccttctccaacagcagccaggttgtgaaccagatgctggagcggaccagcagcggcagctttggaggcaatgagggcttcacctacatatctctgctgtccgtgccattcgggggagtcggccacagtgggatgggccggtaccacggcaagttcaacttcgacaccttctcccaacaccgcacctgcctgctcgcccactccgggcc

SEQ ID NO: 189875 - DNA, 1214 bp, Homo Sapiens
ttgggccatgagaacccccagacccgggttgggggcccgccccccgaggggctgccgggcttcaacagcggggtgatgttgctgaacctggaggccatgcgccagtccccgctctacagccgcctgctggagccggcgcaggtgcagcagctggccgacaagtaccacttccgcggccacctcggggaccaggacttcttcaccatgatcggcatggagcaccccaagctcttccatgtgctggactgtacctggaaccggcagctgtgcacctggtggagggaccatggctacagtgacgtcttcgaggcctatttcaggtgtgagggccacgtcaagatctaccacgggaactgcaacactcccatcccggaggactaggcgctccccgtgccttgcccccggggcctccagatctgggggaaggacagggttccttgggacagacccaagggcagtgtctgacccgctagagagacaccgcagggaagtcctgtgattaaggtgctgagacctcctgccgggcaggtcactgtgctgaggccacccgccaaggactggcctgtgcactgctggtgcttgggaccttattcctccagggagcaggcgacacaaaggacacgcatgtccagtgggctgggaagcaagcacttgaagagaaggaaggggagaaagggtcccccttgctgtctgcctctgaggaatggaaatcctttagacccggccttttttggaccaatataaatttaatttaaattgacagccttccatttttcgagaaagtacaaacagaactgctttagcacccatcgagccccaaacgggtaaggtaagccaaggttttaatgaccagcccagtatctaagcttccaaacgaatgccagcccatcacatactcaccctgggaggctgctgcacgcgcattctcctgatgctcacgtcacttggtgtaggtttcaggatcgcctctttgaggaaggacttcaggaccaactggggcctgcataagaaaacttatctcattattagagtactcacagcttgtatctcccagctacatcctagaaccccattgtcctttattccaccaaaccagctccaggtgaccagactctactcagaaagcaaattcgtcatcaaagaacagagactggccaccacaaggacatgcaggagaactgtcgggaccaggaagactcattccaaaaagccca

SEQ ID NO: 189876 - DNA, 1217 bp, Homo Sapiens
ttggctggagattaaacttctaaatgaaaagaatatatctttaactaaacagattgatcagttgtccaaagatgaagttggtaaactaactcagattattcagcagaaagatttggagatacaagctcttcatgctagaatttcttcaacttcccatactcaagatgttgtttaccttcaacagcaactgcaggcttatgctatggaaagagaaaaggtatttgctgttttgaatgagaagactagggaaaatagccatctaaaaacagaatatcacaaaatgatggatattgttgctgccaaggaagcagctcttatcaaactgcaagatgaaaataaaaaattgtccactagatttgaaagtagtggccaagatatgtttagagaaactattcagaatttatcacgtatcattcgagaaaaagacatcgaaatagatgcactaagtcagaaatgtcagactttattggcagttttacaaacatccagcactggtaatgaggctggaggtgttaatagtaatcaatttgaggagcttctacaggaacgtgacaagttaaaacagcaagtaaagaaaatggaagagtggaagcagcaggtgatgaccacagtacaaaatatgcaacacgagtcagcccagcttcaggaagagcttcaccaacttcaagcacaggttttggttgacagtgataataattctaaattacaagtggactatactggcctgatccaaagttatgagcagaatgaaaccaaactcaaaaattttgggcaggaattagcacaagttcagcacagcattgggcagctttgcaataccaaggatcttcttttaggaaaacttgatattatttcaccccagctgtcttctgcatcattgcttactccccagtctgcagagtgtcttagagcaagtaagtctgaagtattgagtgaatcttctgaattgcttcagcaagagttagaagagctaagaaaatcactacaggaaaaagatgcaacaattagaactctccaggaaaataaccacagattgtctgattcgattgctgccacctcagagctagaaagaaaagaacacgaacaaaccgattcagaaatcaagcagctaaaggagaaacaagatgttttgcaaaagttacttatgaaaaagacctcttaatcaaagccaaaagtgatcaactactttcttccaatgaaaatttcactaacaaagt

SEQ ID NO: 189877 - DNA, 1409 bp, Homo Sapiens
ttggtaaagctattcctagaagaagagttaacagtggagacactgaagttggttcttcccttttgagacatccgtctcctgagctttctcggctaatctcagcccacagctctctttctaaaggagaacgaaatttccagtggccagttttagcttttgttatacaacatcatgatctagaaggtcttgaaatagcaatgaaacaggccctaaggaaatctgcttgtcgagtttttgctatggaggctttcaactggcttctgtgtaatgtcatccaaaccacttctctccatgatattctgtggcattttgtggcatcactgactcctgcaccagtggaaccagaggaagaagaggatgaagaaaataaaacaagcaaagaaaattcagaacaagagaaagatacaagagtatgtgaacatccactctcagacatagtgattgccggggaagctgctcatcctttaccacacacctttcaccgcttgctgcagaccatctcagaccttatgatgtctctccccagcggcagttcattacagcaaatggccctgaggtgctggagtctcaaattcaagcaatctgatcaccagttccttcatcagagcaacgtctttcatcacattaacaatattttgtcaaagtcagatgatggcgatagtgaagagagttttagcatcagtatacagtctggctttgaagctatgagtcaggaattatgcatagtaatgtgcttaaaggacttaaccagcattgttgacataaaaacttcaagccgacctgccatgattggcagtttgacagacggctccacagaaaccttttgggaatcaggagatgaagataaaaacaaaactaagaacatcaccatcaactgtgtaaaaggaatcaatgcccgctatgtgtctgttcacgtggacaattcccgagatcttgggaataaagttacctcaatgaccttcttaactggcaaagcagtagaagatttgtgcagaataaagcaggttgatctggattccaggcacattggctgggtaacaagtgaacttccaggaggggataatcacatcataaaaattgaattaaaaggcccagaaaatacactgagagttcgacaagtcaaagtcctgggctggaaagatggtgaaagcacaaaaatagctggccagatttcagccagtgtggcccagcagaggaactgtgaagctgagactctgcgagtattcagactgattacgtctcaagtatttggaaagctcatctctggagatgctgaacctacaccagaacaagaggaaaaagcactattgtcatcacctgaagagaagaaaaagcaacatcagatgctgacctgaaagaacatatggttggatcatattcagcaggagtaagctgactaacttacaaaa

SEQ ID NO: 189878 - DNA, 1053 bp, Homo Sapiens
ttggctcttgggattcagcaccagacgtctgtgctgcctggtttgcatccggctcacagagcccagactgctggaacagccaaggactgtcaggctggacaaaaataactgcaaggaggggcaagagaaaggatgattcgaggcaccttggcccttcaaggtcatgcagtgggtcgagcgcctgagatcctgttcaccaggactccacagagctggctctgctcagaagccatttcattccccggctccaccctaggccactttttctaacagaggaaacaaatggtccagcagtcgttcccagcagaacagcggagcctggactgacacccagtgggaccagtgttgccacaccagttgataaaatgcagaaacccttctgtactcgttggtaaatatctactcccccaagtgactccaggtgccccccaccgcctggcacttcccccaggactcctacgatctggttactgcctggccgatccaaggctgtggagtcccagagccagcagttcactggtgctcattccacactggttagatacttcagttgtcacccctgggaagattctcccacctcctccctttgatggaaccaccctccccagaggctgcattgaggagactccacagactgaaaagtgagtttgcagaaaccttggggaaaagggccctttcaaagaagtggataagagggaggagatcattgagtgacccaaaaagctcttttgaaaagacagactcctcaaggagagataaagaggaaagcacctctttcattttttagtgtgagctaattccatcagactgctgtcctcctggacccatctgagatgtgcagtagcaaggagaggggggatcattttagagagtgggtcattggcagggagtgctccggagggaggcagaggggagactgtggtagaatgaagacagaactcacacatgctcccaggattgggggacagggacagaggaggtaacagaaggcaaaggccagtttccccgttatcatgaaggggccccactccgacaggaaacagggacaactcc

SEQ ID NO: 189879 - DNA, 1628 bp, Homo Sapiens
acacttatggtttatgttgcgtaatattattaacaaatcagcattctgaccaatgataatttataggaaattcatttgccaagtcaatgtttcattaagttaatatttggcttatataaaaaaatgtttaactctattaacttagcaaagtcatgtctatgatgccatttaataaactgaaaggaaacaagatggtacattctgagtttttacttcttaagaagaaatttaattcaataatttgattcatcaatactggaaaattacatctttcttccctgtcagtactggatggcaatgacgtgaaagcagctttcctggttctcaatttcccttcaatgggaagcattatggaatttcagcagtgaacatcatctggttcctattcaaaccccagctccaagaaaatgtgagagagaatctaagatataagttctgttcaaggcaagaagtttccaatctcaaatatttcatgccaacaacttatgttataccagctgttccatcattgaatgctaaatgatcattgaaaacaaacgaagataacagtgccctcgttgccatcattcattattaattttacataaactgtttatgtccaaaaatatgcatataaaacacttatacagataaattagtgttaagaatttaaaatgtgcagtaacatccacaaatgtcctttttgtgttgtgaaatctatacaattgttttcaaaactggaattctgaacgccctggccacatattagaaacatgtcagaacacacatgttgtggagagcaccaaagctgaccatctcacaaaagcaaaaccaaacttagtgctttcattattgcttaatccactaattagcctgaaaagaagaccactgaatactaaagaggtatttactaaacagtgtcgatttctactagcaaacttggccctcacaaatcaacaggggaaccaggagtcttttcgcagctcattgtctattaggagtctgatacattttcaattaaagccttcatttttcctgttggcttcagcatgtgtggcccaaacaacactctctctgaggtggcctctgattcagactttggaattcctttttcaacttcatcttggctatcacttcgataccgataagcaaatttctttttcagagcctctgctatgagggcagcagggtcagtagcatccactggcttgggcttcacatcttgctctgacctcttcactgaccgaagttttacactgttcatctctttaaggatctctagcatatttggcatttcaggtttctttggattgttcttaaccaaagtctttccagcattggctcttttctctcttcgttctttaatcagatcaacagcagatgtactttggtggagccccagtgcagggggaggcaggggcggtgggggaggtggagggtgtggtggtatggtaccaaatgtggtagaatctaagtcacctgcagtgagattttgctgctcctgctgggtcacaattttggcaatctgagctctgagagcagcaagttcattttcgagagcgcaaatcttctgcagtgcttcctcatttgccagcgctggggtcttcagctgaggctcttcttgagacaagtctggtaaggaaatccaa

SEQ ID NO: 189880 - DNA, 707 bp, Homo Sapiens
aggctcaaggaaacttccctgctagtgaaacttcactctcaacaccactcaatgatctaacagcttcctaaatccaacttcattctttttgcagtttaagcccagtttcaaataaggcatcactgggatggataaagaaaacactgagatgggggatagaaacattaaaaagcagaaaaactaagcaaaatctaaatcctgtcaattggatgtttaccatttcacactgaaatctttccctgaatagaccagggacatcactgcctcctgctcagatctcaaagcttcaacatgctccacaaagcacctccctaagtaccctagtgtgttccctgggagagttgctacacagcccatctactggatttagtaccatagtcccagcacttggcccagggtcctagactgctgggtaggtcctcagaggtatctgaagtcatgtctacattgatacaaagaaacgtatggctcatctgtaacaatacgtagagaaacacaattaagaacaataaggatcacagaactcgaatggatcattataacttcaagactcagtttaagctaacaagaaatgcactgtagcccttttctcacttttatattcagatcagggctaaccctaacatgttcttaaatgaccacttatggtcatttaagtggtcaatgggaatattgcagcagagaactgctgttttgtttaaacccaa

SEQ ID NO: 189881 - DNA, 583 bp, Homo Sapiens
cacaccagcagggacctcggcgctgccccctgggaggagcggcactgccgcttccggtagaagcctggatggtcacattgggcacgtagagtgttgagcccctcggtagacctcagtctggagttgctgcagcactgagtccagatgtctacggcatgggcccatctcagtgtcttggacacccgcagaattgggctgggagggcgtggtagaggtgcctggattcctctgttggtctctgcggttcacatcctgtgggcgggcagtgcctgcttggggtttactctccttaggattctcctctgcaacagcaggcgcgcgggccggaaggcagcggcctcggccgagcagcagcgcccgcaaaggcgcctcgtcgtccttgggcggatggcactgcagtcctggggcgcagttaggggtgtagaccccgcactcctgcccctccctcctgagacagccctcagcttccgcgcagccctcggctggcgaccccccatcctcctcctccacgcagccccctggacaacccgcctgcaccccttgcccgcagcctgggcaccgcgccaaggcgcctcctgggctg

SEQ ID NO: 189882 - DNA, 1392 bp, Homo Sapiens
actttgtacaaaaaagttggctcaattgaacctcctaatacagccccatcaagtaagaaaaaagacaaaaaagaacaactttcaaaagcccagaagcgtaagctggcagacaaaacagatcacaaaggagaacttcctcgaggctggaactgggttgatgttgtgaagcatttaagcaaaactggctctaaggatgatgagtagcacttggaatttgagacaaggaaagagcattctttaaagagtaaaactgggttcaaaatctttcattactattttctggtattgaggcgactttttataaaacacaattttttgtatgtttcttacattaaaaaggttgtaagttgaaagttcatgaagagatcttgttgtattaaattattttcacaaacttgccttaataaaaggtgaaaatgttactgtttagtatactttatgaagccccttgagctttataaatggacaggcatggggaataagaatcagtgttaatttaaatgatcttatcctggtggatgtgctattttcttaaaggagtatgaagcccttttcaaactatcatcccagtggagcggagtactcagtgaacagttactccatagtgcaatccatattaataggcttcttctcttaagtcttcatctcttcttttgcttaattactgaaccgtaaattacttcagagaaatttaaatgctggtatttgaactttatacatgatactttttgtagtttcttttaatttttgaaagatgaactgcttccttttaataaattaatatctatttatacttttctcttgatttgggtcaagatgtttgatcatgagtgctttgagtggtatgtggaataggagaatataaaaacaaatctgccaaatacactagaaagcattttagtaagaaatgctggccctttcttaaaacatttctcttgcatataccaggatgggagtaaaagatgccttaatatttagtttttgtattgttggagacattgattttaataaaatcctatttatctgctgttgtgtgcttttagttgttggataactgaggtctcctaaatggttcaacataaaaccacatttcaagtcttgtttctttttggagtgtcttttcaagtattcaaatgtatttctcaacctgagcatctttttaatcatatacatgggagtcttttaaatgctgaactgttacacatgcttgatttaaaaataataataatagaggaaactattggtctagttgtgccaagaaaagtttctgatgtttatgtgtgatgtacagtgattttgtatatgcgcccagctttaagaacacataaaactattacgtctggtaggaagattgttagtgcctcaagttacacctgtgcagcttgggtctga

SEQ ID NO: 189883 - DNA, 1007 bp, Homo Sapiens
  misc_feature (735)..(777): n is a, c, g, or t
ctttgtacaaaaaagttggggcaatggcccgcgctgacgagagctgcatttggaagtgttgtggagacagccccgtagcccaatgcgaccagactcagggaaaacatcaggcccctccagctgagcccttgtgtgagccccgcccctccctaaatgccagacttgggagctgacagacagcactgcctgtgctgggtttaaaagtcctggtcagctgagtggaaatagaaggatttctgctgccatcatcttccatgggctttccaggtcacacgacctacaagtagggagcagggaaagaagagtgagcctgcatgccaattctaagctcttcaggatcaaaaatggcagcctgtggaggcacctgcaagaacaaagtgactgtgtccaagcccgtgtgggacttcctgagcaaagagaccccagcccggctggcccggcttcgggaggagcaccgtgtgtccatcctcatagatggcgagacttctgacatctatgttctccagctttccccacagggtcctcccccggcccctccaaatgggctctacctagcccggaaggctctcaaggggctgctaaaagaggcagagaaagagctgaagaaagctcagaggcagggggagctgatgggctgcctggctctggggggtggaggggagcaccctgagatgcaccgcgcaggcccaccccctctccgagcagccccacttctgcccccaggagctcgggggnnnnnnnnnnnnnnnnnnnnnnnnnnnnnnnnnnnnnnnnnnngccttcgggaggaggcagaagagcaggagagcacctgccccatctgtctgggggagatccagaatgccaagacattggagaagtgccggcattcattctgcgagggctgcatcacccgggctctgcaggtgaaaaaggcctgccccatgtgcggccgcttctatgggcagctggtgggcaaccagccccacaatgggcggatgctggtctctaaggaggccaccctccta

SEQ ID NO: 189884 - DNA, 800 bp, Homo Sapiens
ctataaaaaaacaactttgtacaaaaaagttgggaacaaataggaatattttcatggaattttacctatttttataattattatttcttaaagtgattaaatgagaacatggatgagtggacttcatattatgactagctttactattttaattcaccttgcataactactgaattttgtcattcttgaaagtatgcaatttttattttggttatattacaaaaatgtcaatcaaatattaaaaaatagttaatgtgatagaaaaaccttacatatttttttcttatgtttgtttagcgactttagcaaaatgttttcatataatctcatctgtttacctagaagataggttaaggaaatatattattattcctgtttgatgtgggtgaaggcagagatctaacctggcttgtttagggccataccactaattagaaaatctgtgctagaacctgtgtcttattcctataagctatgtgttcagactgaaactggagaaattatgactattttatttatagtagtagttaaatctgaatgtgtatggacaaaaatatttaattgctcagtaaactgcttaacttcaaagatagttattgaccttataaataaatatttcaaaattttgattcggaagactaagtctggacgtagacattataatgctatcaaagaagtttgatctctgttttgactaaactagaggaaaatgattggatgtgtttattcttttcctagcagatgggtttaactttgtactctttgaaaaataatgctgatttataaatctctgcctataa

SEQ ID NO: 189885 - DNA, 1006 bp, Homo Sapiens
  misc_feature (896)..(904): n is a, c, g, or t
  misc_feature (936)..(946): n is a, c, g, or t
ttggggattcttagctttgccaggaaatcctgaggctccagggaacatgggtttatttgatcaacagttggctcttcagtgggttcaaaaaaatatagcagcctttggtggaaatcctaaaagtgtaactctctttggagaaagtgcaggagcagcttcagttagcctgcatttgctttctcctggaagccattcattgttcaccagagccattctgcaaagtggatcctttaatgctccttgggcggtaacatctctttatgaagctaggaacagaacgttgaacttagctaaattgactggttgctctagagagaatgagactgaaataatcaagtgtcttagaaataaagatccccaagaaattcttctgaatgaagcatttgttgtcccctatgggactcctttgtcagtaaactttggtccgaccgtggatggtgattttctcactgacatgccagacatattacttgaacttggacaatttaaaaaaacccagattttggtgggtgttaataaagatgaagggacagcttttttagtctatggtgctcctggcttcagcaaagataacaatagtatcataactagaaaagaatttcaggaaggtttaaaaatattttttccaggagtgagtgagtttggaaaggaatccatcctttttcattacacagactgggtagatgatcagagacctgaaaactaccgtgaggccttgggtgatgttgttggggattataatttcatatgccctgccttggagttcaccaagaagttctcacaatggggaaataatgcctttttctactattttgaacaccgatcctccaaacttccgtggccagaatggatgggagtgatgcatggctatgaaattgaatttgtctttggtttannnnnnnnnaaagaagagataattacccaaaagccgagcannnnnnnnnnntagatccatacagaaacggtgggcaaattttgcacaatatgggaatccaaatgagactca

SEQ ID NO: 189886 - DNA, 747 bp, Homo Sapiens
  misc_feature (456)..(504): n is a, c, g, or t
  misc_feature (663)..(677): n is a, c, g, or t
ttggcacattcggcacctagaaggcacgtgggcaaagtaatcatcgttcaggcccaacccttaggtttaaaaagtcaggttgtccatcccattgggttcactgagtgaaggcacataaagcaattgaggaggaggaggaacccctcgtccccctaggagcagacccaagcttgtggcaccaggcatctgatggtgccaggaaagccactggaattgtcacacggcgagcacagagggccggccaccagtcctcgatgcttctgaaccctgaagcccgatgacatcttacgaggtggacgttggactgttcatgcgcatcgggtgtcagtgactcatggagaagaaatggggtaaatttttagtgatgttgctaatcattgaattctgttctctattaaattaagaaaatgttccaaaagccataagcctgaagattggccctgtgcacgcacgcgnnnnnnnnnnnnnnnnnnnnnnnnnnnnnnnnnnnnnnnnnnnnnnnnngaaggagagagagagaaaactgatggggaaaacaagctgtgtcttcttaactgcccaagtgaaaagcaaccaagtccaggaaattacaatagctgttaaggaaaggaaataatggtacagatctttttctgtctatcaaaactatttgatccaaagtgnnnnnnnnnnnnnnnctagaaagctacggaaacctgccattagtattgtggtgtatttttaagattaaagggtacactgatggac

SEQ ID NO: 189887 - DNA, 1070 bp, Homo Sapiens
ccactctccagcaagctcaaactgctgtcaacaattgtttactgtaccttaaaaaggaacagataaggcaagagccacagtcaatgttttctgtgaaatggtcttggcaaatagcattaagaaatcttgttgaatttcaaagaaaaggtctgattagaggtgcctgttggaagcagaagcctcaagaaatgaggaaggaaagttaatttgagggtctgtttcatttctgatacagaataatcacaaaaacaagtatatgccgctggctgtagctcccttaggatttggataaccagctggatttccagatggccactcccgttctctatgcttccctcctccgggctatatcctgcagagcttcagcgggaagttctccgtgatgaggtggtcagggtgaagcagcaccacgatgttaacctcaaattccactttgaagttggtggtctccagtgtagggcaggtgaacagcctagggaagaccatgtagatggggacagagaggcccctgcacacatccccgtcggcgatctgaatgttctgaatctccgtggcgtcgcgggcatagccttctgcacacccgcacgtctccacgcgcaccagctgcagctccacgcttctgatggcggcttccgagctctccaccaccagctctcccgttagtggctgcgtgatgacacagtttgttgagttgagatgtcctcgaaggagaaatttgggaagcaaagctctctctttgacgttctgtaaggtttcaggtgtaatcgtgaagtccacgggactgggagtaaacttccccttctgaggagcggagtgaacgataaattcacaggtctttgtcaagtccttggccaacagagaccgcttcatgtcacagcgcagtgtatactgaatgttgacaaacacgccatgatacgtctcatacagaactttgttacccttcaagtgcagaggaaattcaaaagggatttctgttttgccgctgggaaatttccccggcttcaccatttctatggtgctgttgataatctggataggcttaacagaattataaaaagcttcaaacccaa

SEQ ID NO: 189888 - DNA, 1059 bp, Homo Sapiens
ttggcacagagcgacgctggtctcccagattgttgcagaaggagacggcgtcgacgtctgactggactcgcggcgacttacctttcagtcgtgcgctcctgatccggcgctcggaatttgtccccggcttcagggctgcggggcctggaaggaggcgtatcgaggcggctcgaaaacgatccaggggagccgaggcgctcctcttgtcatcccactcagcgccatgtcctggatgttcaagagggatccagtttggaagtacttgcagactgtccagtatggagttcatggaaattttccacgcctctcatatccaactttctttccacgttttgaattccaagatgttatccctccagatgactttctaactagtgatgaagaagtagattccgttttatttggaagtttgagaggtcatgtggttggactacgctattacacgggagtagttaataataatgaaatggttgcattacaacgagatcctaataacccttatgataagaatgcaattaaagtaaacaatgtgaatggaaatcaagttggccatttaaagaaagagcttgcaggtgctttggcctatatcatggacaacaaattggcacaaattgaaggggtagttccttttggtgcaaacaatgcttttaccatgcctctgcatatgactttttggggaaaagaagaaaatagaaaagcggtttcagatcagttgaagaaacatggatttaaattgggtcctgcaccaaaaactttaggattcaatttggaaagtggttggggctctggaagagctggaccaagctatagtatgccagtgcatgctgcagtacagatgacaactgaacagcttaaaacagaatttgacaaattgtttgaagatttaaaagaagatgataaaacccatgaaatggaaccagctgaggctattgaaacaccactgcttccacatcaaaaacaagctctagcttggatggtgtcacgggaaaatagcaaagaacttccaccattctgggaacagcgaaatgacttatactataacacaataacaaatttttc

SEQ ID NO: 189889 - DNA, 1880 bp, Homo Sapiens
ttgggatcttcctataactacggcaatgaggatcaggcagaattcctctgtgttgtctccagagaactaaataattctaccaatggcatcgtcatagagccgagcgaaaaggcgaagattcttcaggagagaggatcgcggatgtaaactaagaccccgaaaactccagaccttcaggagagcagtcagcagagcccctctgtgaagtgaaacctcactcctgtccagtgaccgagccactgcaaagcacagctgatcctggccccctgtgaagaagtgttctggtcaaaactaaaggaactccctccccacctgcaggactccgaagacagtgcgacttctggctgcagaataccttttcagaaacctgctttcatttgcttagccagtattagaacagatctttacaacagcagctgggctgggttcccagtcggagcctttcggggatctgggggatgagggcggaaggcctagctccttggaaatggcctgtactttaaggacgctggagccaagaggattgttcccgtgccgtgccatggtttcaccctatgtgtgccacaatggacgttagcagctgcttcggaacaccgtccctcctatgcaccctccaagacgtgcagcagatgcaaagggttctagctgcagtttgtcgaattgaggttttaggtaaagcatagagttgccagagtaccccgcattcccatgaatagagcctccaaggaaagggaggatggggtgtcctttgttgtggttggaggttggtgatcattgctctggatttggggctcccggctgccaccacatgcagctttgcctcacctttctccagcagccgggaccctctggagagcttgttttccctccaagaagaggtttgagacaggcggcatcctgcactgagtcagacaagtgggagctgtaggaactgcacctgcagcctcttcttactccccattgaccctgtcttccttccctggctttttcaactggaccaaagatgaaggcacttatggaccctttgatggcttggagtggggaaggctgtttctttgaaagttgccaaatgtgttatgttgtgtctcagagagagttatttctgtgactctcttggaaatgccttgactgaatgtgcaatatttgtgtctcttggtttctaaccttggcggacctgctcccctctgtactgtccccagtggtatgtatgtatgtgccaggcagtctggggaccccctgtgtctctgaccacccccctgacccccgccattactttcttttctggagtgccatgctggcgaggatccggatgcggcagcaccctctttcgggctgcatccacagagtttgtgtccacactttctctccgagcatgtgggtctcgctgagcagtcatggaatgcggtagagccaggggaccctgtctgccccgaataactttcagtagtatggcagatggcacagagaaagggaaggggctctggggacttctccttctatgaaagcctcctcgagccaggtgctcctgggcaccttcagaagtgatgtcctgtgtgctccacagctcacctgcttgccaaggtacgtctgggtagtagtttctggaaatgactgcagactgtgccaaatgtcttttgagcttctgacctgaccatgcccagatggcataacttttccctaggaccctcagtctccttgtttctctgtatctgtagcatagcatagaacccggtatacaggggtttctgctgacacatcaacgtctacacacctatgcgccacattttacagctgtaaagtgttagatgaactgccgtcctcagtaaaagcagccaccccttcaggagtcacaggcatccatccagtcgtatctttcagag

SEQ ID NO: 189890 - DNA, 1064 bp, Homo Sapiens
  misc_feature (801)..(826): n is a, c, g, or t
ttgggaatgagtcccagcacaactatttaagaatcactcgtattcttaaaagccttggtgagcttggatatgaaagttttaaatctcctcttgtaaaatttattcttcatgaagctcttgtggagaatactattcccaatattaagcagagtgctctagagtattttgtttatacaattagagacagaagagaaaggagaaagctcctgcggttcgcccagaaacactacacgccttcagagaactttatctggggaccgcctcgaaaagaacagtcggagggaagcaaagcccagaaaatgtcttcccctctcgcctccagtcataacagtcaaacttctatgcacaaaaaagccaaggactccaaaaattcctcctcagctgttcatttaaatagcaaaacagctgaagacaaaaaagtggcaccaaaagagcctgtggaagagacagacaggcccagcccagagcccagcaatgaagctgccaagccaagaaatacagagaaggacagtaatgctgagaacatgaattctcaacctgagaaaacagttactactcccacagaaaaaaaggagagtgtatctcctgagaataacgaagaaggtggaaatgataaccaagacaatgaaaatcctggaaatacaaattgccatgatgttgtactagtacagtgaattatcagaaaacccagaagccagtttaggctagagaggaaaaaactactgtatcatttatcctaaagaacagagatgaggtcaatttcaaattttagccatctgtttgtgatttctgtcataagcnnnnnnnnnnnnnnnnnnnnnnnnnngatgacaatgaattgaatatctaataaggagatttaagataagacccaataaatgaatgtattctgtaatgcttttaggatgtgaattttcaaattttgtatataataattactttgagaatattttcagagtatctagaaattaccatgtagtatttggtatacaaaatacattcttttgagacattatagtctacatgaaggaaatcaagaggataatttcattggattgctacac

SEQ ID NO: 189891 - DNA, 1252 bp, Homo Sapiens
tccaggatttccaggaggaccagcagggccggtttcgcctgatcgtccacggggaccaggaggcccaatggggccagggattccattagcaccatctttgccagagggaccgacggggccaggaggacctctagggccagaaggaccagcaggaccagaagcaccttggtctccagaaggaccaggagggccgggcagaccctgcagaccagtgaagccacggtgtcccttcaggcctctctcgccaggctctccagcctctcctttgtcacctctggggccttgaggaccctggattccccgggctccagctggtcctgagggtcccatggggccttgtgcaccagcttctcctctgtctccttgcttgccagttggaccagcggggccaggggagccagggggcccaggggctccaggagctcccacagcaccagtctcaccacgatcacccttgactccagcagcgccatctctgccaggggggccatcagcaccggggcttccctctcgtccaggttcacctgcaggacccgtcaggccaggaggacccacggggccaggaggacctctgtctccagatgctccaggagcaccctgcttgccgggctcacccgacgggccaggcaagccagggaatcctctctcaccacgttgcccaggcagaccgacgatgcctctctgaccagccagaccctggggacctggtggaccttcggcaccagagggaccgtcatctccaggctctcccttctcgccagggggtccagcaggaccttggaggccgggttcaccagctcggccaggggggccgctgtctcctcgagcacctttgggaccatcttttccagaaggaccagggggaccagggggtccagggttgccattggagcctgggggtccaacgcggccagcagctccagggaatccagtggctcccggggggccttgggcacctcgggctcctttaggaccagtcactccagtaggaccctgaggcccaggtgctccagaggggccctgaggaccaggggcaccagcatcgcctttctggccggcctctccttgctcacccttggccccaggctggccatcagcaccaggaggcccagcaaatcccgctggtccggggggcccagtctctccacgttcacccggagcgccacgagcaccagcacttcctgcaggaccaggaggtccaacttctcccttctcgccattagcaccagctgggccaggggggccaatccaa

SEQ ID NO: 189892 - DNA, 1572 bp, Homo Sapiens
  misc_feature (1050)..(1072): n is a, c, g, or t
agcacaaggcctaagggagagtgggggttggaactggattctgaaggtgatgcaggagcccctacttaacccgtgaggaactggaagaaccagggacttcaacctgaagccagcatccagggaagactttgggggaaactgaggttcccaccccaccatagccaggaaacatcagaagggaggtggaggcgcacccaggaacaggaatcccagccaatgctaggggttactgaaaaaaacagcccagccactgtaatatggactggcctcagctctggcccccaagactgcccagggagtaagcccaccccctcagtgggctgggggcaggggctggcccaggcctgagctgggtgtggcagcagcagaaggccccagccctggcacagtgcccacggggccaaggagctccctgagtcagcagtcactgactccacaccgacccgcgttcagggaagaggcgggtctctgtggcgtcatctggctcacgctactcagctggggcggactgcaagactggcacaccccatggggccgagtcctctccttgggcctggccaaggacatggggctgagtctggccacagttagctgtcccttaatgtccatgggatcttcggtaccatcaaaaaagtgaccttgaaaaggggatggaccgcttgtttgcttttacaagtgactgattaattaaaaaacataaaaaagggtctaacaacctctagtattcaacacttgcagttttaaaaagatcaactcagactaaacgctagcacaatcatgcatgccccgtggtgccgcggcaccccagaggctctcagggtcagcaggaagtcctttccttgtcatgtcaaaccaaaacagcggcccgcaggtcggggggcacaggcttcagggctgctccactccagggaggctccggccactttctccacaaccatttggcattgctttcccactgccttcattttcttgttcaaatcgtctttaaaattcttcttcagttaactgtacagtaccccactggggctggagcctgaggctagagccacnnnnnnnnnnnnnnnnnnnnnnncatgtacagctttcttttaagaatgcattctctcttgctgagggcaagggtggacaccgctggcctccagtccctctggtcactgcccgtcactcatggcccagatagatccaggccactgcgggccagaggagccctgccacagacctcaaggcccaagcagagtgcagcagaattttttcccctaaacacaaaaacagtccccagatgtcccactgctctggaggggccaggacactgctgagatgccacactggaagccgctggggcagggacagagagagtggagagagaggagtgctcaggggccgccctcaggggctccagggtggggagctcagcctacccttgaagacagctgccagggcagcctgtgtaggacgcggaggggaataaataacgggaacgtgctctctgcgacccggggcccctggcccagtggctcccagaggcacagccctgaggacggagaggggctgcccggtccgtctggaagccaa

SEQ ID NO: 189893 - DNA, 1516 bp, Homo Sapiens
ttggagactgacactgcagtacctacggaagaggcctacgttatatatgatgaagattatgaatttgagacgtcaaggccaccaaccaccactgagccttcgaccactgctaccacaccgagggtgatcccagaggaaggcgccatcagttcctttcctgaagaagaatttgatctggctggaaggaaacgatttgttgctccttacgtgacgtacctaaataaagacccatcagccccgtgctctctgactgatgcactggatcacttccaagtggacagcctcgatgaaatcatccccaatgacctgaagaagagtgacctgcctccccagcatgctccccgcaacatcaccgtggtggccgtggaaggttgccactcatttgtcattgtggactgggacaaagctaccccaggagatgtggtcacaggttacttggtttacagtgcatcctatgaagacttcatcaggaacaagtggtccactcaagcttcatcagtaactcacttgcccattgagaacctaaagcccaacacgaggtattattttaaagtgcaagcacaaaatcctcatggctacggacctatcagcccttcggtctcatttgtcaccgaatcagataatcctctgcttgttgtgaggcccccaggcggtgagcctatctggatcccattcgctttcaaacatgatcccagctacacggactgccatggacggcaatatgtgaagcgcacgtggtatcgaaagttcgtgggagttgggttctttgtaattcactgaggtataaaatctacctcagtgacaacctgaaagatacattctacagcattggagacagctggggaagaggtgaagaccattgccaatttgtggattcacaccttgatggaagaacagggcctcagtcctatgtagaagccctccctactattcaaggctactatcgccagtatcgtcaggagcctgtcaggtttgggaacatcggcttcggaaccccctactactatgtgggctggtacgagtgtggggtctccatccctggaaagtggtaatcacaggaccgtcatgctgcaagcttgccctgcccagccccaccaactaagtcgcactaggggctgtgagcaaagacagccagcatgctcagccccgctgccctaggtgccaggaaggtcacagatggacactggccattctggtcatctcagtctggaactcagtcccacttcttggcctggacaatgaacaggattcagttttgctgttaactttgcttctctacttttttttgtttgtttgtaatagcacatcccagagacatcagaaaccagcaactgattcagtgtgatttccagactttttaggcatgaaattcggacacttcagtatttccaggaatagcatatgcacgctgttcttgcttcatggaatgctacatgctttctgtttttctcattttggattttctccaaactaactgaatttaagcttcaggtccctttgtatgcagtagaaagga

SEQ ID NO: 189894 - DNA, 1659 bp, Homo Sapiens
ttggctatttcaaaattttgttgggaaaatgtttaactgggggcttcgttgtaaatttttatgtttggataaaattacattaactcgataagttacataatcattatttggtttggtttgaggtattattctgtggaaagaaataacttcaaaccacagtttttattgtgaattataaaatgtaaaatttgttataaaaagcattcctttaaaaattgttttgaataatctgaagattgataagtttttaaactgttaaaatgatcattagattacaaagcataacctgcaatttctgatttagtacaaattagcatatatattgtatagttcattttacagatttattagtaaatgtataatctgaaaagtctgattcgagtaatgaagtctcagttatatccattttctctttctagttatgtaagcagtaaatactgattcaatttcattagtttttaaattatttcctcaggaacttgggctggataaaaggaggaattcgtgagtactggtatgtattcctttgcaagactaacagtgcaaatgtttttcttcattagggaaaacaaagtgcatgatgaagtcttcagactgtgtcataaagcatgctggtgtatacagtactggccttgcaatggtgggtgcaatatgtgacttctgtgaagcttgggtttgccatggtaggaaatgtctcagtacacatgcttgtgcctgccctcttaccgatgctgagtgtgttgaatgtgaacgaggcgtgtgggaccatggaggcagaatattcagttgttctttttgccataactttctctgtgaagatgatcaatttgagcatcaagccagctgccaggttttagaggcagaaacatttaaatgtgtttcatgcaatcggcttggtcagcactcatgtctccgttgtaaggcttgtttctgtgatgatcatacaaggagcaaagtgtttaagcaagaaaaaggaaaacagcctccttgtcctaaatgtgggcatgaaactcaggagactaaggaccttagcatgtcaacacgctccctgaaatttggcaggcagactggaggtgaagagggagatggagcttctgggtatgatgcttattggaagaacctttcatctgataagtatggtgataccagctaccacgatgaggaggaggatgagtatgaagcagaggatgatgaagaggaagaagatgaaggcagaaaggattcagatactgagtcatcagatttgtttactaatttgaatttaggaaggacctatgctagtggctatgctcactatgaggaacaagagaactaggggagctgctctggtggccgtgtgtgagaggagcaggagtgagtgtgtgtgcttgatgaattgtgtgtggttgttcaaaagtaccttagccacttagccttgtgcagaagactagttacacttaatgggccaagcaatagggtgtagcgtttttatagaactgataatcaggcttatggcataagaaaaaatgagtttcaaatttaagatgtttattgatcgaagcaattgaagtatcatggattggatttgttactgatttcagtaaagtatgttttgccaatttagatacataatatacaagataaaggaaataggatggtaatatatttgttttgaaatta

SEQ ID NO: 189895 - DNA, 1338 bp, Homo Sapiens
aaacaaagtgcagtgtatctagagtctacagaaaacacattggtatacaattttcaaatctacacaagaaactgcaggcaaactaaagttcaaagcataatgaaatgcctagatacagtcatttgttaaactttcaaaacaaaaatgcaaaaacaaattgtagctatgcttcaaagcaattaaattaaggaggattccaattctttgggccctcttagcaatatacagtcgttcaattccaaatattcacaatagtgtaaaaatgatagttctagatatatttaatcactacatccacgatgttgactggaaagactaggaataataaagaagataactctagaaaaagatgacaatatttgtaataatacaaactcattttacatctccatgtctgtaccgtaatgtttatttccttccagcctccatattcttgaaaccagtgctttagaagaatcacattgaaaagttggtctcaagtataaacagcaaaagtaaagtaacaaatatgcacacagattcaaaatctgtgctacctgtgttgacctcatctgaaaccttcaaaaaatattcaaaggaataaaagctttctcatctctcttatgtgataagaaatgaaacctgcctttctgtgacctgcctgtggccgaagcccttttagtcacctaacccaggcggggccttcgtgccaggctgtggggcttctgctttaagcccacgttgtggggccacagacttgcagtggaagcatttttacatcaccactggctcccgctgagaccaaagttagttctgactcttcactttccggtctgtcactgtgtgggagcaggggttggaggtagagcaatgtcatttagcttgctcacttccatctgccagtttggtagcttcttggctgatagatggcgccgggcatgcttggtcaaatggtcactcctcatgaaccgccggtcacacatggggcacgcaaatttcttctcacccgtgtgggttcgcctgtgtctggacagttcatcagaacgggcaaacctcctttcacaacctttccagctacagctgaaaggcttttctcctgtgtgcgtcctcgtgtgggccttcagatgggaacttttaaagtatgtcttgccacatcctgggtggctacagatgtgactccttatccttgatgaatcaatctgaggagtgacttttgctgctgaaggggaaaacccaggagcaggggcaatgggagagagtctggtgccattcgggctcaccaccggaggctttgaactctgcacaacgggctggggtaccacaaacatgacagcgcctttggggacttgtgtgccccaa

SEQ ID NO: 189896 - DNA, 1304 bp, Homo Sapiens
ggggggacccctcgttcccgttccagccttgcctgctccgggtggttgaagcggaaaacgtggtcttgcccatcacaatcctattcttgacttcagcaccagcggctccgtcacaagcttcccattcacatatgtctcagctccttcacaaggctccagagtgaccaccacttctccatctggctgggggatgctccggaacagacagtgttgctcccgaatgaactgtccggtcagcttgatgtccatatctacttggccgaccctggtgacgccatctttgatgtggtagagcagacactcagacatcagagggtcttcgttcaggttcaccaggtggggagtcttctttggagagaagacgcccacagttcccccatcctcccggacggccacccccatctcagccagcaatgcttctctctccatcctcagggcttctgtcttgcgtagcttctcctcccatgtctcgttcagctcagctataatcttctctgtctcctgcagcctctccatggcttcctcaggcccaatctgggactctgtgttgggggagaatgacggctccagctccccattatgtgtggtgggtgatgagggtgaaactggagctgggggagatgacacagctggcagggcgcctctgacactcccttcttccgtcttcaggccttccagagcagaggctgacagtccctgagccatcagcagttcccgcagccgggctacttcctcctgcagctctctaatcagccgggcattagggtcctcgttgatgatggcattgcagcggatttgcttggtgcggtcagcatacctgagggtgctgagagtctcctcgtaattgatgtcagcagggctcagggctgcaatcatggctgtgcgtgagttcccccccaaattttccttgagcagccaggtgagcacagagtccctgtaggggataaaatccgactttcgcttctttgattgcatatctgcaagggccgagatcactttccctagtgtagtcagggacttattgatgttggctccttccttcaggcgcatgccccgggcccctgaggagtcggctcgctcactcccagcaaggtccaccaaactgatcttactgaccttctccgagtccagccccgtgagctggtcatggcagcgctgtgtgaagacgatggtaaagacggcatgggaacggctgctggtctcattcatgttggtggcagccacagtccgtgctttatttccacagtccatgaggtcagcaatgtctgcgtaggaggtcacagccaatttggacaggtccccaa

SEQ ID NO: 189897 - DNA, 901 bp, Homo Sapiens
gccaactttgtacaaaaaagttggacaacattctcctttggttaccacctgactctgccccaggccaacatggtatttagaggcttggtggatagtaactggtgtgtaggtgctgtgctggagaagaagatgccccctctgcctgtcaccctagcccttggagccttcctcaatcactggcgcaacagattccattgtggcttcagcatcactgtgggctgaggttgtccagagccagcccccacagcagctggaacctctgagtcaggtgccctagggccaaagactaggcccctcttcagagcccaccttgctgggtgatctctaggacccaggagcagagtggtggacaggaccatgccctcctcagaactggagctgccacaggggcagttgatgaggcagaggtttgaggatcccccctctgctaccagccccagtatcaccttccccatgctcttgtggctgtggactaagggagaaggattaaggggtatggctgaattcccccggcaccccttgccctcaggcttccttcttcctttccctttggttaatcctgcatgggattagctgaccatcctgttttccatcccagagcctcccaaggctgggaaagtagggctgaagggctagatgtttggtctcaggaagtggggcccacccattcccagaaggagcttctttacctcttagccctgaggtttcctccttcccatcttctgtgcttccagagaacaactttgttcctatggtcacccccactatccccatgaccgcatgaagaggcagttattgctttagtctttcatttgcaaccactggggctccctttgaacccggcccaatctttggtcccagcattttccccactccagtgtatccagggtgtttcaggtga

SEQ ID NO: 189898 - DNA, 734 bp, Homo Sapiens
caactttgtacaaaaaagttggctcatggcctgaggctgcctagcggccacggggaatggttgcaatggcggaggcagaggcaggggtggcagtggaggtccgtggactgccccctgccgtgcccgacgagctgctcactctctactttgaaaaccgccgacgctctggagggggacctgtgttgagctggcagagactgggctgtgggggcgtcctcaccttcagagagcctgcagacgccgagagggtcttggcccaggcagatcatgaactacatggtgcccagctgagcctgcggccagctccaccacgagcccctgcacgcctgctgctccaaggactgccccctggcaccacgccccagcgcttggagcagcatgtccaggccttgctgcgggcctcggggctcccagtacagccttgctgtgccttggccagcccccggccagaccgggctctggtccagttgcccaagcccctttctgaggcagatgtccgtgtcctggaggagcaggcccagaatctgggcctggaggggaccttggtgtccctggcccgggttccccaggcccgagcggtgcgtgtggtgggggatggtgcctctgtggacctgctgttgctggagttgtacctggagaatgagcgccgcagtggtgggggggcccctggaggacctgcaacgcctacccgggcccctgagcactgttgcctccttccagcaatggcaagtggc

SEQ ID NO: 189899 - DNA, 835 bp, Homo Sapiens
ttggccaattatataccataatagtttttcttacaactaagctggccccagccttgtcttgatattaatacatgaaatttttataattgtctcattgtctcatttagaaacatccatatttttctgctttttctattgccattttttatttgtgcatgaattgattattgagaaaatgtagcagtttgcatatttaaaaattaatcattttgcattttacatttaaatatgctaacatcactgtcatagaattcccaaatttcatttgtagatactgaactaagggctaatgtcaggagctgatttttaatgataaagctgcagatgggctaaataaaagccaaattaatcctacaatcaggtattatgtttttaaaccaagttgagtgaattggtagtggacttgggaaatcttccccagcagaatctggatgaatggcacagaattgaaatctctttgtttcccaccatttccctttaagtgctctgctcctttgtaaaaagttaaagatttgaaagagaatctcatattcccgaggcattaggaagaaaggatttaatcccttcaatttggggcttaatcttgtttaaaaaaatgtaagtgaagatggaaggctggagagaatgattgctttttgtacagttaaataaggtcacaatattcttacatactttgttttacaactgtgttttcattttttcaaatgtctggccatttagcaaagttatttactatttactgtgtacatagaaaagctttattatgtgtggtgtatctaaattttttttgctgaaatacattatggtcaatcaagccaaacctgcatgtacagaa

SEQ ID NO: 189900 - DNA, 529 bp, Homo Sapiens
ttggcgctggagtcccataagagagctcgtcagcctccgtgtcgcctgtggctaaggtctccaaattcacactctcctcagagctggagggcggggactaccccaaggagagggagaggaccggcggaggcccgggcaggcctcctgactggacaccccatgggaccggggcacctgcagagcccacacccacgcacagcccctgcaccccacccgacaccttgccccggccgccccagggacgccgggcagcgcagtcctggagcccccgcttggagtccccgcgtgcaccggccaaccccgagccttctgccacccctcctctggaccgcagcagctctgtgggctgcctggcacacgcctctgcccgcttcccagcccggacgaggaacctctccggggaacccaggaccaggcaggactcccccaagccctcatgaagtggggagcccagggcacatccacttcatcctgaggacagggttccccccaacgcatagcctctctccaaatgcttcagcaactggct

SEQ ID NO: 189901 - DNA, 1544 bp, Homo Sapiens
gtcagcagaaaaggctagatggtctgtcgccaaaccaaaatcacttattttcacatggtcatcagaatccaaaaaaatgttgacaggcttcaaatcccggtgaatcattcctttctcatggatataagctaatccatccagaatctctcgaaaaagcctccagagtctgacggtgtctcgatacagtccctggtcaatggtgtctcgtaaagtgctcttctcacagtactccatctggatgtataggtagtgcacagcctcagtcgtcactgatggctcactttcatggcagccattcttttcattgcaatcttcatcctgattctgacttttactgttctcatcttcattgtcaaagataatatcactttcagaatctgaagcaggcaggaaggactgggagaagacgccaccgtgctcgtcctcgtcgtcgtcctcgtcatcgctggagcccgggccggtggcggggaaacgggcactggccgagcgctcgcccgaagtgctccactccaccgagctgctgaggatgggtggcggcgcggcggcctctacgctgtccaggccgtctgtgtcgctcgccggctgcccgcgtgcagctcggtcatccttggccaggggcccggagtccgggggcggcgtccccggtcccgccggccgctcgtgccgctcgatccaggcgttgtagtagcgcacaatgttctcatggtgcagccgtgacagcagtgtcacttcgcccttgatcctgcggaactgccggctggccgggttgatggggatgcgcttcactgcgtagcagcagccgtccaacttgttctgcaccttgatgacagctccaaaagctcctttaccaagaagttgtaattcttcaaactcaatgaagtatcgggaaaactgtctctgtgtctcactaaagaaggcagcactgggtagccggttgctaggaataacagtctcaacataatcttgtcctccagaatcttcaggactttgttccactagaggcatttttggctggggatttataaagctgtgtttcaacaactgctggggactccatctttccttgtcatccaagcacacacatctttaacccagggcttctcaaagtggggtccctggccagtagcatcagtatcccttctttagaaaatcttgaaagtcagctggtaagtcactagggatggtcacagggtactctccacattcctgtccttggctgagggacagcagcagaaggccaagacgccaaacatctcctttcttccccgttttataaggcagagcattgtcactaaaacgaactcgggtttgctcaaacacatcctccttgcaaatgtctgcgaggcgcttagaaatgctatagtccgtaatcttgacggtgccttctgcatccaccaagacattagatgcactcaggaccttatgcaccacagaattgctgtgcagataatcaaggcctgacaggagctgagctgtgtacctgcgaagctgatgcacagggatggggcctgagtggctcaggtgtgcagcaagagagaccccaa

SEQ ID NO: 189902 - DNA, 1329 bp, Homo Sapiens
ttgggtacatatccttcaccacccccagtcccagcacctgtgtcagtaaagaaagtggacacattagtaatggttatgggagtaatacagagaaagaggtgagtggagactcagcccagctgctcttgagcttggatagttatacattttggtgacttctgactctccttccacctccccactgtacactgtggtacagatagttggcactatcctagttatggcatcaggtaggagaaggagacgaagatgctttaggaagataaaaaccttacaaagaatgtatactcatcttttttggcccattacaatactgctttctcaggttcttaacagcctgtgcaaactccctgactagatggtctgtcactcctatcattaccttgcacccatctctttagatggcctcagcacctcactcgttattctccatctgtttcttgccattagtttatatgactttaatatccacagtggtaatctaataccttacctcacaggttttcattcttttgaactctggtgcactccatctgtaatccatgtctataatctaccaacaaagatgtactcttaaactcagtatcaccaggcactatatttcatctttgaggcttttgttataccaaggaatactatataaagtaatgagactggtttaaagtaacatgccagaacttacgcatccaatgtgggttgtcacttgttattcccaagtactattattccatactactatattcttccaaatatttggaacactcttagaattcccatttaataaaccatatgagaaaaccctctattactcttacactttagttttaccatttgagtagccacttattcaccagagttggaattgagaaattttgggctttccaaaattaacctttaaacttaaaattgattacattgagcctattcagaaaaaaaattatataggttctgatgaaagcttcataatttcaccctgtgactatcctgaaaagaaataataatcattttatgattgatgggccaaaaaaagcaatcaaagtcttacgtcatagaggaccaccttttggatcataaattctttccctataacattccttctctgcctctctatggcccactttgaccactaacaacatcagaattatctacatcaatttcattgagccattggtgaatgaagacacccatcacttgtcatgttggtttccaacagtcctttcgattatcctttattttcttatcctcccttctcttgtttcttttatttataagttaccattcctagtttctttgtacttgaaattttaagaaaccagaaacaagtaaatc

SEQ ID NO: 189903 - DNA, 1604 bp, Homo Sapiens
  misc_feature (238)..(268): n is a, c, g, or t
ttgggttttttgttttgttttacaaagtcaggtgtttgagagttcttttccactctactactactcatagagcttgttttttctttgggtgtgtgctgatcctgttactgagattaattacatggctctgcagtgtagtttacataaaaatgatgttttccacttgattgctgcagatatcaagagtttgttattttcaaatacccatccaataagagagatggggaggtttttagtnnnnnnnnnnnnnnnnnnnnnnnnnnnnnnnactggaaatgttttatatgttttccgaaaatacaataagcctctcttttattcagcgttcttcctcttttctcccttatgaaaaagaaaagatagcacaaaacttaagacttacctaggaaacccattcatattcccaccatgatgtaattataaccctacaattacttcaggtagctacacaatataccaggtaagaatcaatgcacagtataaagaacttattgttcttttctattctttcagttgaataagggccagttggtatgcagcccatgtatatgtgaatggagtaagataaaccccatgatctccttgcacagaattgcaaatgtcttttgccataccaagggccagactcagaacccttggagtcatgtggcagaatttccctcttacataaaccaatgcttgaaaatgctgcaaatgaccctctaatgatccctgaagatcaaaacaggggtaaatgactccctgcaaaacccaacccatgctgctggctgtgggatttttggtgtaagcctatctatgcactctatcagccagaatttggcatttagctcttagttaaatctagtaaaggacagtctattgtttaaagagaaggtgcatttgttcctcaatcaagcaagagcacctgtgttgtactgctttatatctcatgtatatttatagtaatgaaaagactttttaaattgtacacgtttcagtgcctttcttgtgttatgaaaggcaggtagatattatagccataggtaaaaatccatagttaaattgcacactgaccttaaatctctctgtgtatgcccttgtatcttgcatgttaaaagttggattattgggcatgtgtggcagcctgccctgctacatgctagacaagtgtgctttagtacatagccacaagttcttcattctttaaaatgttttgacagatcatctcataataaaaataattcaggaaaactatggggaaatagttacatttcacaaaagatattttaaactctttgtaaaacttagataatagagcctagcagttactttgtatctaattgatacattttatgttaatttaccaccatacattttattaatcaaattgtatagcatgtgactcttttggctttcagagttctcaaaaatattattttgttgcatgtactgtatgtttagaggcaacaattatatactcaatatggttttactgtgccttacacaaagagaaaactctatacagaatgtatgtcatggggtggggtaacagagtctttactgcactgttaggtgatggccacagagcatgtcccaaaacattatctgtgcttatatacccaacc

SEQ ID NO: 189904 - DNA, 1482 bp, Homo Sapiens
tttttactttgacatccagaggctcatatattcgctcaaattcatcaggatctgctacagctgcatccagttcatcatcatcaaaggagtcctgtgtggcaaagtcactcaaaggagacagtggataagatgtattgagattcaagcccagcatgaagttgtgtaccttcccagcacgtccttctctggtattgaataaagctgaatcactcaccaaggccattatcatacgatgaatccaacttgcttgattatcactttgatagtcacttccagcatcttcattttcagtgcctttgggttcgtgtgattcatcatcactgtccgagctatcattactcacaatatgctttgtggtaatattttctaattcttcctccattgtggagcctctgctttgtgaaccagaaacgcccaaaactctgttgaacaatatggaaaaggcactgccccagacacccattaagaaatgcaaggggttttcttcatacttcttaacgactgttcccataaaaaatttgcttccaaataagtcgggagccataaaagtaccatatttagccatgccaatttcgtatggactaaattcaacccaatctgcaaacatcagctctgaaacgtcaggtttgacatgaagacaggtgaaaagaggtaaagggcattgtgcagtattaactttttccttcaaactgctcagagtagtattcattctattatgaattagtgtttctcctattaacatcccaaagatatcagtaaaggtgacaggttgtccagagcttttcttcttccataaagactcaacatatcttttaactttctgtggtgtgagaagtaaaaggggattgtggctaacatttttcattagttcttcattaatctcctctggccctttctctggaaaatcagggtgagaatacaaggttgacatataccaggtggagccagaaagaccagcaacgtaggtagcacaatccagaattcctgattcgtataatgccttcatcacaccagagaatcccaccatggctcggaaacccccacctgaacccaatatggctaccacaggcacatcacgtgcagaatgcaatccttcactattctttggacccaagagtttcttcatgctctcccttatgtgttcttttctctgttgtctgaaagtcttctcctgatcacacagagccatactaaatcgtaggtctgggcatgagcaaacttcaagagacatttctagaaccatttcagtgacttggttgaaaataaaaggaacttctttcttttctcccaccttcatagaagatacagtaaatgttgctgtccctagagtttcatccatgacataattggcatccattaacgtaatctccaaaacattttcctgattaggatccaaaataaattcaaaggtctcattccacacagggtttatgtcattattgaaatgtcttgttctcttcctgctgtcaggggttgtaccaa

SEQ ID NO: 189905 - DNA, 1137 bp, Homo Sapiens
agcgtactcaggcaggttccggagggccgtctgcaccacctcaaagtccctggctgcccaggcagtacatgaacgtgggcaggaaagcggctgcaaatgctgggggctgttctgcatggagcgcagggccagggctgaaggcgaggttgcggcaacactcctcggccgagctcatcagccgctgcaggttggtcgagaagaagctcaggatctcgggtctccgccgggacatctcgtctatgtcactcagaacctccagcagatcctccaccgtttggccccgggaaagccgtttcatgtagggggccatctcggccgcggtcagaggggtgaacagggagacgctgaccaggggcaaggagccggctgagctctcctcctcgccctcttcgtccaggcctcggtcggtcctgtcgtccctgctgggcaggctgagccctgcaaggagggatttcagcatcaccaggtcactgttgtcgaaggacaggtcgtggagcgggtcggcgtgcttctgcaggaaggagatggctgctggggcattgtaggtaatgtacttatggatgaactgcacaaacttgttgatgaaggcagccagatggcgggaggacttcctgtaattcagcagcaggcggatgaaggacagaaggcagtcccacagcgccccctggtgctcgctgcggaacacgtgcggctgcagcagctccagcaggcccagcacgtgcaggaagcagctcaggtggttctgctgccggaactcctggaagttgaggtgggtgcggccgtgcaggagcgccgcgatcatgggcaggtgcctgagcagcagcagcgggtgcgccaccgccagcttccggcaggccatgctggcatccgcccctcggttctccaacgcccgggagtcgctggtgtccgcaaggagcgtgatgaagcggtggatgagtccgtccagcttgcagacgctgctgctggcagccccttcgctgtgcagtaggacctcaggcacgggcacccgcagctccggccgctgtaggtagagctgcaggagaaggtctcggcagcgcctgcccagcacgctgtctccccactgctggatgcagcctgacaggtgctccgtcaccttcctgacactctcatcgccaa

SEQ ID NO: 189906 - DNA, 1260 bp, Homo Sapiens
ttggcaactgtggtaaatgctacatgacctgtaatgattctggctaccaggctatacagtttgatccagaaacccacctgcccaccataaccgacacttgtacaggctgtactctgtgtctcagtgtttgccctattgtcgactgcatcaaaatggtttccaggacaacaccttatgaaccaaagagaggcgtacccttatctgtgaatccggtgtgttaaggtgatttgtgaaacagttgctgtgaactttcatgtcacctacatatgctgatcttttaaaatcatgatccttgtgttcagctctttccaaattaaaacaaatatacattttctaaataaaaatatgtaatttcaaaatacatttgtaagtgtaaaaaatgtctcatgtcaatgaccattcaattagtggtcataaaatagaataattcttttctgaggatagtagttaaataactgtgtggcagttaattggatgttcactgccagttgtctcatgtgaaaaattaacttttttgtggcaattagtgtgacagtttccaaattgccctatgctgtgctccatatttgatttctaattgtaagtgaaattaagcattttgaaacaaagtactctttaacatacaagaaaatgtatccaaggaaacattttatcattaaaaattacctttaattttaatgctgtttctaagaaaatgtagttagctccataaagtacaaatgaagaaagtcaaaaaattatttgctatggcaggataagaaagcctaaaattgagtttgtagaactttattaagtaaaatccccttcgctgaaattgcttatttttggtgttggatagaggatagggagaatatttactaactaaataccattcactactcatgcgtgagatgggtgtacaaactcatcctcttttaatggcatttctctttaaactatgttcctaacaaaatgagatgataggatagatcctggttaccactcttttactgtgcacatacgggctctgactggttttaatagtcaccttcatgattatagcaactaatgtttgaacaaagctcaaagtatgcaatgctttccttattcaagaatgaaaaaatataatgttgataatatatattaagtgtgccaaaatcaatttgactactctctgttttagtgtatatgtttaaaagaaatatatttttttgttattactagataatattttttgtatatcatctatttttctaatccgtaaataggtgtcatataaac

SEQ ID NO: 189907 - DNA, 1001 bp, Homo Sapiens
ttggctcaactatctgctcagagtgaacggcagcgagcagacagtggttgccttcttcatcatgccagcgcggaccaacaatttcaacgtggaaaccctcaaaggccaagctgtgcgcaaacagctttgggacacggccaacacggtgaaggaaaagttcgggaggaagctttatgaatccttactggttgggagccttcccgacatgaacaagatgctggataaggaagacttcactatgatgaagagagccatctttgcaacgcagcggcagtctttcccccctgtgtgcacccacaatatgctggatgactcctcagaccccatcctgaccaccatccgccgaatcggcctcttcaatagcagtgccgacagggtgaaggtgattttccacccggagttcctctcctccacaagccccctgctccctgtggactatgaggagtttgtccgtggctgtcaccttggagtcttcccctcctactatgagccttggggctacacaccggctgagtgcacggttatgggaatccccagtatctccaccaatctctccggcttcggctgcttcatggaggaacacatcgcagacccctcagcttacggtatctacattcttgaccggcggttccgcagcctggatgattcctgctcgcagctcacctccttcctctacagtttctgtcagcagagccggcggcagcgtatcatccagcggaaccgcacggagcgcctctccgaccttctggactggaaatacctaggccggtactatatgtctgcgcgccacatggcgctgtccaaggcctttccagagcacttcacctaccaccccaacgaggcggatgcggcccaggggtaccgctacccacggccagcctcggtgccaccgtcgccctcgctgtcacgacactccagcccgcaccagagtgaggacgaggaggatccccggaacgggccgctgaaggaagacggggagcgctaagatgatgacatagagg

SEQ ID NO: 189908 - DNA, 1084 bp, Homo Sapiens
ctttgtacaaaaaagttgggtgagctgcgcctgacggtggcaccatgagcagctcaggtggggcgcccggggcgtccgccagctctgcgccgcccgcgcaggaagagggcatgacgtggtggtaccgctggctgtgtcgcctgtctggggtgctgggggcagtctcttgcgcgatctctggcctgcttcaactgcatcaccatccaccctctgaacattgcggccggcgtgtggatgatcatgaatgccttcatcttgttgctgtgtgaggcgcccttctgctgccagttcatcgagtttgcaaacacagtggcggagaaggtggaccggctgcgctcctggcagaaggctgtcttctactgcgggatggcggtcgttcccatcgtcatcagcctgaccctgaccacgctgctgggcaacgccatcgcctttgctacgggggtgctgtacggactctctgctctgggcaaaaagggcgatgcgatctcctatgccaggatccagcagcagaggcagcaggcggatgaggagaagctcgcggagaccctggagggggagctgtgaagggctgggcgcccctccctccctgtcccctcttctggctctgtgtgggtccaagtgaggcctggactgtccacgctgaggcacagcctggagaggggcctttgcacgtgtccctacacctggagtcctctgctcctttctccagactggcttaagccaggagccactggctgctggtgtgagggtctgggctgctggacttgaggcagagcctgcagcagctgtgtggacactacccagccctactcctctgctgggtgggtctgcagatctcacaccacagacagggctgcctgtgacctgctgtgacctggggagcagcttcccctggagatgctggtcctggcttgaggggaggggcaagtgggaccctgccaccctgggcactgagcagagggacctcccccagctctcttaacaagtggagccccaagggcctggggacagcctgccgctgccagcaacctcccactgctgcctaagggtgcagcgccacttgtcaccctggcttctgaaaaaa

SEQ ID NO: 189909 - DNA, 802 bp, Homo Sapiens
ttggctctgtttctccccaaaataaccattctccagatccaggactcagtaaccttgcagcatcctacttgaatcctgtcaaatccttcgtgccgcaaatgccaaagctcctcaagtctctctttcccgtccgcgatgagaagaggggcaagcggccgtctcccctcgcacaccagcccgtgccccgcatcatggtgcagtcagccagcccggacatcagggtgaccaggatggaggaggctcagccggagatgggccctgacgtgctggtgcagacgatgggggccccggccttgaagatctgcgacaaacctgccaaagtgccttccccaccgcctgtcatagctgtcacagcggtcaccccggctccggaggcacaggacgggccccccagccccctgagtgaagcctctagcgggtacttctcccacagcgtctccaccgcgaccctgtcggacgccctgggccccggcctggacgctgcggccccgccggggtccatgcccaccgcccctgaggccgagcccgaggcgcccatcagccaccccccaccgcccacggccgtccccgccgaggagccccctggcccccagcagctcgtgagccccggtcgggagcgccccgacctcgaggccccggcgcccggctccccgttccgcgtccggagggtgcgggcctcggagttgcgctccttctcgcgcatgctggctggggaccccggctgctccccggggccgaggggaatgcgccggcccccgggcgccggggacaggccctggcctctgattccgatgaagctgac

SEQ ID NO: 189910 - DNA, 1667 bp, Homo Sapiens
gcggcccgcgtacaaccaccccatacgtgcccttgcccagcaccagccgctcgcccgtctccgtgtactcataatcaaactccaacatctcccccgcgccctccgcctcctccgcgggcgctgtggaatccgggttcgtcacccaggcctggatcaggccgcagaaccactggcagtgcttacgctggggaagcacagctggacgtcctgagccggggggagtgcatagaggaagcagcagcgctcgtcgcgctttgaggcgctgactccgcatatggaggcgactgggaaggtccagctggagggaatgtcctgggtctcaggctccagcaggctcagggtcactgtgcttactgggtcagtaccccgaacctcgagctttgcaggcagcagcaccttgttcatctccaggaccagcaccaagcactggtcgccctgggcacaggctgtcttgaatggttggcaggactgtagcaagaagtggagccagaagtgggcacggcgtggtggccctccagggggctctggcgtgggcctgaagtgctggtagagcaggaaggtctccatcacggacaccaggtaccatatgggggcattgagcttatacagctgctctgcagccagcaccacctggatggggtcattggcgaggatctgggctcccaggtagaaacccacatcccagtaatactgcatcttctccacgcagcctttgcgggccagcaggcagcccagcttcatgcctattagccggagctctttggaatcctcaaagtgctgcccggcagcaatgaggagcacagctgcattgatgcctgagtgaaggctgggctctacgtcaaaagccttgcgataccagtgataggctgctcccggtgcccagcatcctggaaacccgagctgaagaacatgtcgttgtagatacggccacacatgcagtacagatcgggcgccacagagccctcaagctgtaccagcggcagcagcacagacagggccttcgcccggtccccaggcctgttcctccggttgagggcaaaagtgtagtggaagcagacattatgctgctcggccacatcacaggtgggcaaggcctgcagcgtctccaccagctcaatgatggccgagtagtcctgcacatcgcggtaggagagcagcaagttcatgatgatgtcggggctcagcagctccacgctgtccagtctccgctgcaggcgagccagctcctgccgcagctgtggcccactgaaccgctcccgcgcctgccggatgtcccgccgaatggtctcccggaaatagccacaagagtctgtgggtgtggcctccagcaggcgggcaagccggcccaccaggggagtgagcagggcctcggtccccactccagcctgtaccagcccatcagccaggccccgcagaaggcctgcatcaccacacagcacccgaccagtggccgtcaccacataggggatcagtgtgtagctgccaacgcaatccgagttcttctggaaaacatcctcctgcaggaggcagacagtcagatactggtgttctgtgtaggccttaccccagccctgtgcctgcctccaccagccccaggccacctacccgcagggcctgcaggtcagggaggtcggcctgggagcagaggagcacattgttggtcccaa

SEQ ID NO: 189911 - DNA, 1273 bp, Homo Sapiens
ttggggaaaaatccctcatcgaagtgtacatgcggcctctgtccaacaaggctagcgccttagtcttcttcagctgcaggaccgatatgccttatcgctaccactcctcccttggccagctgaacttcaccgggtctgtgatatatgaggcccaggacgtctactcaggtgacatcatcagtggcctccgagatgaaaccaacttcacagtgatcatcaacccttcaggggtagtgatgtggtacctgtatcccatcaagaacctggagatgtcccagcagtgaggagctgggacatgtgacaggctgtggtggcaccactgagcctagaccatggagccttggcatgcccagggcaagtggggaggttctctgctccccaggcctgctcggtgactgaccccatcatacccaaagtgcaatctcacggccaggttctatgccctgtccaagcgtaaaccctcttggaaacttcttttggggcaattttcctgtggccttcctggcctctacttccatgtgcgcagccccacagacgttgctgagcaactcgccagcctcctgagctccatgcccatcaggactctagcctctgaccttgctgttgactctgaaatcaggatttggaagttttcgaattaggagtagagagatctgacctcttgccaggaatgcccatggatcatgtgattggcttttctacccatagagggccttgcagcctgataccacctgggagtgagggtcacaaaggagaccttggctccctcaggtcaccaataaacctgttctttaatcaagtagttgtaatatggacctggggtacctttagttagggactctggtggcactacacggggtgctggattcaaatctcacctctatggatgatgtctggcatcgtctggcccctccttttccaaagtgaccagaagattgtacttcctagagatgccagacttgcctcacacccaggagctgcccctgctgtgcctggtatgctggcagtggtgatggtgacaacacaatgaggccaagtagcaatgctcccaggtcctgcagcttgtgctctgcccagcagtgcccctggcccagcacctcagcctgctcttctctctggtggctccaccccaacccctacttcttttcctttatttctctcccaacctggctgcaaaggaggttcatattccccagatgtgtccacaaacctgtccaggagttgtgtcttaaaattgatttcctgtccctcttcctaagacaggggtaacagt

SEQ ID NO: 189912 - DNA, 1170 bp, Homo Sapiens
  misc_feature (878)..(886): n is a, c, g, or t
actttgtacaaaaaagttgggtccagtacactcacaaaggagatcggggcaacccctgcagatgtggagccattagcccagttgaggatattctccaagttgtcctctctcctgctgatggaaatgggaatgaagttaagtggtctgaaaaacttgaatcgttcacatttctcagctctgggggtcatttaccagtttgttgtagaagaaataatcaggtaagttaaaagttcatttccagagaaggtaaaccccacttaccatctctgcatgatttcagtgggaattgattatcactaatccccaactgggctagaataaatgtaaagtttgacctttttaaaacgaaaagagagacaaagtctcagcacattccaaggagtggtagaaacagagctgaaggtgtccccattgtagattagtctcttctcactaaaatttactttccaacgtagggcctaaaggaaacctttcttaaagacaggctgaaaccccttcaaaggcagatgaggaggtacagacacgtgaccttttggtgcacactggagctacttggacaagaccagcatgccttgctgcacgtgtgtgtatttcactgctgagaacatcctttaacttggtgtgcaatttgaaaggatgtgaatcatggatggaaggccatttgtacatgtcctttggcaaaattctttctggtgtctcctaacttcagagacagggactctttttggatctctattgacaagtaataaaagtctggccctcataacttgtttccgaactagaaaagtctgtgagacccctacatcattctggtttttttgcttgagtaagaacaatccttttttatttttcttctgtacagtctaaagctacagagnnnnnnnnntgcactcttcccttgccggctcctggtaccattggtctgaacagctgtagttggtctactccttacttagcacttgattgtgtggggaaacaaaggtgggaggggtggggaatactggaaataatcagggcaatttttttctttcccataattggactagataccttggtactgttgaccttctcagcatctcccttttgccttagatggcaacaccctccagtctgtagcagagcagtccaacccagattagtgcagcccggaaggcttaggtgcagcctccc

SEQ ID NO: 189913 - DNA, 933 bp, Homo Sapiens
actttgtacaaaaaagttggcagaatcctacctatttctgaggaaactgcaggtccaaaacgtggctgcttttaacaatggcaagtttgatatctgtactggggactacacatggtttgtttggaaaattacatcctggaagccctgaagtgactatgaacattagtcagatgattacttattggggatacccaaatgaagaatatgaagttgtgactgaagatggttatattcttgaagtcaatagaattccttatgggaagaaaaattcagggaatacaggccagagacctgttgtgtttttgcagcatggtttgcttgcatcagccacaaactggatttccaacctgccgaacaacagccttgccttcattctggcagatgctggttatgatgtgtggctgggcaacagcagaggaaacacctgggccagaagaaacttgtactattcaccagattcagttgaattctgggctttcagctttgatgaaatggctaaatatgaccttccagccacaatcgacttcattgtaaagaaaactggacagaagcagctacactatgttggccattcccagggcaccaccattggttttattgccttttccaccaatcccagcctggctaaaagaatcaaaaccttctatgctctagctcctgttgccactgtgaagtatacaaaaagccttataaacaaacttagatttgttcctcaatccctcttcaagtttatatttggtgacaaaatattctacccacacaacttctttgatcaatttcttgctactgaagtgtgctcccgtgagatgctgaatctcctttgcagcaatgccttatttataatttgtggatttgacagtaagaactttaacacgagtcgcttgatgtgtatctatcacataatccagcaggaacttctgttcaaaacatgtt

SEQ ID NO: 189914 - DNA, 1094 bp, Homo Sapiens
  misc_feature (87)..(99): n is a, c, g, or t
  misc_feature (816)..(833): n is a, c, g, or t
ctttgtacaaaaaagttgggaaaaaaagacaccgtaaatgttagaaaagcaaatagaatgccaaaagatgttaatatccaagttagnnnnnnnnnnnnncatgaaaccagaagaaagagcaaatataatgaagactttgaaagagcttggagagaagatctcacaattaaaagatgaattaaaaacatcttctgcagtctccacaccatctaaagtgaagacaaaaacggaggcccagaaggagttattagatactgaactggacctccacaagaggctgtcctcaggagaagacaccacagaattacggaaaaaactcagtcagttacaggttgaggctgcacggttaggtattttacctgtgggtcgaggaaagaccatgtcctctcaaggtcgaggaagaggccgagggcgtggaggaagaggaaggggctcactaaatcacatggtggtggaccatcgtcccaaagcactaacagttggaggattcattgaggaagaaaaagaagacttgcttcagcatttctcaaccgcaaaccaagggccaaaatttaaagaccgtcggctacagatatcatggcacaagcccaaggtaccatctatatccactgagactgaagaagaagaagtcaaggaggaggaaacagaaacctcagatttgtttttgcctgatgatgacgatgaagatgaagatgaatatgagtctcgctcatggcgaagatgaaatctgatgctagctgtataatttttaggaatattgtttagaagaacaacttttaaaaattatttaaaagaagtcaatgagccaaaaaaaannnnnnnnnnnnnnnnnncaacacagtaggttcaagaacagcaagtttgctatttaaacacatctcataactgtacatgatattaaagcaccaaacgcctagtgacttttacacagttgtgaagatccacagcaatgacatggataatctctagagccttattttccacaccaccttttttttgttgctgttggtgttggattatgatgtaaatgacaggtgttcagaaatcttattttggattataatctactgataaaatttaattaaatgtcaaat

SEQ ID NO: 189915 - DNA, 512 bp, Homo Sapiens
gagtaaaggggaaggggagggcaggagagctattgggacaaatggacatcagaatgaacaggctcagtttatcccgggaagctcccactgggagcaggtggtgggctgacccaccaggacctgcaggacccctgcctccccggagacctggcccagccctgcatgatcacctgcaggcccctctctctgggttctcacctgcctcagggagggaagggaggtgcatggagcctgcaggtaaagtgatttcagtgcttatgtgtgtgtgctggagaggcagcttcagggggagtggggcctgaactcccgtggagccagctagagaaaggagcagggggatgtgaggccaggccctggccctggatgctgacacaatgtgggcggctgctactgggcaggggggcagtgggagtgctggcggaaggcctgccccgagctctccctggcctgaccccaggactctgaccggggagtcctagccaacttttttgtacaaagttgttttttatagg

SEQ ID NO: 189916 - DNA, 1322 bp, Homo Sapiens
ttgggatatttattggttgtgtctactgccaacatttatatccaattctaagatttctgaaaaaaaattcttatcccttgctgctcagaaaaagtttacggaaaacaccagttcactaaaagcaccgaaatctgcaaagcctgtcttccgctagaacaacgtctacaaatgtgaagatgatgacttctggcacgcggtcatgagggtggggaatggcactaggagctgatgtttgcctcatttaaagtaggcaagccgagccaactgcagccatcattcattaagttttgggtagtgctctaatggtttgttcactttaataaagacagattttggtaaagtagaatatttttcattctgagcatgtttgtcccaaaaggtgatgcacttaagctgacagtcccttcagtggttttgttaggtcacggcttgtcctgtctggattctgcatctggaagcgctgcatgctctcagaggagcgtgccgtttcccctgtagatggatacttttgttttgttgcctatttaaaaacaattaagtggttatttgcagttatttcagaactccaagtaagtggatggctttgggttctttctgccttggtcccaatggtgttgatgcttctgtggagcgcggacattcccaggagcaggtgcgtgccagccatggctgccagacactgctgcaactgaccagctgccggaagattctggagccactaacattagttttgcacatattttcttgggagtgttacttgaatctatctcaaactgcagaaaaaatcaaaagatcaataattgggagaaaaagagacaaatttaactgttacataattttagatagacaaaaaacatgagtgagtcgtgtacataaggagggaacatggtacagaaggctagaaggaattataggtcttattcccctttcctcagtcctttgaagagaagtacagtctcttgcgattttgtatatatcgtgttcgacacagccgctctctgtcctgtaaatagggaactaaaggctgtatgatttctcaagtgctgagttacacagtcctgagtgagctttctgttaccatactttcacacgtgggctttatttctcactgtatgtttgatatgatattactgtatttattttaagaaagcactaagatgtaataaagtgatgaactattttgctttacattgaaatcgtatgtgtgaggttgctgtggctcatttcgctgaccaggcgacaccaactccttgctttataggagtttcacattgttctttaccatggccctatcgaaagtcagtggaattgggattcttttt

SEQ ID NO: 189917 - DNA, 1181 bp, Homo Sapiens
ttggcgcgtcatggggatttggcagcgtctgctgctttttggtggggtgtcgctccgggctggtggcggggccactgccccgcttgggggaagccgagcgatggtttgtgggcgccagttgtctggcgccgggagtgagaccctaaaacaaagaagaacacaaatcatgtcccgaggacttccaaagcagaaaccgatagaaggtgttaaacaagttatagttgtggcttctggaaagggtggagtcggaaaatctactacagcagtgaatcttgcacttgcactagcagcgaacgattcgtccaaggccattggtttgctagatgtggatgtgtatggaccttcagttccaaagatgatgaatctgaaaggaaatccggaattatcacagagcaacctaatgaggcctctcttgaattatggtattgcttgtatgtctatgggctttctggttgaagaaagtgaaccagtagtttggagaggccttatggtaatgtcggccattgagaaattgttgaggcaggtagattggggtcaactggactacttagttgtagacatgccaccaggaactggagatgtgcagttatcagtctcacagaatattcctataacaggtgctgtgattgtctccacgccccaggacatcgcattgatggatgcacacaagggtgctgagatgtttcgcagagtccacgtgcccgtccttggccttgtccaaaacatgagtgttttccagtgtccaaaatgtaaacacaaaactcatatttttggtgctgatggtgcaaggaaactagcacagacccttggtcttgaagttctaggagacattcccttacaccttaatataagggaagcttcagatacaggccagccaattgtgttttcacagcctgaaagtgatgagtcaagctttgacgcccatggctccacccagtgccgtgtgatgtatgtcacagtgtgataatctttgtgatcagccttgtggctttaaaaagcctgtgagtcccaaatgcatctccagctcacgccttcctctggaactgcagtcatagatccagctgcctacctgatgcctcttcttggtgactaattgaactcatatatctggcacatccagactgaactcttggccctcccacttttaccagccagcttccatgtacctctcagtatccact

SEQ ID NO: 189918 - DNA, 337 bp, Homo Sapiens
agcactgttcaacaacagtttgtaggggaaaaggcccttgatggtttgggatgcagtgcatcagtatcaatcttctaaagtctaacagggactgagtgatgctatagtctttcgactctttccaacatacgaaataatttctgataaattgtgagcatgaagtaaaagggattcccacatgttccgtaacaaacagaaaatttcttaaattacaaattctctgctaaagggcattttctaaaggccatcgtattctctttacattatgcataggacttcctcactaatatgatttctctgatgtaaagtaagttgatcactacgaataaaggcccaa

SEQ ID NO: 189919 - DNA, 1438 bp, Homo Sapiens
ttggcactcctgccagcaagcaaactccactaattgatcttttgttggaggcttcccctgaaaggtctacaagaactcagcaaaaagaatttcaaacttacattttggatagcgtgatggaccatttgcttgcagctgatgtgttattaggggaagatgcatctctgcctattaccagtggaggaagctaccaggtattggtgaacaatgtgttttatttcacacagcgtgtggtggacaagctttggcaaggcatgttcaacaaagaatctaaacttcttatagattttataattcaactaattgcacagtcaaagagaagatcacagggattgtcactggatgcagtgtatcattgcctcaataggaccatcttgtaccagttctcacgggcacacaaaaccgttcctcagcaagtagctctgcttgattcactcagggtcctcactgtaaacagaaacttgatcctgggacctgggaaccatgaccaagaattcattagctgtctggcccactgcttgataaatctacatgttggaagcaacgtggatggatttggactggaagcagaagcccgcatgaccacatggcacattatgatcccctcggacattgaaccagatggtagttacagccaagatattagtgaagggcgtcagcttctcataaaagctgtcaacagagtttggactgaactgatacatagtaagaaacaagtcttagaggaacttttcaaagtaactctacctgtgaatgaaaggggccacgtggacatagctacagcaaggccactcattgaagaagctgccctgaagtgctggcagaatcatttggcccatgaaaagaaatgcataagtcgaggagaagctttagcgcccaccacacagtccaaattatcccgtgtcagcagtggctttggtctttccaagttaacaggatcaagaaggaatcgaaaagaaagtggtcttaataaacacagtctttccacccaggagatttcgcagtggatgtttactcacattgctgttgttcgtgacttagtagatacacaatataaagaatatcaggagcgtcagcagaatgccctgaagtacgtgacagaagagtggtgtcagatcgagtgcgagctgttgagggagcgggggctgtggggccctcccattggctcccacctcgacaagtggatgctggagatgacagaaagggccctgcaggatgaggaaaaagatggtgcgaaatgatatgttttataaccattacccttacgtgccagaaactgagcaagagacaaatgtggcgtctgagatcccaaagtaaacagcctgagacacccgatgatattcctcaaaagaaacctgctcgatatagaagagccgtaagttatgacagtaaagagtactacatgcgactggcctctggcaatcccgccattgtccaa

SEQ ID NO: 189920 - DNA, 918 bp, Homo Sapiens
ttggaaaaacttattaaaaataatcaaaattttcctcaaatttttattaccttgtccaaagtaaagcaagtgtcttttagcattcatgccagcttttctcatgttctaggaatgacagaaaccttacttgaagcaaactagtatttttgttgaaaatgtatatcagcatcagttaaagttgatttttcagacctgctcctcagtaataatactagctagtcagcattcacgcctaccaggacacaaaaatcctcttcaaaactactcagaaaagaaagtcattactcaggaatgatgtccattcaggagaaatcaaaagagaattcctccaaagttactaaaaaaagtgacgataagaattcagaaacagaaattcaggattctcaaaagaatctagcaaaaaaatcaggtccaaaggagactataaaatcacaggctaaatcttccagtgaaagtaaaataaatcagccagaattggaaacacgcatgagtacaaggtcatcaaaggcagcatctaatgataaagctactaaatccattaataaaaatacggtgactgtgaggggatattcacaagaatctacaaaaaagaaattatctcagaaaaaattagtacatgaaaaccctaaagcaaatgaacagcttaaccggagatcacaaaggctacaacaattaacagaggtttcaagaaggtcgttacgcagtagagaaattcagggtcaagttcaagcagttaaacagagtttgccaccaactaaaaaagagcagtgtagcagtactcagagtaaatctaataaaacaagtcaaaaacatgtgaagagaaaagtactggaagtaaagtctgactctaaagaagatgaaagtctagtaattaatgaagtaataaattctcccaaagggaaaaaacgcaaggtagaa

SEQ ID NO: 189921 - DNA, 934 bp, Homo Sapiens
ttggcacacaccctgctctgggatcccttgtgaggctgccctcatggagttccccctggcccagatatgtccccaagggagtcacgaagcccccatcccaaccttcagcaccttccagatcacagacatgacccgcaggagctgccagaacctgggctacactgcggcatctccccaggccccggaggctgcctccagcacagggaatgctgagagggcagaggaggtgcctggagaaggaagcctgttcctgcaggccgagacccgggcttggttccagaagacccaggcccactggctcctgcagcacggggcagcccctgcctggttccatggcttcatcacccggagggaggcagagaggctgctggagcccaagcctcaggggtgctacttggtgcggttcagcgagagcgcggtgaccttcgtgctgacttacaggagccggacttgctgccgccacttcctgctggcccagctcagggacgggcgccacgtggtgctgggcgaggacagcgcccacgcgcggctgcaggacctgctgctgcactacaccgcgcacccgctcagcccctacggggagacgctcaccgagcccctcgcccgacagactcctgagcctgcaggactttccctgaggaccgaagaatcaaactttggaagcaaaagccaggacccaaacccccagtacagcccaatcatcaaacaggggcaagccccagtcccgatgcagaaagagggggccggggagaaaggagctcctcccagctgctcaggcccaagcctcccatctccgccaaacctcagctgcccccagaagtctacacaatccctgttccacgacaccgcccggccccacgccccaagccctccaatcctatctacatgagcctgatgaacccatagctttctatgccatgggccggggcagccc

SEQ ID NO: 189922 - DNA, 1096 bp, Homo Sapiens
ttgggttaagcataggacctaagaagaggtggcagtctctttcctctccgcacttggcaggccacccactcattcctgataatcacatttaagagagctctggacaagctggaatgcatccaagagaatccctcaacatgctggtggctttctagaagatgaccatagaggaccttccagattttccattagaaggaaatcctttgtttggaagatacccatttatattttctgcttctgataccccagttatcttttccatttctgcagcaccaatgccttcagactgtgaattttctttctttgatcctaatgatgcatcatgccaggaaattctttttgatcccaaaacttcagtttcagaattatttgccattttgagacagtgggttcctcaggtccaacaaaacattgacattattggaaatgagattcttaagagaggttgcaatgtgaatgatagagatggattgacagatatgactcttttacattatacctgcaaatctggagctcatggtattggtgatgtggaaacagctgtaaaatttgcaactcagcttattgacctcggagcagacattagtttgcggagtcgctggacaaacatgaatgctttgcattatgctgcttattttgatgtccctgaacttataagagtgattttgaaaacatcgaaaccaaaagatgtggatgccacttgcagtgattttaattttggaacagctttgcatattgcagcatacaacttgtgtgcaggtgctgtgaagtgcctcttggagcagggagcaaatcctgcatttaggaatgacaaaggacagatccctgctgatgttgttccagacccagtagatatgccgttagagatggctgacgccgcagccactgctaagaaatcaagcagatgcttctagatgcggtgcctctgtcatgtaacatctcaaaggccatgctcccaaattatgatcatgtcactggcaaggcaatgcttacgtcacttggcctgaagttgggggatcgtgttgttattgcagacagaaattggtacattaagattttgtggaacactgaatttgcaagtgggcagtgggctggc

SEQ ID NO: 189923 - DNA, 899 bp, Homo Sapiens
  misc_feature (791)..(826): n is a, c, g, or t
ttggctaaataataatttaatattttctttttaaattatatcgggggtggtcatatacattaatctggtgatttgtatatgtgtttgaaatttttgcattttgtttaaaaaataatatggtaccttggtccctaaaaacagtctgcacttagaagtttatatttactcagtgtttcagaagtggagaacattatcttttatttataaaaatattttgtccttttttaaatgttttgtgtttctctacaggttacaacagttgcttcagttgcctgttttaggtgtttgcacttattttatttcttcttgaaagaatttttatttgcttttgtggtagagattatatgtaatttttttcagtcatataatggtgtgctgtcaacttaaacactgacaggtaaatagaattgtacactgtagtttgaattatttataattgacacactctctccctctccactcctgaagtatgctgctatagaaaatagcagaatcggcttgctgctacgagagaaggaaagagcgaccaccacttgcactgtgtgaaaagataaaaaacaaatgatggcaagttctcaagttaactaaatggaatcaaccattaccaggcaaattcttgcaaataccaaaatactactatgccttataaaacaaaatgaaagcaggttaagattttctgctctgtttgtatgttaatagaaatggaaatactaagtattttaatgcttagctcttgaacagtaaacctaaaagggttttaagctatttaaatctacttgctagtttttgcnnnnnnnnnnnnnnnnnnnnnnnnnnnnnnnnnnnngtgagaagtgaaaaaaatgtatggaactaaaattatgccttattgataaatagataaaccaatttgaatcctc

SEQ ID NO: 189924 - DNA, 1649 bp, Homo Sapiens
  misc_feature (671)..(708): n is a, c, g, or t
  misc_feature (1000)..(1020): n is a, c, g, or t
  misc_feature (1214)..(1270): n is a, c, g, or t
  misc_feature (1496)..(1508): n is a, c, g, or t
actttgtacaaaaaagttgggatgaagggcgactacgatatcacacatgtatgtgtaaatgttgcttttccacctccactggaagagtttataccagtgactttgagcctgtcaccaatcccaaatttgatgacactttcgagaagaacctcagttctgtccgacaggttaaagaaattattcatcagttcattttggaacagcagaaaggaaacagagtgcctctctgcatcaaccctcagtctgctgcttttaagagctttattagttccactgttgctcagccatctgagatgcccccatctcctctggtgtgggagtgatggtggaagataatgtactactgaagatgtaatgtagctttccactggagtctgggatttgcaattctggaggttaatcatgcttgtactgtaattttactaatgaagttttaaattaacaaccactacttgtatgatatgaataatatttagaaatgttactagacttttaatcttgtaaagtggttgtgcttttagaagaaaaatattttacccagagttgcacatgttttatgaatttagtgcagctgttatggctcacctcagaacaaaagagaattgaaccaaatttgggagtttggggttttatgttttgtttttcttttctaaaatgaagtgagattgttnnnnnnnnnnnnnnnnnnnnnnnnnnnnnnnnnnnnnnaaggacagtcatacattttgatatttgagccattcctaaagatttggggttttctaaaactaaagaatctaggaaccttgcctgcgaccaatcatggagccacgtgagctgatcgtggctgcacctggggggagggtagggaggaggggcatgccacctaatgatcaagccctataattagcttctcattagagccgtgatggtgatgtgtgctgtctaaaatccaatgttgtgggtagagagaatgagtttgtgactaggagagactaaacttttgttttccttacccagnnnnnnnnnnnnnnnnnnnnnttaatctatttttattagaagtttttctgctctttcttacataaaagaaccccaagcatgcatctttcatgtgtgtaaataattcatttctgggctaatttcaaaagaatcccaatattgctgtatagaaagagaactagcttgcacattttaggtctgtgaaattttgtgagacttttcctgcactggacagnnnnnnnnnnnnnnnnnnnnnnnnnnnnnnnnnnnnnnnnnnnnnnnnnnnnnnnnnggcacatagggaattatgtcaaatgtgtttgtgtccttaggcaaagctgtgggagtcttgaaatgtcacagtagtaaataacttattactttttgacaagttctttttttctgttggaacactgaattcttctgtgcatatgtacatatgaatacaaatcgaaggcctctacctcctggagttatacaacttggcttgtttacctccacatgctgatgatgactannnnnnnnnnnnngagttcagtgtggagacttgaaactttgaatgtcccttccaacttttatattaaaaataaaagacaagaaaattggaagatcatttttcacctgtacaagggaatactaatggatcgtcttaaaattggttctaggaaaaa

SEQ ID NO: 189925 - DNA, 1267 bp, Homo Sapiens
ttgggtgaagaaaagaccaaacttggtaaagaattgcagcagaagaaacaggaattacaggatgaacgggactctttggctgcccaactggagatcaccttgaccaaagcagattctgagcaactggctcgttcaattgctgaagaacaatattctgatttggaaaaagagaagatcatgaaagagctggagatcaaagagatgatggctagacacaaacaggaacttacggaaaaagatgctacaattgcttctcttgaggaaactaataggacactaactagtgatgttgccaatcttgcaaatgagaaagaagaattaaataacaaattgaaagatgttcaagagcaactgtcaagattgaaagatgaagaaataagcgcagcagctattaaagcacagtttgagaagcagctattaacagaaagaacactcaaaactcaagctgtgaataagttggctgagatcatgaatcgaaaagaacctgtcaagcgtggtaatgacacagatgtgcggagaaaagagaaggagaatagaaagctacatatggagcttaaatctgaacgtgagaaattgacccagcagatgatcaagtatcagaaagaactgaatgaaatgcaggcacaaatagctgaagagagccagattcgaattgaactgcagatgacattggacagtaaagacagtgacattgagcagctgcggtcacaactccaagccttgcatattggtctggatagttccagtataggcagtggaccaggggatgctgaggcagatgatgggtttccagaatcaagattagaaggatggctttcattgcctgtacgaaacaacactaagaaatttggatgggttaaaaagtatgtgattgtaagcagtaagaagattcttttctatgacagtgaacaagataaagaacaatccaatccttacatggttttagatatagacaagttatttcatgtccgaccagttacacagacagatgtgtatagagcagatgctaaagaaattccaaggatattccagattctgtatgccaatgaaggagaaagtaagaaggaacaagaatttccagtggagccagttggagaaaaatctaattatatttgccacaagggacatgagtttattcctactctttatcatttcccaaccaactgtgaggcttgtatgaagcccctgtggcacatgtttaagcctcctcctgctttggagtgccgccgttgccatattaagtgtcataaagatcatatggacaaaa

SEQ ID NO: 189926 - DNA, 1293 bp, Homo Sapiens
attttttccaggctaacccactgtgtcccaggttaatctcacaagacaactggtccctacatcatgtaaagggtggatggggagcctcctaacaccatgtcaacatgactgctaacaaggagccacacacacaactgaattcacaggacctcatatcctccaatgggctctttcccacatctactcgaaaggaatcgtgggtttccctttgggcttttcttcctgggaatcagtccatgggagatgccaagcgcccctggaacatgaaattatccacacatgtgtaactgcacactctagattaacaggagagaaaacacgctcatttttgtttccagctacacatacttagctttctaaacacaaaaactgaataatttatctgatttatgcatgatggtttggtatgtctaagaaagctatataaaacataaaatgaactcatgttcatgcatgaattaaactgacttcatgagttctagggagacgcattaacctgtgctgttcccctggacgcacacttggcctcatacaggtgccactaacagccctgatggcagtgtcagaggacagcaaggtgaggctggggaagtgaggctgtagggcccagagaggccctagtgcctccaacagtctcagatgctacttgattacttctatgctatgggctgctaactcttacatagcctagaaaatatgtacccatgaacactaccatgtttggatttcaaacaactttaaacatttggtatcagattgggggagcaacaaataataaaatttagggtctgtactgttaaaagtatagtatataacagtaataaaacctgtgtggggcatttttggttaatctgtcgtcgaaaacggtaatctaaacctgggagagttgctatatggggaggggagagtgaagaaatggagaacaggcttgtcctcgggtaggatgtgtcagcctagactggccctcaacatctggacggagcaacaggtaaatgtgccatggaagaccccacaaaacatgactccacatcagcagaacaaagacaaacacaagtcttttctgacttcctaacatggaactgtaacatctgtaatacaagttggttaaaatactgctcaaacagcacatagggaaacaaacaataccttgtcactctctacaagtacacactccatttacaatttggtttttaaaccagaaaaaactgttaaaacatctatccaacagtgatgtattcaaaagtatatacatctaatagtccaagagaatgctcactctggacccagtgccaa

SEQ ID NO: 189927 - DNA, 1549 bp, Homo Sapiens
ttggcacagacaaagtgctgccgtgacactcggccctccagtgttgcggagaggcaagagcagcgaccgcggcacctgtccgcccggagctgggacgcgggcgcccgggcggccggacgaagcgaggagggaccgccgaggtgcgcgtctgtgcggctcagcctggcgggggacgcggggagaatgtggactgggtagagatgaacgagacttttctcagatgttggatatttgcttggaaaaacgtgtgggtacgaccttggctgcccccaagtgtaactccagcactgtgaggtttcagggattggcagaggggaccaaggggaccatgaaaatggacatggaggatgcggatatgactctgtggacagaggctgagtttgaagagaagtgtacatacattgtgaacgaccacccctgggattctggtgctgatggcggtacttcggttcaggcggaggcatccttaccaaggaatctgcttttcaagtatgccaccaacagtgaagaggttattggagtgatgagtaaagaatacataccaaagggcacacgttttggacccctaataggtgaaatctacaccaatgacacagttcctaagaacgccaacaggaaatatttttggacagatctattccagaggggagcttcaccacttcattgacggctttaatgaagagaaaagcaactggatgcgctatgtgaatccagcacactctccccgggagcaaaacctggctgcgtgtcagaacgggatgaacatctacttctacaccattaagcccatccctgccaaccaggaacttcttgtgtggtattgtcgggactttgcagaaaggcttcactacccttatcccggagagctgacaatgatgaatctcacacaaacacagagcagtctaaagcaaccgagcactgagaaaaatgaactctgcccaaagaatgtcccaaagagagagtacagcgtgaaagaaatcctaaaattggactccaacccctccaaaggaaaggacctctaccgttctaacatttcacccctcacatcagaaaaggacctcgatgactttagaagacgtgggagccccgaaatgcccttctaccctcgggtcgtttaccccatccgggcccctctgccagaagactttttgaaagcttccctggcctacgggatcgagagacccacgtacatcactcgctcccccattccatcctccaccactccaagcccctctgcaagaagcagccccgaccaaagcctcaagagctccagccctcacagcagccctgggaatacggtgtcccctgtgggccccggctctcaagagcaccgggactcctacgcttacttgaacgcgtcctacggcacggaaggtttgggctcctaccctggctacgcacccctgccccacctcccgccagctttcatcccctcgtacaacgctcactaccccaagttcctcttgcccccctacggcatgaattgtaatggcctgagcgctgtgagcagcatgaatggcatcaacaactttgggcctcttcccgaagg

SEQ ID NO: 189928 - DNA, 1433 bp, Homo Sapiens
  misc_feature (813)..(822): n is a, c, g, or t
aactttgtacaaaaaagttggaaactttcatagctgtagagcaaagttacaagttttaaaaacccagtagataacagtaacactgttcctagttgaatgaatttgtttattgttctggttatacagtggcttagtacttattgagtccttttcaatatactgtttccaaaagatctataaagattcttaattttacactcctaataaaacatttattttttgtcccaaatagtatctatatctgatgatgcaagggaattaagagaggtaatgtgtacttttcttatgataagatcactcataaaacagttggaataagaaagtaaactagtctagttttatatgacctggtatattgaacaaacatagatctcagttttggaagggccttcagtatctttagcacatgattcaccaatatcttgttagtaatattttaagtagatggtgaattatattaacccattttttgagtaggcttataccataactttacacctagtaattttgcagtaatacaactccttacaataagttaatgttagacagttatttgtttcttctgcatcttgctactgaaaacaaaaacaatgaaaatattcatatttctattatgtgtaaagtggtgttagtgtaaacagttaactccaaatagattttttaatgtattaatgattaccttaaaattatctgctttccctactcttaatttttcttattgttaaagtttttatatgttgtaagattgatgtatctgtaaatattgcagtttttatgattttgttttattataacatggaaatatggcagggnnnnnnnnnnaatcattattatactgatgtcttggattctttttctttcccatgttcttgtgtaactagactttttagccagtgatatctgaattcatggtagagttgttatttcactccagttgttcctcccttaagcacgagtctttgaccttttgaacaagagaatgccatgttcacataagcaaatcgttgcaagtgataataacgaagtgtttcttcttctgtgaggaattaatggactttgaaattgctgaataaggagtagcttgttacatcctagccatttgatgtaatacaaatgttcttatttggcttccttttctttgagccttcagagttttaaaggaccctctttgaccctcaggacttattagctcccagttagctgcctggaaaactcatagaaccattccctagatcccatttgtccgagaggctttggtgcttagttaaagtgcattttcttactctaggtttatagagtgatgtaattcaactgaagaaaacacacacatgcttttggtgcttattcttcagttaaaggaggtatccattgattcttttatatgaaattaaatcaaactgttatttttataggctcttcacatattaaaaaga

SEQ ID NO: 189929 - DNA, 1639 bp, Homo Sapiens
gcccgtagctgctgattctgctgagtggcagcttccaggcgctcctgggtttctgcaactcttggcgggccatctcggccaccgctttgccctgagcttctgctgctgcagctggtccacgagctgggtctgcagcagtagctgattatgcagcacctccttctcagaggtcagctgctgataggcggccacatactgctgcaggtgtcccaggtactggtctcgctgctgctgcagactttgagcctcttggctcttcagctccaccgtttccttcagctcgctcagcttctcctgcagctcgcccagcttctttcccagctccctcttgacgtgctgctccgactgcagtgcgctggtgatctccatgttctcattagtcagctttacaaatccgctctgcagctcagccagctgctccttgagctcccggttctgggagagtgcgcggctgatggtagtgcggtcgttctgcatggtctccaggatttgcctgcgcgcctccgcctgctccccccagagctcggccgcccgctccagctccagcagcctctcctcctgctcccggttcaggcgactcaagccctcattgtcttgcacctgggcttgaagctgtcctgccagaccctccagctccttccgcaggtgctcagcctccgcttgtagctgctgctccacctcggagggccctgctgggggctctgggggcgggggttcagccatctggttcctcagttcagccaagctcgtctccagctcctgtacccgactcatgctacattccttctcctctctcaatgtgtgcacctgctctgacatctgctgcatcctctgccgccacatggcgctctctcctttgagattctccgcatatttatctctctccatttgtagttgtctaaccgactccattacgtgccccaggtgtgcttccagctgtgcccgctcctccatggcctgctgtaactgctggttagcatcaggggcttcacaccggcttgaaaactgttgaagcaggagttccgtcatctctaacttcttttgcaattcttccaagttaagctgcatgccagccttctcagtcactaggacccgaagcttctcttccaattctgatttctcttgcttcaggtcctcattgctttgggtgttcttgtataactccagcctgagggcgtctctctctttggttaactccttgttgtacctgtctgccttcttctgctgcgtggagacagcagagagagtcttggtttcatccatgagattagggacattgtcagcatcatgattctgagatgccgccatgctagtgagactggcaccaggggaagggacaccgccaggtaacacggtgtcatcagatggttgtagagtagcagcattgtccttgggtgtcttccacttgtccaatggggggagcgctaccccattggaacggttaaggtcggacaccagcaccttcagaatgtcctgaatatcctcaggtgagtggcaaccaccagaagtggttgtctcagggttactgccattttttattttcttcttctttttcgctcctgtaggaacaccagggctattcctctgctgatattctctcaactttttcttcgctgcggccaatttgctctgtcgccaa

SEQ ID NO: 189930 - DNA, 1615 bp, Homo Sapiens
tttggcaagcagttgatagatgcgtcctttcacatcttcagttgtctctgtattggcaatttgctcaggaatctcctcctctccctggggaagctgtagaagctgctgcagggtagacttcaactctggcagcatggcttcccactcctcctctgggtccagcactgcagaagctgctgcagttcgcctctgggccctcatctcttgtaatttctgggtctccttctgcagtggtccggcaaggtcagcatcactaagcttgcaggagaaaggattattggctagaaaactggccagcagctggatggcatttttacatactagcactgacttgtctgccagacgtcccacagctaaagccaccactgcctggaaacgtgtcagggggagagccttctgctggacaattcgggtgaagagctgcaaaacacggctccgcacaaaggagttgacatcatggccatgggcttgtaaagtatccaagaactggtctctggtgtctcgggctgctgcttccagttgatcgccactgagaacctgcagcaccatctccgccatggctgccagcacagcattacgcatcatgtaattttctccatccaggtgatctagcaaaatgcacatgctggacatcaggatagctgggacacgttctgctagttctgtcaggaatgctgcaaagccctttgtccctgaagggtctcgactcagctcttggggacacttttgtccaatctctcttacaatctctcccactatgctcttcattccatagtcagttgcccatagactcacggctgcaaccagtacaggtgccaggtgttcaaagtgctgcagcatctggatgatcttcactgtagcactgagcatatggttataacgggtcaaggctacaccaagcaggtgtgttatggcttcccgagtggggcggttcttctggtgattaatggtgggattctccagaaggcggtagcaacagccagtaaccaaactgacaaattcttcttcaattattgagtggttccacaggtgacggatgtccaactgaagtagctgtgttaaaagctgaagaattggttgcctctcttcttcccagtcaaagccatgggctgccttggtccgagctttcttacccttcccaccaaggtccaggtccacaaggtttgtctggctggccatggtctcaaaggattccaggagacgtatcagagcataacagttcattttgagggcatttagatgggcgtttctatctgatccactcaaagttgtatcatccaggatagctggaagctcctgggagtggcgggataccacttttatcaggaattccagagtatcttctttgaggccaggatctatacttcgaaagtgatgcaaaatgctgtagatagtatcaaagtgctgcagcatagccaggggcccctgagctcgaaaggcagcctgaaaagctctaagctgtggtggaagatgtttgatggacagtacctcttgcacaacatactgattcacccctccacttttcaacaactcctctggggataatggcagatggaactcatacatttggggagccattctactcctacaggctcacagggctggggatctccaa

SEQ ID NO: 189931 - DNA, 1501 bp, Homo Sapiens
  misc_feature (375)..(416): n is a, c, g, or t
  misc_feature (825)..(839): n is a, c, g, or t
ttggcgtggaaggaggctccccaagctggctggccattttgctgctgtgtgtggaggtgctgtcagtggcatgcccaaacccaaagctggaagaggaataaattacaagtgctcaaggttgcatccttttgagctcaggacctgcttgtaagccgagagggttctctggccctaatctagccaagcaccatggagagaatcagtgccttcttcagctctatctgggacaccatcttgaccaaacaccaagaaggcatctacaacaccatctgcctgggagtcctcctgggcctgccactcttggtgatcatcacactcctcttcatctgttgccattgctgctggagcccaccaggcaagaggggccagcagccnnnnnnnnnnnnnnnnnnnnnnnnnnnnnnnnnnnnnnnnnncctctggatctctgctcaacccaagcttctccagatggagaagagaccatcactgcctgtttagttaggcaggaagcagaggtgtttcctttctggggctaagcctccttctgaccacacacagacatttcaggaacccctgaaataatgcactatgtccatgtccacagagtaactactcaaccaaggaacaaacctcagactaagtgtcccagtggagggcagtcccagggaccacgtggacaattcttggatactgtcttggcagctatgtgtccaatagcaatgctccttactgcagacccaggcatgcctcccacctgtctctggcataccccacatgcaaagcacaaagaacatttatccatacatctcaatatggttcccaagtgtgtgcacatgcacgtannnnnnnnnnnnnnnaattcaggtagcaggtacgtgggcaagtatattctgctcatcaaatggtcattggctatgtactttgtgcagggaagtacattatctacagtcacaaaaatgtctcatgggaaagccttgccagattcagacacatatatacaatttcctaaccagcaaggcccccatacaccatctattccataaaccactcaggttacagatgcatgctttcctatttctaactctacacataaacttttactggaagtactcataattggacattccagcaacctgctacagtccccacccttgtgtgtcttgatacagacacaccaagtttctgtgcctctgacccctcacctgtgccaagatgtttaaagtgtgatggttcaaaattcattgaaagctcttttcttgtaactcatgacaaagtccgtcctcattgccactgagaggtgtttaatgtgatccaagacctctcgtgaaacatttacccccgcaaaccactcagcaaagtgcctttctccaagcaaagaacaaagagctcttggttggtgactgctaaaaaattatgggaagcccactcatttatgtcagtggactgcaactgtgtacctgtgcaatgtttacagatggaaagggtgaggagatgctacacctgagctaggtatctccta

SEQ ID NO: 189932 - DNA, 1300 bp, Homo Sapiens
  misc_feature (254)..(344): n is a, c, g, or t
tcaccctgtttaaattctctatgagaccttctaaggggctacagtgttcatgttatcttcacaggttcacccaacagtaatgataaccaagtggcaggcaaatcccagtgaacacagtaagaagtcggtgatttctttgtcatctttccttagagagggcacatacactggaaatgtggccaattccgctggctgagccaaatcaatctgtggtagaaaacacccaaaaatggcccctactcactccagggggnnnnnnnnnnnnnnnnnnnnnnnnnnnnnnnnnnnnnnnnnnnnnnnnnnnnnnnnnnnnnnnnnnnnnnnnnnnnnnnnnnnnnnnnnnntgccctgcaacaagtccttatgtgtatgtttttcacaaggctggtagaggttattttgttttggattccacgtaaattttatctccatccctaatgccaaaggaatgcaatgcccgagagctgtacttcatttcctctgggccaaagggtgcttcatggtcaaaatagtagagaagcatgttgcttgtgggtaattgtactagagtttttaactgtttctttagttctgccactgtttggtccagacgaatgctcatttcttccacctgatcgttaaagtggacttctacttttgcactgctctggggtcttaggtccacttctgccaaaggctccaacttcccatatttagtgatcagttcatgatacctgaatggcacttcttcctgtggaacatccacatagtaacgaataaaaaatctctcagaatcttctcgttcaccatcagtaacaacgctgccattaagtttggaaactgatggcaatctggctattaccaatttccttcgctcctcggtggtatatggctgcagaagaggaattcctaacaatctcacttcttccagtttgggaaatgaatttagtttatcaatgtcttcccaggactgcaaacctgacttgtggaggctgatggatcgaagattaggaaacaacctggccaatgaatcatcaggctcctcaatagcattcaaatgattgttggccaggacgagggtatccagtgaaggaaacataactcctaactttcgtatttcagtccagtcttggaggttattgtctgttatatgtagtagcttaagagaatgacagcaaatagaaggacaagacactgtttcatagtcattaaggcacaggaagagctcctccaaactcatgccagtcttcgagtttgttgtcagaaagatctagttccgacacatgagcgcagaacgcagcaatttctttttcatctccaa

SEQ ID NO: 189933 - DNA, 958 bp, Homo Sapiens
tattgtctcatctagtctgctatgatactctgctagtgaattttcctcttccaggatcttcttcgtgcaaagtcaatggtgacctcttagaaagtcgagaggccgtgtcgaagttctctcagctcctcctctcgcttctgcaaggtttcccgctcaagtttggacaaccattggttagaatcactggcaaagtaatctgactcatcatcaatgacttgggtccttcgaatactagttctgtcaaactctaacagtttgtctttatgcttgatagccttctccagaccagacttaattcgcaattcttgatgaggaagaaggtccttggtagagatgtccacctttccagaattctccactcctgacatgagtttctttagcagtttctggctcttgtttgagtcacgctgtaaaatatcttgttcctcatgagtacacaccagagtgccacagaataagcaagggcctgagccttcttgttcacagacaatgcgcccacagatcagacagttattgatgagcttgtgcttctggcccaggcaatcacaagggtgacgaccagggagcaggactgcaagcctgtcctgtccctctcttgtgtataaattgacaaactttgtcttcttctttacggagttgctgttctcttgtgccttggccaaatcaaaaggtgttttaacctctgcagtcgtgtcaggttcagtaaatgcaggaacttcctgtctgtttctccctttcttcctaccccgctttagatggtcgcctgatttctgcccatctaaaatttcatcttttttgaagcactgctgcaaaggatccgaaatcaactcctgatcattcttttgccatttggttataagttcttctatgaattgaccttttttgccttcatttccctggaggagatcagtaacatattctcgtatctcttcagcactctcaattgacaaaacgccaa

SEQ ID NO: 189934 - DNA, 860 bp, Homo Sapiens
ttgggtacctgcacagccagagccagcccagctcgcagtaccgcatcaaggagtacccgctgtacatcgagggcggcgccacgcccgtggtggtgcgcagcctggagagcgaccaggagggccactacagcgtcaaggctcagttcaagacgtccaactcctacacggcgggcggcctgttcaaggagagctggcgcggcggcggcggcgacgagggcgacacgggccgcctgacgccgtcgcgatcgcagatcctgcggactccgtcgctgggccgcgagggcgcccacgacaagggcgcgggccgtgccgccgtctcagacgagctgcgccagtggtaccagcgttccaccgcctcgcacaaggagcacagccgcctgtcgcacaccagctccacctcctcggacagcggctcgcagtacagcacctcctcccagagcaccttcgtggcgcacagcagggtcaccaggatgccccagatgtgcaaggccacgtcagctgccttacctcaaagccagagaagctcgacaccgtcaagtgaaattggagccacccccccaagcagcccccaccacatcctaacctggcagactgggagctacaatgatagctgtttcctggattcctccctctatccagaactagctgatgtccagtggtacgggcaggaaaaagccaagcccgggaccctcgtgtgagccagcccggcctaatctgaccgcctcaacgccattctgagatcacctcactgcctctcatttgccttacccagacgcaccgtcaccctgcaccagctttggccctcacacttttttttctcctgtctccgcattccctcccccttgaaaacctgactgaag

SEQ ID NO: 189935 - DNA, 1469 bp, Homo Sapiens
  misc_feature (74)..(105): n is a, c, g, or t
tatttcaccttctttccccccacacctcatttaaatggggggagtaaaaacatgatttcaatgtaaatgcctcnnnnnnnnnnnnnnnnnnnnnnnnnnnnnnnnaatataaagaggccagaataaatacggagcatcttctcagaatagtattcctgtccaaaaatcaagccggacagtggaaactggacagctgtggggatattaagcacccccacttacaattcttaaattcagaatctcgtcccctcccttctcgttgaaggcaactgttctggtagctaactttctcctgtgtaatggcgggagggaacaccggcttcagtttttcatgtccccatgacttgcatacaaatggttcaactgtattaaaattaagtgcatttggccaataggtagtatctatacaataacaacaatctctaagaatttccataacttttcttatctgaaaggactcaagtcttccactgcagatacattggaggcttcacccacgttttctttccctttagtttgtttgctgtctggatggccaatgagcctgtctccttttctgtggccaatctgaaggccttcgttggaagtgttgtttacagtaatccttaccaagataacatactgtcctccagaataccaagtattaggtgacactagctcaagctgttgtcttcagagcagttaccaagaagctcggtgcacaggttttctctggttcttacaggaaccacctactctttcagttttctggcccaggagtggggtaaatcctttagttagtgcatttgaacttgatacctgtgcattcagttctgtgaatactgccctttttggcggggtttcctcatctccccagcctgaactgctcaactctaaacccaaattagtgtcagccgaaaggaggtttcaagatagtcctgtcagtatttgtggtgaccttcagattagacagtcttcatttccagccagtggagtcctggctccagagccatctctgagactcgtactactggatgttttaatatcagatcattacccaccatatgcctcccacaggccaagggaaaacagacaccagaacttgggttgagggcactaccagactgacatggccagtacagaggagaactagggaaggaatgatgttttgcaccttattgaaaagaaaattttaagtgcatacataatagttaagagcttttattgtgacaggagaacttttttccatatgcgtgcatactctctgtaattccagtgtaaaatattgtacttgcactagcttttttaaacaaatattaaaaaatggaagaattcatattctattttctaatcgtggtgtgtctatttgtaggatacactcgagtctgtttattgaattttatggtccctttctttgatagtgcttgcaggttttctaggtagaaattatttcattattataataaaaacaatgttttgaattcaaaatt

SEQ ID NO: 189936 - DNA, 988 bp, Homo Sapiens
  misc_feature (795)..(830): n is a, c, g, or t
ttggggcattgtcatcagcgccaacgaggatgagccaggtctgcccaggaaggcagacttctctgccgttgggaccattgggcgccggagggccaatggctctgttgcgccccaggaaaggagccacaatgtgatagaggtggctacagacgcacctcttcgaaagcctggaggctattttgctgccccggctcagccggatcctgatgatcagtttatcatacccccggagctggaagaggaggtcaaagaaatcatgaagcatcaccaggagcaacagcagcagcagcagccgccaccaccccctcagctccagccgcagctgccgcggcactaccagctggaccagctgccagattattacgacacgccactatgacccagccgagctgtttaacaaataaactaaccacaaaagactgagttgcaagagtctcccaggctcacattaaaccaggggttttactccacatccttcccccagacactgttcccaacctgtcatcgcagctaatctgtaggttctctttctttgggttatttttttaagtaatcaccactttcttctagtgatgctttaccaatatgatttacatttgttaacttctccccctaacatatcagatatgtaaagacaaagaacaaaaggtttaatatattacagagaaacagttaatgataatgtaatattttttaaaatggctttttgttgtttgtttggaaggcagggcaggctgccgttgctaaatgatttaataatattgtaattctgtatttctttggggggaaaaggcnnnnnnnnnnnnnnnnnnnnnnnnnnnnnnnnnnnntcttgaaaataatagacatttgtagaatatggagactaactcctaggagttgctttactctgtcaagtgacttaagtcactgggattcactaattttctctgagagaacagctgattgagaatttccattgttaatagctcagtgttgtatagtgagg

SEQ ID NO: 189937 - DNA, 1412 bp, Homo Sapiens
  misc_feature (1173)..(1181): n is a, c, g, or t
ttggtgcacatttaaaaaatatcatatagtaaatgcaaacatgccaagtattttataaagattaataacagacctactcttacctggcagtttacttaacttactgttttgagtcctaaacttagagttgttaatgcttatatataatctaaccaaagagttacccagtagggttttagtttttgaacttttattttcttgttgattataaatcctgattttggaatctattgcgcaaaagaagtttcattttggttacttagacctaagatcacttattaaaaatccttattttctccaagcccagcaaacgttgacttctgggcaaacctgaaaacctgaaaatgccactttcatgcagtttgtttgaagttaagtggaatcctttcaaatgacgagctgcagagaactcagcaccaagggctgcctatctgtagatagctgtaaaatggaatatttttaaatgaaggcaaataagtacttaaaagtggctgagcaataaaatggtccaataataggtaaatgcaacagaaacagaaggagacctggttgccttatgcctttactcttacatggaataaattcccaatgcatatcctatgtaaaccataagtgaagggaaataaacctcgtcatgctccatgctgtgaggtgtcctttggatattctgtgatgacagagaagcctattttgttttgttttcagcatctttctctgatgtacgtttttaaggattttgtaagagctgttttcagtgtttaaattagtgctatttttccttgtttttaaaaatgaatctcgtactgtatcttactatgtccatacagatgttacaaatcgacagttttattcttagactcatgtgatccaagctgtatataccatatataaacattttacatgaatcatttagttttttaattcatttactaatgctataaaatttcctatattaccccagtaatttgcatcagctggtttatatactaaagcaacatgttttgatgagtttcttacatccttatcgaggaattgggttaggaaaaaatacataattgtaaaactgagtttgctgtattatactttttttcttgagtattagttgtattactaatcatatgttgattaactgtctacttaaagtcaaggtacctgtatttttaatccactaannnnnnnnnagttgggaaatagatttcgatcttttattaaactaacatttttttgagaagtaaaattgacttcatatacaaaagccctgtaatttaggcgaaatggaagcagaaatctaggaagttgtgcttgcttgtatgttgagtttggtctcagactaagtaatgcatcagaatttatctgtttgaagcctgaaataatttaaggactctgattcactgaccaaagtcaatgttgca

SEQ ID NO: 189938 - DNA, 1168 bp, Homo Sapiens
ttggcttgatcaatccacagagccttctaacaattcaagtccttgcagagagaagcttgctcagagtggttactgaaaacaggaacctgcccttctgcaagccctgtgccttcctcgttcctagcagaggaagtatgcggccagtttagcaactgcagttcttctgtgtagcatgggctgcttctccacaaccgcgagaagcccggctgcctgtttattctggagcagcagcagttgacagacggagaggcagtgactctgcacccagcaatccctctgcagacagctcccacaggagtcatgcccagtgtgtgaaggctctgggcatcaccagcggccccagggaaaaagaaagaaatgggaaacagcatgaaatccacccctgcgcctgccgagaggcccctgcccaacccggagggactggatagcgacttccttgccgtgctaagtgactacccgtctcctgacatcagccccccgatattccgccgaggggagaaactgcgtgtgatttctgatgaagggggctggtggaaagctatttctcttagcactggtcgagagagttacatccctggaatatgtgtggccagagtttaccatggctggctgtttgagggcctgggcagagacaaggccgaggagctgctgcagctgccagacacaaaggtcggctccttcatgatcagagagagtgagaccaagaaagggttttactcactgtcggtgagacacaggcaggtaaagcattaccgcattttccgtctgcccaacaactggtactacatttccccgaggctcaccttccagtgcctggaggacctggtgaaccactattctgaggtggctgatggcctgtgctgtgtgctcaccacgccctgcctgacacaaagcacggctgccccagcagtgagggcctccagctcacctgtcaccttgcgtcagaagactgtggactggaggagagtgtccagactgcacgaggaccccgagggaacagagaacccgcttggggtagacgagtcccttttcagctatggccttcgagagagcattgcctcttacctgtccctgaccagtgaggacaacacctcctttgatcgaaagaagaaaagcatctccctgatgtatggtggcagcagagaaagagctcattcttctcatcacc

SEQ ID NO: 189939 - DNA, 1132 bp, Homo Sapiens
aaatagggacggcctgagactagaagttgaaccccagaagtggaggtggagctgaggaaccagccttaaggcatgcactgaagtgagagggagtgacagcagcagcccatggttgggacggaaggcagggcaggcaggccatggtgtcagttaataaataataatgaaggaccccaaggatgtagggggcaggtatgtacagtgcccagaccccggaccagcctttcccatgccccactcttggggccagttatcttgaaggaagggagggaaggagagacagaacacccagggaaggacaagctgtccctttactgccaccccatcctgcctacttcttaagaggcttcttaaagattttgaggggaaacttcttccggcctgggctggagtctgtttcctcgccaatagagccattatcctcctcagccacagccttcttgccagccaggtggggaatgcgtgtgtttcggctggcttgcagggctcggctgtccccaactggagatggtgtgtctgggtctggggagctggggctgtgagaacgggaagaatccaaatgtggagagccaccaggtggggctgaggggctcagctccatcaggctgtgggccttgtccagcccatggttcagcgccagtaatgccttcttggccagggcagggctgtcaggcagtttctccaccagagaccctgggtggaccccctcgatcagccggtggctgccattggaagtcatggcattgagagcctcgtctgcagcacggctcatctgaggaggtttgggggccacacgctggcggtcactcatgtggagggaggactccgaatcggaatgggtcaaatccctctgagatcccaggccatgctgtggctccgtcaggcgctgccgaacactgctctgcaggctaggggactgcatggacaagggagacacaatctcctcatccatgtcatccacgtcgtcagtcatgatgaagtgagcagggttggggcgtgtactgcccatccagctggggtctatgttgagggcagccaccagtgagtggatgccagggttgttgacaatctggaagccacagaggatctcgatctgttgccagcggtgcaggcgctcccgcaatgctgccaa

SEQ ID NO: 189940 - DNA, 936 bp, Homo Sapiens
tacaaaaaagttggcccaaaggtaggctcaggctccgacggtggcccgcgggggtcacgaggcttcgtagtggaggaacgggtttggcgtgtgggacgcagctgcctctgtactggggagtcacggagtggccgggctccagggacatggcggcggcctctgcggtgtcggtgctgctggtggcggcggagaggaaccggtggcatcgtctcccgagcctgctcctgccgccgaggacatgggtgtggaggcaaagaaccatgaagtacacaacagccacaggaagaaacattaccaaggtcctcattgcaaacagaggagaaattgcctgcagggtgatgcgcacagccaaaaaactgggtgtacagactgtggcggtttatagtgaggctgacagaaattccatgcatgtagatatggcagatgaagcatattccatcggccccgctccctcccagcagagctacctatctatggagaaaatcattcaagtggccaagacctctgctgcacaggctatccatccaggatgcggttttctttcagaaaacatggaatttgctgaactttgtaagcaagaaggaattatttttataggccctcctccatctgcaattagagacatgggtataaagagcacatccaaatccataatggctgctgctggagtacctgttgtggagggttatcatggtgaggaccaatcagaccagtgcctgaaggaacacgccaggagaattggctatcctgtcatgattaaagccgtccggggtggaggaggaaaaggaatgaggattgttagatcagaacaagaatttcaagaacagttagagtcagcacggagagaagctaagaagtctttcaatgatgatgctatgctgatcgagaagtttgtagacacaccgaaggcatgtagaagtccaggtgtttggtgat

SEQ ID NO: 189941 - DNA, 1565 bp, Homo Sapiens
ttgggaaagtattattattgcattagttatgggtttgacatttttcatgttccatttttggaacactaggcaaaaccactaccactaggactaataataccttttttccgttttagtcccaagatgcctcgaacactaagtttacatgaaataactgaccttttagagacagatgacagcatagaagcaagtgctatagtgatacaaccacctgaaaatgctacagcacctgtttctgatgaggaatcaggagatgaagaaggtggaacaataaataatctgccaggttctttgttgcacacagctgcgtatcttattcaagatggctctgatgctgagtctgactcagatgatccctcatacgcacctaaagatgactctcctgatgaagttccatctacgtttactgtgcagcaacctccaccatcaaggaggaggaaaatgacaaaaattctttgcaaatggaaaaaagccgacctaactgtacaacccgtagcaggtagagttacagcaccaccaaacgatttcttcaccgtaatgagaactcccacagaaattcttgaactttttcttgatgacgaggtcattgaactcattgtcaagtactccaacttatatgcttgcagtaaaggtgtacatcttggcttgactagctctgaattcaaatgttttctgggaattatttttctgagtggttatgtctcagttcctagaaggcgtatgttttgggaacaaagaacagatgtgcataatgtactggttagtgctgccatgagacgtgaccggtttgaaactatattttctaatttgcatgttgctgacaatgcaaatttggatccagtggacaaattttccaaattgcgacctctcataagcaaacttaatgagagatgcatgaaatttgttccaaatgaaacatatttcagctttgatgaattcatggttccttattttggtcgtcacgggtgcaaacaatttattcggggaaagcccattcggtttggctataagttttggtgtggtgccacctgtctgggctacatttgctggtttcagccgtatcagggtaaaaacccaaatactaaacatgaggaatatggtgtcggtgcgtcacttgtccttcagtttagtgaggcacttacagaggcacaccctggacaataccattttgtattcaataactttttcaccagtattgcacttcttgataagctcagttcaatgggacatcaggcaacaggtacagtgagaaaggatcacattgacaaagttccactggaatcagatgtagctttaaagaaaaaagaaagaggcacatttgattatcgaattgatggcaaaggcaatattgtctgcagatggaatgataacagtgttgtcactgttgcctcatctggtgctggtatccatcccctgtgtcttgtcagtcgttactcccagaaactgaaaaagaagatacaagttcagcagccaaacatgatcaaagtgtataaccagttcatgggaggcgtagacagagctgatgaaaacattgataagtatcgggcatcaatccgtggaagaaa

SEQ ID NO: 189942 - DNA, 931 bp, Homo Sapiens
ttgggtccccaggatacctacccaggcccctgagtttgctcgcgggcccagccgacgccagaaggtcccaacagcagctgcccaaacagttttcgccaacaatgtcacccaccttgtcttccatcactcagggcgtccccctggataccagtaaactgtccactgaccagcggttacccccatacccatacagctccccaagtctggttctgcctacccagccccacaccccaaagtctctacagcagccagggctgccctctcagtcttgttcagtgcagtcctcaggtgggcagcccccaggcaggcagtctcattatgggacaccgtacccacctgggcccagtgggcatgggcaacagtcttaccaccggccaatgagtgacttcaacctggggaatctggagcagttcagcatggagagcccatcagccagcctggtgctggatccccctggcttttctgaagggcctggatttttagggggtgaggggccaatgggtggcccccaggatccccacaccttcaaccaccagaacttgacccactgttcccgccatggctcagggcctaacatcatcctcacaggggactcctctccaggtttctctaaggagattgcagcagccctggccggagtgcctggctttgaggtgtcagcagctggattggagctagggcttgggctaaaagatgagctgcgcatggagccactgggcctggaagggctaaacatgctgagtgacccctgtgccctgctgcctgatcctgctgtggaggagtcattccgcaatgaccggctccaatgagggcacctcatcaccatccctcttcttggccccatcccccaccaccattcctttactcccttccccctggcagatagagactctactctctgtccccagatcctctttctatcatgaatgaa

SEQ ID NO: 189943 - DNA, 1191 bp, Homo Sapiens
ttgggatagggtcatacttttaacctctattggtacaacatataaatgaaagtacacctacactaatagtctgtctcaacaatgtgtaaaggaacttaagtattggtttaatattaaccttgtatctcattttgaaggaatttaatattttaagcaaggatgttcaaaatcttacatataataagtaaaaagtaagactgaatgtctacgttcgaaacaaagtaatatgaaaatatttaaacagcattacaaaatcctagtttatactagactaccatttaaaaatcatgtttttatataaatgcccaaatttgagatgcattattcctattactaatgatgtaagtacgaggataaatccaagaaactttcaactctttgcctttcctggcctttactggatcccaaaagcatttaaggtacatgttccaaaaactttgaaaagctaaatgtttcccatgatcgctcattcttcttttatgattcatacgttattccttataaagtaagaactttgttttcctcctatcaaggcagctattttattaaatttttcacttagtctgagaaatagcagatagtctcatatttaggaaaactttccaaataaaataaatgttattctctgataaagagctaatacagaaatgttcaagttattttactttctggtaatgtcttcagtaaaatattttctttatctaaatattaacattctaagtctaccaaaaaaagttttaaactcaagcaggccaaaaccaatatgcttataagaaataatgaaaagttcatccatttctgataaagttctctatggcaaagtctttcaaatacgagataactgcaaaatattttccttttatactacagaaatgaaatctcatcaataaattagttcaagcataagatgaaaacagaatattctgtggtgccagtgcacactaccttcccacccatacacatccatgttcactgtaacaaactgaatattcacaataaagcttctgagtaacactttctgattactcatgataaactgacatggctaactgcaagaattaaatcttctatctgagagtaataatttatgatgactcagtggtgccagagtaaagtttctaaataacattcctctcacttgtaccccactaaaagtattagactacacattacattgaagttaaacacaaa

SEQ ID NO: 189944 - DNA, 1050 bp, Homo Sapiens
caatcacaggccagaaccagcgtgttttcatggctcagctgggtcattagtctcaaaacccaaacagtgacagaggctggtcgccagagctaagaaagctgttccggatgtgctgcagtgtcccacggtcgcgggagccgtggagctcacatgagcagtggggtgggtcggagggttttctacaaagtgttaggtccatccagcttgttgctttctttctagatcatcgccgcccaggaagaaatgctaaagaaagagcgagaactggaagaagcaaggaaaaaactggcccaaatccgccagcagcagtataagtttttacccaccgagctgagggaagatgagggctaaaggtgcgagcccagatggcgagccccaggggatggccctggctgaactggacagacagtgttcctgagaggctgggcacttagctggaaaccgcccacctccctcccgggtgagcctggagccctgcgtgcttgttctcacatctctgtcccgtcggcactggctgcatgatcgtgatgtcacacggtacaatgtcctacccacaactcctctgccgcctcccctcatgcctcaccgtgtctcaggagagaggggtgcacgtttcatggactgttaccaacaaagaaaagtcagtattatgttgttctcagacactttggcttttgttggtccttctcttaggcctgctcctggacctctttatgatattgtgatagggaaaaaaatcattgccgtcatagaatattcttcttcctctcaggagaagacggaagctggagttggacatggttcataaaagccagaaacacaaacccgtgtggactccgggagggtgactcaggtcctccttccatgtcttgagcactggctcacccagggggtgaaaaattcccgcccctgtttgcacgctttcttgcctccgtgtgtaagctccttgtacaaccaagacccatcttgtattttgtggcccagaaaactgaacgattattttgttcctccgtagtccaaaaggcagagttgcggaaagccgtccgggct

SEQ ID NO: 189945 - DNA, 1383 bp, Homo Sapiens
ttggctctcttgtttgagagagaatgaggaagcaaagagtgagaaagaataggggctgaagacgccactcccagatggctctttctatcctgctcttctgttgaaacacacgtgctgtgggcctcaggcgtttctgaagtgctctttcttggattggacaggagatcagcagcgtgcacatctgctgtggtctgaagtggtttgcaggtcagcctcctctccctagtgtagagcaagccagtgtccttcgaggaacccacccggctggccgggaagttttacagcaaggcgcctgccttgggataattccttggtgaaattcaccttccccccgcctctgtctggagccccatcctgtgttatctgtggtttttggacccctaatgtcagcttggctgtaggactccccgaggtttggtatgtgctagaacaatgggaggctgtgatttgctgtgtaagctcacatccagccttggaatctaacgggcattcacaacccgagttaccactttccactccctgcttaggattctgttccctgggctgaaactgaaataagctaattttttgggtcacggtggcagtaggggaacctaggagggtgtgagtggcatttgtcagggatttagcccatgacgtgtttcttgaaccctactttctggaagtggagttgactctggaagttttctagcaactgaacaaaagctcaggtttgtcctggtcatgcacatgccttaagccagttccgtcttccctagaccttggcatcctgtgcttctatttcttggaatacgttctcctctgacctgcctgtaccacgtgggtcctcttcaagtactgttttgaagctgggctcttttgtgtagctcccacccacctgtagggctagctcggcttaagggaactctccccattggcaaaccggacccggccgccgccaggactgtgtttccaaaggttccccgcccccaaccccagcatcagcctgtagctcccctgctgaggcagtgtggttatgttcccagcagtgggggtcagacgcccttcctcagaactttctagttgccctctacctgactcctgacttgtattccttttagcagtagccttcttccctcggggagccaaagagtgtggtgtgtggcgctatattgtggctgctatttcatctggtttcttttaatgtgaggaactcacatactgacttcagtgggactcggtgagccggggccgtctgtgtggtgggaccccctttagcgggactcagtgagctggggccgtctgtgtggtggagccagggcctctccctttagtggagccaggttgtcgggccccgaatgtcactggtggatctaagaagggctgagtggtctgacaccaaaa

SEQ ID NO: 189946 - DNA, 1333 bp, Homo Sapiens
ttggcattctaataagtacttgaaaatggcaaacaataccaaagaattagaagtttgtgagcaagctaataaactgggagcaattaacagcacattaagtaatcaaagcaaagaagctttcattgactgggcaagatatgatgattcacgggatcacttttgtgaacttgatgatgagagatctccagctgctcagtatgtagacctattgctgaacccagagcgttacactggctataaagggacctctgcatggagagtgtggaacagcatctatgaagagaactgtttcaagcctcgatctgtttatcgtcctttaaatcctctggcgcctagccgaggcgaagatgatggagaatcattctacacatggctagaaggtttgtgtctggagaaaagagtcttctataagcttatatcgggacttcatgctagcatcaatttacatctatgcgcaaattatcttttggaagaaacctggggtaagcccagttggggacctaatattaaagaattcaaacaccgctttgaccctgtggaaaccaagggagaaggtccaagaaggctcaagaatctttactttttatacttgattgagcttcgagctttgtcaaaggtggctccatattttgagcgctcaattgtcgatctttacactggaaatgcagaagaagatgctgacacaaaaactcttctactgaatatctttcaagatacaaagtcctttcccatgcactttgatgagaaatccatgtttgcaggtgacaaaaaaggggccaagtcactaaaggaggaattccgattacatttcaagaatatctcccgtataatggactgtgttggatgtgacaaatgcagattatggggaaaattacagactcagggtttaggaactgccctgaagatattattctctgaaaaagaaatccaaaagcttccagagaatagtccatctaaaggcttccaactcacccgacaggaaatagttgctcttttaaatgcttttggaaggctttctacaagtataagagacttacagaattttaaagtcttattacaacacagtaagtaataaaggcttttatgtgtctaactagagacataaagtgactgtggaaagccttttaattatggacatctcagaagcatatctgctcagatttgacatataaatatgctgataataatacaatagatatatgagattcgcaatgaaattcccccagttttttttcacctagagatatttataaatgaagtatatacttttcaacatgtaagttatactaatttgttgtttaatttcatatgttttcatgtaatgaaaattcta

SEQ ID NO: 189947 - DNA, 1224 bp, Homo Sapiens
ttggctctacagagatgtgatgcgagaaaccattaggaacctgaactgtataggaatgaaatgggaaaaccagaacattgatgatcagcaccaaaatctcaggagaaatccaaggtgtgatgtggtagagagatttggtaaaagtaaagatggtagtcagtgtggagaaaccttaagccagattcgaaatagtattgtaaacaagaacactcccgccagagtagatgcatgtggaagcagtgtgaatggagaagtcataatgggtcattcatccctgaattgctacatcagagttgatactggacacaaacaccgggagtgtcatgaatatgcagagaagtcatatacacataagcagtgtgggaaaggcttaagttatcgccactcctttcaaacatgtgaaaggcctcacactggaaagaaaccctatgattgtaaggaatgtggaaaaaccttcagttctcctggaaaccttcgaagacatatggtagtaaaaggtggagatggaccttataaatgtgaattgtgtgggaaagccttttttttggcccagtttattacgtatgcatgaaagaactcacactggagagaaaccatatgaatgtaagcagtgttctaaagccttccctgtttacagttcctatctaagacatgaaaaaatacacactggggagaaaccgtatgaatgtaagcagtgttctaaagccttccctgattacagttcatatctaagacatgaaagaactcacactggagagaaaccctacaaatgtaaacaatgtgggaaagccttcagtgtttccggttcccttcgagtacatgaaagaattcacactggagagaaaccctatacatgtaaacagtgtgggaaagcgttttgtcatcttggaagctttcaaagacacatgataatgcacagtggagatggacctcataaatgtaagatatgtgggaaaggctttgattttcctggttcagcacgaattcatgaaggaactcacactctagagaaaccctatgaatgtaagcaatgtgggaaattgttatctcatcgctcaagctttcgaagacacatgatgggcacacactggagatggccctcataaatgcacagtatgtgggaaagcctttgattctcctagtgtatttcaagacatgaaaggactcacactggagagaaaccctatgaatgcaagcaatgtgggaaagccttccgtacttcca

SEQ ID NO: 189948 - DNA, 1118 bp, Homo Sapiens
taatagccaactttgtacaaaaaagttgggaagttcttgactggaagagagcatctgtggttgtaccagaagaaaagatgtcagatgtgtacagtattttgcagagcatcccccaaagacagattgaagaaatgcagagacaggcccggtggttctgggaagcgtacttccagtcaattaaagccattgccctggccaccctgcagattatcaatgaccggatctatccatatgctgccatctcctatgaagaatggaatgaccctcctgctgtgaagtggggcagcgtgagcaatccactcttcctcccgctgatcccaccacagtctcaagggttcaccgccatagtcctcacctacgaccgagtagagagcctcttccgggtcatcactgaagtgtccaaggtgcccagtctatccaaactacttgtcgtctggaataatcagaataaaaaccctccagaagattctctctggcccaaaatccgggttccattaaaagttgtgaggactgctgaaaacaagttaagtaaccgtttcttcccttatgatgaaatcgagacagaagctgttctggccattgatgatgatatcattatgctgacctctgacgagctgcaatttggttatgaggtctggcgggaatttcctgaccggttggtgggttacccgggtcgtctgcatctctgggaccatgagatgaataagtggaagtatgagtctgagtggacgaatgaagtgtccatggtgctcactggggcagctttttatcacaagtattttaattacctgtatacctacaaaatgcctggggatatcaagaactgggtagatgctcatatgaactgtgaagatattgccatgaacttcctggtggccaacgtcacgggaaaagcagttatcaaggtaaccccacgaaagaaattcaagtgtcctgagtgcacagccatagatgggctttcactagaccaaacacacatggtggagaggtcagagtgcatcaacaagtttgcttcagtcttcgggaccatgcctctcaaggtggtggaacaccgagctgacctgtcctgtacaagatgacttttcctgagaagctgaagagcttccccaacatttggc

SEQ ID NO: 189949 - DNA, 1189 bp, Homo Sapiens
ttgggtacctatcacacacagggggaaaaatgctcttttgggtgctaggcctcctaatcctctgtggttttctgtggactcgtaaaggaaaactaaagattgaagacatcactgataagtacatttttatcactggatgtgactcgggctttggaaacttggcagccagaacttttgataaaaagggatttcatgtaatcgctgcctgtctgactgaatcaggatcaacagctttaaaggcagaaacctcagagagacttcgtactgtgcttctggatgtgaccgacccagagaatgtcaagaggactgcccagtgggtgaagaaccaagttggggagaaaggtctctggggtctgatcaataatgctggtgttcccggcgtgctggctcccactgactggctgacactagaggactacagagaacctattgaagtgaacctgtttggactcatcagtgtgacactaaatatgcttcctttggtcaagaaagctcaagggagagttattaatgtctccagtgttggaggtcgccttgcaatcgttggagggggctatactccatccaaatatgcagtggaaggtttcaatgacagcttaagacgggacatgaaagcttttggtgtgcacgtctcatgcattgaaccaggattgttcaaaacaaacttggcagatccagtaaaggtaattgaaaaaaaactcgccatttgggagcagctgtctccagacatcaaacaacaatatggagaaggttacattgaaaaaagtctagacaaactgaaaggcaataaatcctatgtgaacatggacctctctccggtggtagagtgcatggaccacgctctaacaagtctcttccctaagactcattatgccgctggaaaagatgccaaaattttctggatacctctgtctcacatgccagcagctttgcaagactttttattgttgaaacagaaagcagagctggctaatcccaaggcagtgtgactcagctaaccacaaatgtctcctccaggctatgaaattggccgatttcaagaacacatctccttttcaaccccattccttatctgctccaacctggactcatttagatcgtgcttatttgggattgcaaaagggagtcccaccatcgctgggtggtatcccagggtccctgctcaagttttctttgaaaaagaagggct

SEQ ID NO: 189950 - DNA, 1406 bp, Homo Sapiens
ttggctattctggagaatatagagtttttggaggatacggatatgaaatctctagagaacaaaagtttggaaatgaccttcatccctaccattgaagatactggaaaagctcttgtttgtcaggctaagttacatattgatgacatggaattcgaacccaaacaaaggcagagtacgcaaacactttatgtcaatgttgcccccagagatacaaccgtcttggtcagcccttcctccatcctggaggaaggcagttctgtgaatatgacatgcttgagccagggctttcctgctccgaaaatcctgtggagcaggcagctccctaacggggagctacagcctctttctgagaatgcaactctcaccttaatttctacaaaaatggaagattctggggtttatttatgtgaaggaattaaccaggctggaagaagcagaaaggaagtggaattaattatccaagttactccaaaagacataaaacttacagcttttccttctgagagtgtcaaagaaggagacactgtcatcatctcttgtacatgtggaaatgttccagaaacatggataatcctgaagaaaaaagcggagacaggagacacagtactaaaatctatagatggcgcctataccatccgaaaggcccagttgaaggatgcgggagtatatgaatgtgaatctaaaaacaaagttggctcacaattaagaagtttaacacttgatgttcaaggaagagaaaacaacaaagactatttttctcctgagcttctcgtgctctattttgcatcctccttaataatacctgccattggaatgataatttactttgcaagaaaagccaacatgaaggggtcatatagtcttgtagaagcacagaaatcaaaagtgtagctaatgcttgatatgttcaactggagacactatttatctgtgcaaatccttgatactgctcatcattccttgagaaaaacaatgagctgagaggcagacttccctgaatgtattgaacttggaaagaaatgcccatctatgtcccttgctgtgagcaagaagtcaaagtaaaacttgctgcctgaagaacagtaactgccatcaagatgagagaactggaggagttccttgatctgtatatacaataacataatttgtacatatgtaaaataaaattatgccatagcaagattgcttaaaatagcaacactctatatttagattgttaaaataactagtgttgcttggactattataatttaatgcatgttaggaaaatttcacattaatatttgctgacagctgacctttgtcatctttcttctattttattccctttcacaaaattttattcctatatagtttattgacaataatttcagttttgtaaagatgccgggttttatatttttata

SEQ ID NO: 189951 - DNA, 1090 bp, Homo Sapiens
ttggctacatccccagctccgagacgcccccagccccatcttcccgggaagccagccgcccaccagaggagcccagcgccccgagccccacgttgccagcgcagttcaagcagcgggcgcccatgtacaacagcggcctgagccctgccacacccacgcctgcggcgcccacctcgcctctgacacccaccacacctccggctgtcgcccctaccactcagacacccccggttgccatggtggccccgcagacccaggcccctgctcagcagcagcctaagaagaacctgtccctcacgagagagcagatgttcgctgcccaggagatgttcaagacggccaacaaagtcacgcggcccgagaaggccctcatcctgggcttcatggccggctcccgagagaacccgtgccaggagcagggggacgtgatccagatcaagctgagcgagcacacggaggacctgcccaaggcggacggccagggtagcacaaccatgctggtggacacagtgtttggatgaactatgccacgggccagtggacgcgcttcaagaagtacaagcccatgaccaatgtgtcctagaaccacctgcctcacagctggccgtcacttgtgggggtccacgggacgatggctttgccagcttaaagtaaccggatggcggacacctggcccccgaggtcccccggccgccgccctgctgctgacccagcctgttttaagttctggatgcatttctctggggtatttggggcttatttttaaaattttaatatgggttcttttttgtgtgatttaagacactttttggactcaacgttacatttttgaatgtagtaagtaaattaaccaaaaaagttacaacttcctaattttagtgacagctctgcctgtttgttagactcttactttttaaaatcttttctattttccctcgctggggcagtgccctcctacccccagggttgaggggaccaaggtggcacggtggtactgggggtgcggcagggacacccgaccacaccagagcgtgggagacggtgggccttgtcccctgcctgtgcctgcctgggagttttgtattcatct

SEQ ID NO: 189952 - DNA, 1749 bp, Homo Sapiens
ttggagtccttgagtgtcagttggtgaggaccatggagtcctgccagctcaacctgtcatttacagactaagaaagggaagtacacacctggcttgtggccagtctcctgccccctctctgggctttcctcactgttctctcccttgaatctcatttgtaggaatcaagagattcctatacatgggacttttagatgtacattggcacttggattagattccaaaagacaaaagtgttgggtgcttctagcttgaattcagtccctaaatacatgaggctgggtgagcagatgaaaccggtagccactgtgctgatgcatgtgactccattcagttggggattttggttccatgtggatccatactaagtattcttcagtcagtggattttagcaaggggaggtaggagtggaagagaggtgtgaagaaacctctccgaacaaatgaaccagcagtaagtttctaaaaatcagaatctagatagaagttctgcaatatgaaatgagcacattctttgataaggcgtatctattcatgcttttgtaccactgttttgtacctgactccctgaccgatttgtattttttatatacaactagaaggaagtcacaagattgccttctacagtgtgccatttccaaatggatctgttgttggaggaaactggttgctagtcaatgttctatatttaatgaatgtgtgataaatcatcctgtaatcagtatggagtaacctgtttttgtagtttggatgaatatgtcctgagaaatttccatccactttggttcagcggacatcaaggtagtaataataatttttcctccacaggtccctccactcatatggcctctccctccccagctagtggaggggaagcagtctggacttagaaaggaaataggtggtctgtcataggggctttcattagagttaaacttcatagagtcaactgtttcatcatcatagtgagcccagagagccactgcccagcagcatgctcacaccacctaccctagtgtaggtaataggtctacgctaggaccccgtgctgggctctcagcccatcatgagattttggtggatttaatggcaggtaggaacttatttatagtggattgataattgctttataattccttggtaatgacagctcagggaaggtttcacaaggtcatgatcaggagacttgaattgttactggatgtaggaattgtttcactgctcttaacttgctcaaactggggcaggttccaggaacttgaactaaaaatatctatttaagcctctctctctttctctcctccccaacttttttctgaaagccttgatttctgtagacagaactatggtttttggcatgttgggtcaagacgtgtttctataggaaatgcttgcacgtggcactggcttggtgagtcaagcttcctgagcttcagaccgtttgtcctgtcatctgtcctgcccaacactgtatggtttttctctagcacggcttcaattttgttctctgcacaaagcctttggtggttctgccctctgccctccagctttacccaccagagtaaggaatcttttctttttagaaatcaagaatttggcttcacagatggcttctcacagatgccctcctgccagccaaaccggacttgttcttcctgcctctgtgccttctctcattctccttctctccctccataccccacttttgaggttctgtgggtaccatctttgtggactcttgtctttttt

SEQ ID NO: 189953 - DNA, 2002 bp, Homo Sapiens
  misc_feature (1137)..(1145): n is a, c, g, or t
ttggctgggaatggcagtgtagagcctgctcctctccctgtcctcaccccacattatcttggctcctcagaagatctcccaaaggctgtggtgttcctggagcctcaatggtacagggtgctcgagaaggacagtgtgactctgaagtgccagggagcctactcccctgaggacaattccacacagtggtttcacaatgagagcctcatctcaagccaggcctcgagctacttcattgacgctgccacagtcgacgacagtggagagtacaggtgccagacaaacctctccaccctcagtgacccggtgcagctagaagtccatatcggctggctgttgctccaggcccctcggtgggtgttcaaggaggaagaccctattcacctgaggtgtcacagctggaagaacactgctctgcataaggtcacatatttacagaatggcaaaggcaggaagtattttcatcataattctgacttctacattccaaaagccacactcaaagacagcggctcctacttctgcagggggctttttgggagtaaaaatgtgtcttcagagactgtgaacatcaccatcactcaaggtttggcagtgtcaaccatctcatcattctttccacctgggtaccaagtctctttctgcttggtgatggtactcctttttgcagtggacacaggactatatttctctgtgaagacaaacattcgaagctcaacaagagactggaaggaccataaatttaaatggagaaaggaccctcaagacaaatgacccccatcccatgggggtaataagagcagtagcagcagcatctctgaacatttctctggatttgcaaccccatcatcctcaggcctctctacaagcagcaggaaacatagaactcagagccagatcccttatccaactctcgacttttccttggtctccagtggaagggaaaagcccatgatcttcaagcagggaagccccagtgagtagctgcattcctagaaattgaagtttcagagctacacaaacactttttctgtcccaaccgttccctcacagcaaagcaacaatacaggctagggatggtaatcctttaaacatacaaaaattgctcgtgttataaattacccagtttagaggggnnnnnnnnncaattattcctaaataaatggataagtagaattaatggttgaggcaggaccatacagagtgtgggaactgctggggatctagggaattcagtgggaccaatgaaagcatggctgagaaatagcaggtagtccaggatagtctaagggaggtgttcccatctgagcccagagataagggtgtcttcctagaacattagccgtagtggaattaacaggaaatcatgagggtgacgtagaattgagtcttccaggggactctatcagaactggaccatctccaagtatataacgatgagtcctcttaatgctaggagtagaaaatggtcctaggaaggggactgaggattgcggtggggggtggggtggaaaagaaagtacagaacaaaccctgtgtcactgtcccaagttgctaagtgaacagaactatctcagcatcagaatgagaaagcctgagaagaaagaaccaaccacaagcacacaggaaggaaagcgcaggaggtgaaaatgctttcttggccagggtagtaagaattagaggttaatgcagggactgtaaaaccaccttttctgcttcaatatctaattcctgtgtagctttgttcattgcatttattaaacaaatgttgtataaccaatactaaatgtactactgagcttcgctgagttaagttatgaaactttcaaatccttcatcatgtcagttccaatgaggtggggatggagaagacaattgttgcttatgaaagaaagctttagctgtctctgttttgtaagctttaagcgcaacttttcttgggttccaataaagcatttttacaagatccttgcatgctactcctagataaagatggggaaaa

SEQ ID NO: 189954 - DNA, 1021 bp, Homo Sapiens
ttggctagaaacagggttgaagttcccagattccctgagaggagaatgtgtataggagggtttggctgagtccttcagcgttaagtggaggaaagcttggggaagccccaatagctggacagacctcggcctcccctcgaagacacctcaattcacagactctcagcccacacaatgccccagtgtccccagctccgctggagcagctgcagggcacttggatcacaacttctgcaccctctgtccagagtctagggcagtcctccactggcccagcactccagtttcctttccctgcctcttgtccaatggagtgggaggccaggtgagtggagcagaggtcctgaagcccttgacccctgggggcctgggtagtgtaggatctcgctgggctgggtcctggattccagggctattccctggaggacagtctcagttatgggataaggccccctgggggtctccatttctttccaacagtttcatgttcactactggactcttacgggctcagtatctctcccttagccatgagctggctcaggcatcccttcccttccctggagctgccctgcctttctcaagtatttatttatttattgcatggttcctgggaacatgtggcacaagtaatgggatgaggaggaattgggggtgggggtcttctacctaggactcttccctggagtcatgggctgcctgggacccaggacccatgagggggctgagaggtttctacactcgaggagcaggggtccagagaggcaggctggggaggcaagggacccatcctaggcccgctttcttgccgagccaagcagcttagctggggctgtgcagccaggggcttacccaggccagtggaggtgccacagccctggggagccagacaggctttggtatcgtatcgcctctgtgtccttttaagagaggagagttcagtaccccgtgctttctttacactggagaggaactaaaaggatctctgtgtctatggagaattgtcaataaaaaaggcctc

SEQ ID NO: 189955 - DNA, 1565 bp, Homo Sapiens
ttgggtaaactaaatccacgtaagatcatccgcatgtgggcagaaaaagaaatgcacaatctcgcaagaatgcagagagctggaattccttgtccaacagttgtactactgaagaaacacattttagttatgtcttttattggccatgatcaagttccagcccctaaattaaaagaagtaaagctcaatagtgaagaaatgaaagaagcctactatcaaactcttcatttgatgcggcagttatatcatgaatgtacgcttgtccatgctgacctcagtgagtataacatgctgtggcatgctggaaaggtctggttgatcgatgtcagtcagtcagtagaacctacccaccctcacggcctggagttcttgttccgggactgcaggaatgtctcgcagtttttccagaaaggaggagtcaaggaagcccttagtgaacgagaactcttcaatgctgtttcaggcttaaacatcacagcagataatgaagctgattttttagctgagatagaagctttggagaaaatgaatgaagatcacgttcagaagaatggaaggaaagctgcttcatttttgaaagatgatggagacccaccactactatatgatgaatagcactaatacccactgcttcagtgttaacacagcagtgattgtcagctgccaatagcaaatgaagttatgggtgacttgaaataccaaaacctgaggagtgggcaatggtgcttctgtgcttttcccccttgtaacccatgtgccagatgtgtggaatttttagctcagcattgagagaataaaatgtcactacctctcatcttatgaacaggataatataattctttaacagctataggttatctggctgaagtagacctaattttatgtgacttgtggtgtaaaatgtcttgatgataatttttaaaacttgggtaacacttccaaatatgggaggaaaggacagatgtgtttacaagggaggattttacaacatacttgctttattcacctccctgttttgtgttgcgtctttccttgaatattttattggcccagagttagcctttctcaattatgtttccagactgtggccgtgattctaaaggaaaatgtgtgctctttagtgggtagaacaaatggaaatttggtttcagaatggctgacagaaatcgacataagtcatgtaatttttgttgatatatcatgaaaatgaacagaattctttttccatacttatatctaagaaaaggcatcataggtttctgaaagagataactatataacagctttttaactatccagtcaactttcagcttttctacatttaggtaaaatggttaggatataactcatggtgtggctaatctacatttatcaataaaatgtaaattatctgaaaggacagaatataagatttaaccatgtttgacgtattttaatttagttaatgaaacaaaattcagtttatatttcactagaactgtgtacttgattgattttcagagaaatatcacaaattataaatattaaatctaaggatgaaaggtatatataaaacaatttggggg

SEQ ID NO: 189956 - DNA, 1511 bp, Homo Sapiens
ttggatcatggccgtgaagcggatccgggccaccgtgaactcacaggagcagaagcggctgctcatggacctggacatcaacatgcgcacggtcgactgtttctacactgtcaccttctacggggcactattcagagagggagacgtgtggatctgcatggagctcatggacacatccttggacaagttctaccggaaggtgctggataaaaacatgacaattccagaggacatccttggggagattgctgtgtctatcgtgcgggccctggagcatctgcacagcaagctgtcggtgatccacagagatgtgaagccctccaatgtccttatcaacaaggagggccatgtgaagatgtgtgactttggcatcagtggctacttggtggactctgtggccaagacgatggatgccggctgcaagccctacatggcccctgagaggatcaacccagagctgaaccagaagggctacaatgtcaagtccgacgtctggagcctgggcatcaccatgattgagatggccatcctgcggttcccttacgagtcctgggggaccccgttccagcagctgaagcaggtggtggaggagccgtccccccagctcccagccgaccgtttctcccccgagtttgtggacttcactgctcagtgcctgaggaagaaccccgcagagcgtatgagctacctggagctgatggagcaccccttcttcaccttgcacaaaaccaagaagacggacattgctgccttcgtgaaggagatcctgggagaagactcataggggctgggcctcggaccccactccggccctccagagccccacagccccatctgcgggggcagtgctcacccacaccataagctactgccatcctggcccagggcatctgggaggaaccgagggggctgctcccacctggctctgtggcgagccatttgtcccaagtgccaaagaagcagaccattggggctcccagccaggcccttgtcggccccaccagtgcctctccctgctgctcctaggacccgtctccagctgctgagatcctggactgagggggcctggatgccccctgtggatgctgctgcccctgcacagcaggctgccagtgcctgggtggatgggccaccgccttgcccagcctggatgccatccaagttgtatatttttttaatctctcgactgaatggactttgcacactttggcccagggtggccacacctctatcccggctttggtgcggggtacacaagaggggatgagttgtgtgaataccccaagactcccatgagggagatgccatgagccgcccaaaggccttcccctggcactggcaaacagggcctctgcggagcacactggctcacccaatcctgcacgccaccgttatcggtgtcattcacctttcgtgtttttttaatttatcctctgttgacttttttcttttgctttatgtggttgggcttgtatttcttgcatggtttggagctgatcccttcctccccc

SEQ ID NO: 189957 - DNA, 1470 bp, Homo Sapiens
ttggggccaagcgaactgggcggtctgaagtagagatggaagggccagaggaatgcctgggacggaggcgcagttctcggatcatggaggagaccagtggcatggaagaagaggaagaagaggagtctatagcagctgtccctggccgcaggggtcgaagagatggagaggttgatgccacagcatctagcatcccagagctagagcgccagatagaaaaactcagcaagcgtcagcttttctttcgcaaaaagctgcttcactcatcccagatgcttcgggcggtctccctgggtcaggaccgctacagacgtcgctactgggtattgccgtatttggctggtatctttgtagaaggaacagaggggaacttagttcctgaggaggtgataaagaaggaaactgactccttaaaagtggcagcccatgcgtcactcaaccctgccctcttctctatgaagatggagttagctggctccaacaccactgccagttctcctgcccgggcccgaggccgacctcgaaaaactaagcccgggtctatgcaacctaggcatcttaagtcccctgtcaggggtcaggattcagaacagccccaggcccagcttcagcctgaggctcagcttcatgctcctgcccagccccagcctcagcttcagcttcagcttcagtcccataaggggttcctggagcaagaaggctcccctttgtcactgggtcagagccagcatgacctcagccagtcagccttcctgtcttggctgagccagactcagagccatagctccctgttgagcagctcagtcctcacacctgatagcagtccgggaaaactagacccagctccatcacaacccccggaggagccagagcctgatgaggcagaatccagccctgatcctcaagcactctggtttaacatctcagcccagatgccctgcaatgctgcccccacaccgccccctgcagtttctgaggaccaacccactccctcccctcagcagcttgcctcctccaagccaatgaatagacctagtgctgccaacccttgttctccagtgcagttctcttccacgcccttggctgggttggcccctaagaggcgagcaggagaccctggagaaatgccacagagtcccacagggctgggacagcccaaacggagagggagacctcccagtaagttcttcaaacagatggaacagcgttacctaacccagctgacagcccagcctgtcccacctgagatgtgctcaggctggtggtggatacgagatcctgagatgttggatgccatgctcaaggccctacacccccgaggtatccgggagaggcacttcacaaacaccttaacaagcacagggacttcttgcaggaagtctgcctgcggccctcagctgaccccatctttgagcccaggcaactacctgcctttcaggaagggattatgagctggtcccccaaagagaa

SEQ ID NO: 189958 - DNA, 1000 bp, Homo Sapiens
ttggcaaaagagagaggagttggagacgccataaacaacggcagagaccattcgattcagatcaaaattggaaaactccaaaagcgtatgtggataaatgtggacgttcaaaacactataattgatggtgaagtatttgatttcagcacatattatctgggaggaattccaattgcaatcagggaaagatttaacatttctacgcctgctttccgaggctgcatgaaaaatttgaagaaaaccagtggtgtcgttagattgaatgatactgtgggagtaaccaaaaagtgctcggaagactggaagcttgtgcgatctgcctcattctccagaggaggacaattgagtttcactgatttgggcttaccacctactgaccacctccaggcctcatttggatttcagacctttcaacccagtggcatattattagatcatcagacatggacaaggaacctgcaggtcactctggaagatggttacattgaattgagcaccagcgatagcggcggcccaatttttaaatctccacagacgtatatggatggtttactgcattatgtatctgtaataagcgacaactctggactacggcttctcatcgatgaccagcttctgagaaatagcaaaaggctaaaacacatttcaagttcccggcagtctctgcgtctgggcgggagcaattttgagggttgtattagcaatgtttttgtccagaggttatcactgagtcctgaagtcctagatttgaccagtaactctctcaagagagatgtgtccctgggaggctgcagtttaaacaaaccaccttttctaatgttgcttaaaggttctaccaggtttaacaagaccaagacttttcgtatcaaccagctgttgcagacacaccagtgggcctccccaaagagcgtgaagtgtggcaagatgcttgctcaccactttccaagacccaggccaatcatggaggccctccagtttggggacattcccaccagccact

SEQ ID NO: 189959 - DNA, 1046 bp, Homo Sapiens
gggtcttaaacactgcaatgagttccgcatgtaccaatcaacacctggaaacgatcgccgttctttacgcactttcctttctgagagttcactcctttttggactgaggaccctgacttctgctggagtcttccttctgtcctgggcgttacactctctgagctagaatggatgtaagaaatgttctgccccgaaggggaggcttttgctgtcttggcctctaacttagcatccctgggaggctgtccagaggaatgagctggtgtctcttgggaactctttggtttggccagaggcttatgagttgggttagcaaagggtgtgaacctgatctcaggtgaagcctgagcatgaccttgacctaactcataactcaagagctgttgtttagggacctctggaggactttgtgccaagggaggagagattccagtgagagccatttgactacgtggactgtggcctgggcaggctgtgggcatttcttctggctttttccatattccctttgcctgaaaactgtgggaatcatgaggtctttggtcagcattagatgagctactgagattctgttgcttgaaaatgacaccatggctcactggcttacaagactcccttgggaaattttgggatgggccttgcttggcctggaatgggttgccagcaatggaggtgcccgagctagtcctctgatgctgttctgccaataacttctcagctctgcgggccagagccttttgtcgattctcttcaatctttttcctctgctcctctgtaagaggcaaggacattttcacagagaaatgcttatgcaggaatgtcaacctttaattggaaagttggcaaaagcatggcgtgacacttgctaacatagtctttttccaacccagggaggcctagaacgcgagccacattcgcccccggccctgaccccaggcgcgactgcagagcctcccgagcgggaccggtcttccgagtggacggttaggccacgggtattcaagcgctgcgagttcgccagccttattgtagcggccaggccccaa

SEQ ID NO: 189960 - DNA, 1612 bp, Homo Sapiens
ttggcttgaaaccaattaagcagcttggtattcataaatattgggattggatggcctccatccagaaatcactatgggtgagcatacctgtctcagctgtttggccaatgtgcataacctactcggatccccacctgacactaaccagagtcagcacaggccccgaggagcccgaagtctgctgctgtgcagcatggaattcctttaaaaaggtgcactacagttttagcggggagggggataggaagacgcagagcaaatgagctccggagtccctgcaggtgaataaacacacagatctgcatctgatagaactttgatggattttcaaaaagccgttgacaaggctctgctatacagtctataaaaattgttattatgggattggaagaaacacgtggtcatgaatagaaaaaaaacaaacccaaaggtaggaaggtcaaggtcatttcttagatggagaagttgtgaaagatgtccttggagatgagttttaggaccagcattactaaggcaggtgggcagacagtgacctctctaggtgtgtccacagagtttttcaggagagaaaactgcctgacctttgggactaagctgcggaatcttcttactaagcttgaagagtggagaggcgagaggtgagctactttgtgagccaaagcttatgtgacatggttggggaaacagtccaaactgttctgagaaggtgaactgttacgacccaggacaattagaaaaattcacccaccatgccgcacattactgggtaaaagcagggcagcagggaacaaaactccagactcttgggccgtccccatttgcaacagcacacatagtttctggtatatttgttgggaaagataaaactctagcagttgttgaggggaggatgtataaaatggtcatggggataaaaggatctctgagaccacagaggctcagactcactgttaagaatagaaaactgggtatgcgtttcatgtagccagcagaactgaagtgtgctgtgacaagccaatgtgaatttctaccaaatagtagagcataccacttgaagaaggaaagaaccgaagagcaaacaaaagttctgcgtaatgagactcaccttttctcgctgaaagcactaagaggtgggaggaggcctgcacaggctggaggagggtttgggcagagcgaagacccggccaggaccttggtgtgatggggtgccgcccacctcctgcggatactcttggagagttgttcccccagggggctctgccccacctggagaaggaagctgcctggtgtggagtgactcaaatcagtatacctatctgctgcaccttcactctccagggtacatgctttaaaaccgacccgcaacaagtattggaaaaatgtatccagtctgaagatgtttgtgtatctgtttacatccagagttctgtgacacatgccccccagattgctgcaaagatcccaaggcattgattgcacttgattaagcttttgtctgtaatgaaagaacaagtttaggtcgaggactggcccctagctgctgctgtgacccttgtcccatgtggcttgtttgcctgtccgggactcttcgatgtgcccaggggagcgtgtt

SEQ ID NO: 189961 - DNA, 1400 bp, Homo Sapiens
  misc_feature (976)..(984): n is a, c, g, or t
gtacaaaaaagttggcaggtgtctttatttccactgcacgctggtgctgggagcgcctgccttctcttgccttgaaagcctcctctttggacctagccaccgctgccctcacggtaatgttggactcggtgacacacagcaccttcctgcctaatgcatccttctgcgatcccctgatgtcgtggactgatctgttcagcaatgaagagtactaccctgcctttgagcatcagacagcctgtgactcatactggacatcagtccaccctgaatactggactaagcgccatgtgtgggagtggctccagttctgctgcgaccagtacaagttggacaccaattgcatctccttctgcaacttcaacatcagtggcctgcagctgtgcagcatgacacaggaggagttcgtcgaggcagctggcctctgcggcgagtacctgtacttcatcctccagaacatccgcacacaaggttactccttttttaatgacgctgaagaaagcaaggccaccatcaaagactatgctgattccaactgcttgaaaacaagtggcatcaaaagtcaagactgtcacagtcatagtagaacaagcctccaaagttctcatctatgggaatttgtacgagacctgcttctatctcctgaagaaaactgtggcattctggaatgggaagatagggaacaaggaatttttcgggtggttaaatcggaagccctggcaaagatgtggggacaaaggaagaaaaatgacagaatgacgtatgaaaagttgagcagagccctgagatactactataaaacaggaattttggagcgggttgaccgaaggttagtgtacaaatttggaaaaaatgcacacgggtggcaggaagacaagctatgatctgctccaggcatcaagctcattttatggatttctgtcttttaaaacaatcagattgcaatagacattcgaaaggcttcattttcttctcnnnnnnnnnaacctgcaaacatgctgataaaatttctccacatctcagcttacatttggattcagagttgttgtctacggagggtgagagcagaaactcttaagaaatcctttcttctccctaaggggatgaggggatgatcttttgtggtgtcttgatcaaactttattttcctagagttgtggaatgacaacagcccatgccattgatgctgatcagagaaaaactattcaattctgccattagagacacatccaatgctcccatcccaaaggttcaaaagttttcaaataactgtggcagctcaccaaaggtgggggaaagcatgattagtttgcaggttatggtaggagagggtgagatataagacatacatactttagattttaaattattaaagtcaaaaatccatagaaaagtatccc

SEQ ID NO: 189962 - DNA, 720 bp, Homo Sapiens
ggtggtcgctgcccgtggtgctccgtcgcccccgccacctcacgtcctcccgtgcgtcgggagcgtctcggctacaacatgttgggcatgatcaagaactcgctgttcggaaacgtagagacgtggccttggcaggtcctaagcaaaggggacaaggaagaagttgcctatgaagaaagggcctgtgaaggcggcaaatttgccacagtagaaatgacagataagcctgtggatgaggctctacgggaagcaatgcccaaggtcgcaaagtatgcggggggcaccaatgacaagggaattgggatggggatgacagtccctatttcctttgctgtgttccccaatgaagatggctctctgcagaagaaattaaaagtctggttccggattccaaaccaatttcaaagcgacccaccagctcccagtgacaaaagcgttaagattgaggaacgggaaggcatcactgtctattccatgcagtttggtggttatgccaaggaagcagactacgtagcacaagccacccgtctgcttgctgccctggagggcacagccacctaccggggggacatctacttctgcacgggttatgaccctcccatgaagccctacggacggcgcaatgagatctggctgttgaagacatgagtgacccactgaaccaagaacttactggaagtgtgcctctgtgtctccttcctcgggggtaaggaggggaca

SEQ ID NO: 189963 - DNA, 1155 bp, Homo Sapiens
  misc_feature (259)..(273): n is a, c, g, or t
  misc_feature (1003)..(1013): n is a, c, g, or t
gagcaatgctttttctataaaagaacaactttgtacaaaaaagttggattctcttgactttggaaatatggaagtctctcctttaacctattcttgttcccattcccagtctcatttgaaatcattccttttattgttagtgtgtgtatttttgttggtgtgcttttaatgcatccaagtatgcatcattttggataaaaaatacatccaaattaagatgttttaacacataggacaaacttgtgcactttgtatgccnnnnnnnnnnnnnnnttgggttttccttcatgggatttctagaaacactgcctacacttatgaaaactacatagtattcacctgtgacaggtagagtttatcactattaattttatgaggctatttattactttccagtgcatccacttagaacaagctaagagtaaggctgctaactttaattccttgcctgattttattgtacagtgtgcacaagcacaatggtatgcttgtatatagaaactaaaaatactatgaagtacataagttccctatggcttatggagagttatttattaattaactttatggtagggctagtatgaatacctttttaacaattgtgtgctattacaacaatgaagattcaaatgactccgctttgaaggatgttttctctatatggtaaaatatatatgaagaagtcttgattacgtgaagatcacttgactcagaatacttcaatgtattttgttcacattaccactaagcatattatcagtaaactattaactgactgcacattatgtaatacgttgtactttttgttgaattcaccgaagttcttccatttatatgctatttttaatggcattccggctttaacattctgtgagtcttacaaatttgactcttgaatggcaaaataatgttagtatgtagaaaggtaactttcatttataatataagtggtgcaggggttcaacattttaagtaaaaatatttttacacactacctctctcnnnnnnnnnnnaaagttttaacatcagaacttttgggggaaaaactacttcaaggcttgactttttgtacaaattttaactgtaaaatacagatttatccttgtacgcattcatggaaaatggaaatcaagctggctattgcctttttatttt

SEQ ID NO: 189964 - DNA, 1298 bp, Homo Sapiens
aaattttttaaataagtttaattataaagtgaaggaccagttggaccacggacccctagaaactcagccaaggagacctgactttatctgagacaggaaggcagtggttaaaagaattaaaaaaggacagtggtgcttgacagagcaggactgaagttttcattcctctacctgctggggccttggtcaagtcctaaaagctttccaggtctgtaactggttttgtctgtaaaatggggaaaaggttaccttttctgccacatgaagtagctggctggtgaaatgatgtcatactacgatgtgtttcattaactgttggagattatcacattaaattgagcagatttggatcttttacatttgatgctcaagtttgattctgtaccagatctgggtttggggtgatggcttgtcgggggtgggaggggaaggtgggcagagactgatgtataatggacaggtgttccttgagtgacagacttacaaagggagtgtttaattgaaatctagcatcttgtctctctgctatcagcattttggctgggtggaaaaagctctcctccacagagagccctcccatgtctgctggtttcagttccccacccaactgactgaagtcttgaccttgataccacctgcctgggcgttctacttggctgcaagggctcttcagaaagcacctagttccttttggctttcatctgcagtgtaggtctccatagctagtgacacacaaagccttatgagagtattccttccctctagggcccaaagaggctgctaaccagcaggaatgtcctgaaccaaaaggagtggtgaccattctctagacagaataaatgtctggtccctaatgggacagataactagggtttgagttcaggcttgacacaggagcaatgggcagtgaggtggacagcccagaccctgaaaggacgtgtggagacagcagcagtcctgtggtgcagttactgcctgtgtggccagcttcacaggcagcagataatttgtggaaataaacattattttctttttttgttccctgtaggctacttgatcctggatagtttctctttaaacctttgtctttccctattttgtttagtagtgatgaaagatgggtttaaaatatacagaaatgggagaaaattaattagagaaaatgtgaggattttataattgataacatgttcttaattttacttgcacaagcagtgttcacagccttattctgaagtgaccacttttcttctctttgagcactacctggcagcaccatctaaacctgtatcatctgc

SEQ ID NO: 189965 - DNA, 992 bp, Homo Sapiens
ttggccttcagagcccgcttgtctccccagaccctcctgcaagaggtggacccagcccctccccacccacagcccccaaagccctggccacccctgctcctgacacccttcccgtggagcctggggctccctccacagccacagcttcggacatctcacctggggctagtccttccctgctcagcccctgggggccatgggcaggttctggctccatatcttcccctggctccacagggtcgcctctccatgaggagccctcccctcccagcccccaaaatggacctggaaccgctgtccctgcccccactgacttcagaccctcagccacacctgaggacctcttggcctccccgctgtcaccgtcagaggtagcagcagtgccccctgcagaccctggccccgaggctcttcatcccacagtgcccctggacctgccccctgccactgttcctgccaccactttcccaggggccatgggctccgtgaagcccgccctggactggctcacgagagaaggcggcgagctgcccgaggcggacgagtggacggggggtgacgcacccgccttctccacttccaccctcctctcaggtgatggagactcagcagagcttgagggccctcccgcccccctcatcctcccgtccagcctcgactaccagtatgacacccccgggctctgggagctggaagaggcgaccttgggggcaagctcctgcccctgtgtggagagcgttcagggctccacgttgatgccggtccatgtggagcgggaaatccggctgctaggcaggaaacctgcacctttttccaggatggcccaggagacaatgagtgtgtgatggagctgggaggggcctcgaaggtggtggttgaggccccgggtcgagtgtgagccaacctcccagataacccaggtgccatgtcacctgcccagcagcaccagctccagctatgaggctctgcaagccgggagctcccgtgtgggg

SEQ ID NO: 189966 - DNA, 1386 bp, Homo Sapiens
ttgggtcaaaggagcatacctctcgctgtgactgatgctttagagcatattatggaacaactcaatgttttgacacagactgtttcaatcttggagcagcgactgactttgacagaggataagctgaaagactgccttgaaaatcagcaaaagcttttcagtgctgtccaacagaaaagctgaataaaaaattcattttcatttgttgggcagaggcccaataaatgaacaaatgtacatacactcaggaaggtagtacaagatactccatacaacacaaccatgtgctatttatcatggcatttcttaaaagggtgagcaacagaacaaaaggcagaaaaggcatacctaaggactaatttaaacacatatcaatgtgaaggactaatttaaattactatcatttatgattgcagtaataaagtgataagcattcaagcaactctgtattttccccatattattttaaatgtccattttcatttataggccaaatcctgccaggaaagtaaccagatctctggatttcactgttaagtcatttcagattgaccatattcagacagtcatggggtgaaataattcacttacctccaaaatagcatcctatatgccaataatgagttattgatctgactagttgtatgtctttctgttcaaaatagaaattatcctttcttactaatgccttgaaagaatgaacaaataaaaattcccagaccacagaatttccacagcaagaatacacttattttaattaacaatagcacagatatagcatagggcagtgggttttttagttaatttatggcgtactttgtttatccattggccaacctgaaggaaatgaaactcacctatctttctatcacagatgaatgtgctagatgaatgatttgggttgtatctgatcatggttcacaaaaattatgttagtgtgttttcagtatgctaaaaagtcagagtgatacaaaagtgatatttaaaaatatacacacatgtatgtacacatgcttcagaaatattgttgcttagggtgatttgggcagctaaatagtaagtactttttaaaatttttgcatcatcatcttcctatttaatgaattgtgatttaaaacaaaatgaaaataagccaggtattctaaaagatcctggatacaaattaagaattttgctttattttaaaccaaattgagattaaattgaagaaaagcaagcaaattaatttcagcttgattatcaacctgtatcaagaacaaaaatgggaggaggtgtccactttatggtgtgtataggtaacatggggaaaatgctattctgtgttttggaaaagaaaaatattgccgtcctatttatttctatattttagaaatttttctcaaagaa

SEQ ID NO: 189967 - DNA, 1430 bp, Homo Sapiens
ttggctgtactggcggcggcagggctggcggcttaggccgcagaggtctgtgggcctgagcccacgctggactctgtccgttctgcgatgactgctgctctggccgtcgtcacgacgtcgggtttggaagatggggtgcctaggtcccgtggcgaagggaccggggaagtggtcttggagcgggggcccggcgcggcctaccacatgttcgtggtgatggaggacttggtggagaagctgaagctgctccgctacgaggaggagttcctccggaagagcaacctgaaggccccgtccagacactattttgcactgcctaccaaccctggcgaacagttctacatgttttgtactcttgctgcttggttgattaataaagcgggacgtccctttgagcagcctcaagaatatgatgaccctaatgcaacaatatctaacatactatccgagcttcggtcatttggaagaactgcagattttcctccttcaaaattaaagtcaggttatggagaacatgtatgctatgttcttgattgcttcgctgaagaagcattgaaatatattggtttcacctggaaaaggccaatatacccagtagaagaattagaagaagaaagcgttgcagaagatgatgcagaattaacattaaataaagtggatgaagaatttgtggaagaagagacagataatgaagaaaactttattgatctcaacgttttaaaggcccagacatatcacttggatatgaacgagactgccaaacaagaagatattttggaatccacaacagatgctgcagaatggagcctagaagtggaacgtgtactaccgcaactgaaagtcacgattaggactgacaataaggattggagaatccatgttgaccaaatgcaccagcacagaagtggaattgaatctgctctaaaggagaccaagggatttttggacaaactccataatgaaattactaggactttggaaaagatcagcagccgagaaaagtacatcaacaatcagcttgagaatttggttcaagaatatcgtgcagctcaagcccagctgagtgaggcaaaggagcgataccagcagggaaatggaggagtgacggaaagaaccagactcctctctgaggttatggaagaattagaaaaggtaaaacaagaaatggaagaaaagggcagcagcatgactgatggtgctcctttggtgaagattaaacagagcttaacaaaactgaagcaagaaactgtagagatggacattagaattggcattgtggaacacacactactccaatcaaagctgaaggagaagtccaacatgactaggacatgcatgccacagttattccagaccagcaacaggcttttattaaaacatactggttttcatgtttctgattagttgggtttttatatcaaactatattt

SEQ ID NO: 189968 - DNA, 929 bp, Homo Sapiens
ttggcaacatgtcctgtgtgctttgcaagtgcttctgaaagatgtgccaaaaatggctacacctcccgatggtatcatctctcctgtggggaacatttctgtaatgaatgctttgaccattactacagaagccataaggatggatatgacaaatatactacatggaaaaaaatatggactagcaatggcaaaaccgaacctagtcccaaagctttcatggcagaccagcaactcccctactgggttcagtgtacaaaacctgagtgtagaaaatggaggcagcttaccaaggaaatccagcttactccacagatagccaagacttatcgatgcggtatgaaaccaaatactgctattaagcctgagacctcagatcattgttccctcccagaggatctaagagtattggaagtttccaaccattggtggtactctatgctcatcctacctcctttgctgaaagacagtgtggcagcgcccctgctgtctgcctactaccctgactgtgttggcatgagcccctcctgcaccagcacaaaccgcgccgctgccactggcaatgccagccctgggaagctggagcactccaaggctgccctctccgtgcacggcatgaaccgatacttccagcctttctaccagcccaatgagtgtggcaaagccctctgtgtgaggccggatgtgatggaactggatgagctctatgagtttccagagtattcccgagaccccaccatgtacctggctttgagaaacctcatcctcgcactgtggtatactaactgcaaagaagctcttactcctcagaaatgtattcctcacatcatcgtccggggtctcgtgcgtattcgatgcgttcagaagtggagagaatactgtattttatgaccagaaaaggtctcatcaacactggagttctcagcgtggga

SEQ ID NO: 189969 - DNA, 923 bp, Homo Sapiens
ttggcgaagctctgcacagatgtggacgagtgcagctccgggcagcatcagtgtgacagctccaccgtctgcttcaacaccgtgggttcatacagctgccgctgccgcccaggctggaagcccagacacggaatcccgaataaccaaaaggacactgtctgtgaagatatgactttctccacctggaccccgccccctggagtccacagccagacgctttcccgattcttcgacaaagtccaggacctgggcagagactacaagccaggcttggccaataacaccatccagagcatcttacaggcgctggatgagctgctggaggcccctggggacctggagaccctgccccgcttacagcagcactgtgtggccagtcacctgctggatggcctagaggatgtcctcagaggcctgagcaagaacctttccaatgggctgttgaacttcagttatcctgcaggcacagaattgtccctggaggtgcagaagcaagtagacaggagtgtcaccttgagacagaatcaggcagtgatgcagctcgactggaatcaggcacagaaatctggtgacccaggaggaggatcccgtgctgactgtcatcacctacatggggctgagcgtctctctgctgtgcctcctcctggcggccctcacttttctcctgtgtaaagccatccagaacaccagcacctcactgcatctgcagctctcgctctgcctcttcctggcccacctcctcttcctcgtggcaattgatcaaaccggacacaagtgctgtgctccatcatcgccggtaccttgcactatctctacctggccaccttcacctggatgctgctggaggccctgtacctcttcctcactgcacggaacctgacgtggtcaactactcaagcatcaacagattcatgaagaagctc

SEQ ID NO: 189970 - DNA, 860 bp, Homo Sapiens
tcccacaggaagggcggccccgcccagccgtggcgtccgaacgcagccgaggcaaccgaagtagcagggactggctgctagggattcgaggattctgatagggacaaatataattcctcagtgtttattcacttcatggccgcttggacatagacacccgggttaagggacccggaaggtgccttctgaaaatatggcgaccacccttcaattgtcacaggctgctcttaagggcgccattatttgaccatatcaaatatggagcctttctgacttctctggcctcatcgtcccacttgcccttaaataaagccgcttcggctgctttttctagtgggggaggcggggtgtctgggaagtagaggagaggcttcttgccttcaagaaagatgtaagggcccgaagcttcacttacccctctgtacccgcaatacgcaacggccgatgattggcgacgatcccggaagaagctgcgcggtgattggcctgggactggcggggcatttgaagggaccccgcggtcctgaagcctctgttgacagactggagcgcagcggagacctcggcatctgcggtgctcgggattgtgtcccctacggtctcttaccgtgcctcccgatggcgggagctggaatttggtccccagaccccttgggaagacgcgcacaccctggcaaaccatgtgtacacccgcggtagaagcaggtgcgtgttttacagtagcttagctgcggagtccacccagcccctggcatccgcagctcggctcgctcaggctctagaccgaagctgcaggcgaaggaacgtgcttggtgaggatggaatcggaatggggaagttttaaattaaatagtaaccaa

SEQ ID NO: 189971 - DNA, 937 bp, Homo Sapiens
ttggctgcgcctgcgccccggcacgaggtggggcggcgggcgtcagtacagtagagtgtgcgccggggtggggggcaacggtcagccgtcaccctgagacgggcggcggcgggatggcaacagcctccggggcctcggacttgtctggctccggagcgcccccgcccggtgtgggagctcaggcggcggcggccgctgaggaggaggagcgagaggtggtgcgggtccgagtcaagaaatgtgagagcttcttgccgccagagttccgctcttttgctgtagatccccagatcacctcgctcgacgtgttgcagcacatcctcatccgagcctttgatttgagtgggaagaagaactttggcatcagctacctgggccgggaccggctaggacaggaagtttacctctcacttctatctgactgggacctcagcacagcctttgccactgcctccaaaccttacctgcaattgcgtgtagatattcggccctcggaggacagtgggccgtaccttgtctaaggtccaacaagtgctgagctggtcgtatggggaagatgtcaagcccttcaagccacccctgagcgatgctgagtttcacacgtacctgaaccacgagggccagctctcccgacccgaggagttgcgcctgcggatctatcatggcggtgtggagccctcgctgcgaaaggtggtgtggcggtacctgctgaacgtgtatccagatggactgacaggccgagagcggatggactacatgaaacgcaagagccgcgagtatgagcagctcaagagcgagtgggcccagcgagcgagccctgagacctggaattcatccgcagcacggtcctcaagatgtactgcgcactgaccgggcccacccctactatgcggggcctgaggatgggcccacatctacgggcgctgcacgacctgct

SEQ ID NO: 189972 - DNA, 897 bp, Homo Sapiens
ttggggcgcgggagcttgcgtgctgctgggcctgagctgtctgtctcgtttctgtccgcgcgccctgcatcccggccccgggcgcccgctggaggtcgccgaggagccacagggctgactggtctgctgcccgggcccaggagtgcctggtgtagcagtcgcggagccatcccggcgtctgctgccatgaccgactctcccctcagaggagactcttcctcagcggtggctgcagagacagatgagcggcggctcctggccgcgggaccgtgagacgggttcgtggccggccatttagggggacgctgcgaccaccgcctgcgcccctccggactggttccttgggccccggaagctcgcggcgggccctgcgggaggcggcatgctcccgcggaggctgctggccgcctggctggcggggacgcggggcgggggcctgctggcgcttctggccaatcagtgccgcttcgtcacgggcctgcgcgtgcggcgcgcgcagcagatcgcgcagctctacggccgcctctactccgagagctcacgccgcgttctcctcggccgcctctggcgccggctgcacggccgtcctggccatgcctctgccttgatggcggcgttagccggcgtcttcgtttgggacgaggagaggatccaggaggaggagttgcagagatctattaatgagatgaagcggttggaagaaatgtcaaatatgtttcagagctctggagtccagcaccaccctccagaaccaaaagcccaaacagaagggaatgaagattcagaggggcagaagagccacgctggggaatggtgatgggataagaaaacactttaaagctgtggccggcgcccaattacaacacccacctttaccagtaccgagtttttggaacc

SEQ ID NO: 189973 - DNA, 1483 bp, Homo Sapiens
ttacatacaatgacacaaaaatttacaagtttcattttggtaaattaggctctccatttgctagacaagtgttagggcttaaaaaccctttaggatggtatatagaaaagctaggattgggacagcagggcaggatagggaagaaagagaggtgacaaatgtacatgaagcttatcttgtctcttgagaattccactgatttgcagtaattaatgtaactcactagcagcccacatgaaggcttccagggataaagttctgcaatgagaagaatttgattaggaaggatcatcttgctaggaattaggggagcatgagccccaagggaagaaaagcctatgaaatcatggagtttagggcagggtgttaccctaggactacccaaacagaaagtaccaactggcgacaccaacttatctaatatgttacaatacaggaaaaaggggaaatctgcaacttggacattggcacaaataaggaaaaaatggtaaccctaaaatgggccagattttccaatttgtattggctggggcatgtggctggggtgaaggtacgttgctattatgaagactggccatctcacagggttttctgtgtgtagtgggacacaggggcaccggggtataggtcttctgttgctgtgttttctaattagaagccttcctttccatcacaggccaatctggaaaagaaatgcccaacatgatgacaatgggggtcatccccatgttggcgacagccagaagcagattctggcaacacattaaagtgaagaccagtggctgcacctccagagccagggagataaacagaataaatgagagagtatgcacactaagaaggagagtgagtgtgcacacactgtaacaaaaatgacctctggatccgagcagctcagatacatgcacgtgtgtgtatgtgtgggagaagagtgcataaaaatactatcatgtagctttcccaatgagaggagataagtgatggttacaatgacattaagaataaaggtaacaacagaaatgggataacctggggcaggtatacgagaaaggaaaacggagaatactccctgacaagaaataaaaataaataaagcagtaagccatgctcactaatatgaacacaggccaaacagaaaccatgacagggcatatcctttggctctcaaatgggaatcccatgtctcagatctttcctttcagtggtgggctagctggttacctttggtttgtctgtgttttggtaatgaattgctgccaggggtcactactgttctcagacaagaagcataaacaaggccagagtctccttaaagtttaaactgaaaaattacaacataataattttcaaatgaaagtgcttttgatgcttggtatttgttgtgggagagggtgcaaagagaggttaaatgaaacaaaatccagcaacaaacaaaaacatacattatatgttgactatatccaattataaaatgcaaaacttg

SEQ ID NO: 189974 - DNA, 945 bp, Homo Sapiens
ttggcctcggcggcggctgcctcctcctcgtcctcgtctacctccacctccatggccgtggcggtggcctcgggctccgcgcctcccggtggcccggggccaggccgcacccccgccccggtgcagatgaacctgtacgccacctgggaggtggaccggagctcgtccagctgcgtgcctaggctattcagcttgaccctgaagaaactcgtcatgctaaaagaaatggacaaagatcttaactcagtggtcatcgctgtgaagctgcagggttcaaaaagaattcttcgctccaacgagatcgtccttccagctagtggactggtggaaacagagctccaattaaccttctcccttcagtaccctcatttccttaagcgagatgccaacaagctgcagatcatgctgcaaaggagaaaacgttacaagaatcggaccatcttgggctataagaccttggccgtgggactcatcaacatggcagaggtgatgcagcatcctaatgaaggcgcactggtgcttggcctacacagcaacgtgaaggatgtctctgtgcctgtggcagaaataaagatctactccctgtccagccaacccattgaccatgaaggaatcaaatccaagctttctgatcgttctcctgatattgacaattattctgaggaagaggaagagagtttctcatcagaacaggaaggcagtgatgatccattgcatgggcaggacttgttctacgaagacgaagatctccggaaagtgaagaagacccggaggaaactaacctcaacctctgccatcacaaggcaacctaacatcaaacagaagtttgtggccctcctgaagcggtttaaagtttcagatgagtgggctttgggctggagcatgtgtcccgcgagcagatccgggaagtggaagagacttggatgaattgtatgacagtctgga

SEQ ID NO: 189975 - DNA, 434 bp, Homo Sapiens
ttgtacaaaaaagttggttttttaaatggacaagcaatagggggttgaagtgtttatctgatttgtttaaaattttgtatatcaccaaatttttaaaaagtgatagtcacagtgctaagttatctagttggctactattacaccttaaaaattgagtttacacacacacaattacctgtttatatggtgctcatttgttattctcaaatataatgtgtgaccgtgatatagtgagaaagattctaccaaccactgtttcactactttttagttaaaattgggtatgttcttaatattcattagtgagaatcacaaagtattttgtttatggcccaaatcacagaataaaggactaagattggatttgccgacattccatactaatatacattgtttatgctttctttaaaataactacaagaacataaaagaaa

SEQ ID NO: 189976 - DNA, 546 bp, Homo Sapiens
tttgtacaaaaaagttggcctgtatctcctccatagattcttagtattccatggaacatattttgaaaaccttgggatagatgatccactgaaatcttttccagctctaagattttaaattgtccttttagattagacttgctgagtttaattcagattacctaattttaaaatgtttctgaaaagtgaacagagttaccttacagagttttggatctttccagggatagccaatgattttatcccccagaatccttcacctttcaaggagttatttaacaatgagcccagtgactcaatagggcccaaacctttttattttacaatatgagctccaagacacttactgatctactgtgaatataaaatgttattagccttatcaaataaataaatgagcacagctctttgttcgctctattgaactgggtgataattatttagatgtgaatgttaggtcagttctactgtaataactaatcgtaaaagttgtaaatttgtttaatggatgaaatgtacactttttgtattctgtacagctttgtc

SEQ ID NO: 189977 - DNA, 1246 bp, Homo Sapiens
tggaaggaggacaggaaacagacaggtactgtccagctgtaggtaagagagtgcagctaaggcaggttgaggggcaggggagaggctgggggagcagtattgcagcaatgcaggagtgtagccccagggtcctgtcctgagcggctggtcaggttagcagctgttagttcccagatggagctcctgacccgaacccaggtagagggctcacacgttgtgggtcctcttggtgagctggggctcctcatccaccagcttggacttgaggtgctccttgtaagccaggatgtctccaggccacttggtgattgtctgcttctcacagacccaaatttcctgtgcaacctgctgaatgagtctgaagtcatggctgaccagcatcataccaccctcaaactcattgatggcatctgccagggcgtcgatggtctcgatatccaggtgattggtgggttcatccaggaagagcatgtgggggttctgccaggccagccaggccagacacactcggcacttctgcccgtctgacaagttccggattgggctcacctgttgtttcccagtgagaccgtatcgcccaatgatcttcctcatttcttccttctcctttatctctgggtagcacttcatcatgtactccaaaggtgagagatctaagtccagctgctcttgtaaatgctgatggtaacgccctatcttgacatgagagtgttttcggatcatgccatctgtgggtagtagctctccagttagcagcttcagaagagttgacttccctgcttcattgggccctaccagagccactcgtgtgtcaaggtcaattccaaattctagattattgtagatgcaaggcccatcttttgtatacttgaagctcacattttgcaccataatgacaggtggagggatcttgccacatggtgggaaataaaatgacagtgtcttatcgctcacgaccctctctgtcagtcctgatgccatcattttctgtagcgtcttctccttgctctgggcctgccgggccagcttggcactgccatgaccaaacctcgcaatgtagttcttcatgtgtgcaatctgatcttgctcccagtgaaacctcttcatctggttctcctccagctctagccgcgtcttcacatactgatcataattacccgtataatacttcagtttcttgttgtgcatgtgaatgatattggtacagacaccattcagaaaatcctgggaatgggagacgagccaa

SEQ ID NO: 189978 - DNA, 1468 bp, Homo Sapiens
ttggctaggaagtcccctagtctccaggttggtatggaggtggccatgggccctgggcccaattcctggagcaggggtcaaaagcaggcagcagattggcagttggaccatcttaggcgcacatcttacccagagcagctctgtccccacagaggatacggggcgatgtctgggtactttgtggttcatcaccactgcgagttctcctggcctggagtggcttctcagcaccccgcagtgcccagatggccccacccgagaaggagccaccccaatgtccatcatgccagagtagttgttccaggcaggactggggcagtggcccagctgagaaagagcctgacagtggcccttccccctccctagcagggtcccgagtatgggcccctcccgccttgccactcccaggtgtccatccagagcctccggggcacaggtgctttcattaggctctgaggccccagcccggcccggtccccagcccaccggcatctcccctgccaggcccgtcctgcccggcatctcgtgctggactgctggccctcacctccccacaggtgcagctggtgaataactccttcaaaggcatcaagtacttgcggctcaacacactggcctccctgggctacgccgtggttgtgattgacggcaggggctcctgtcagcgagggcttcggttcgaaggggccctgaaaaaccaaatgggccaggtggagatcgaggaccaggtggagggcctgcagttcgtggccgagaagtatggcttcatcgacctgagccgagttgccatccatggctggtcctacgggggcttcctctcgctcatggggctaatccacaagccccaggtgttcaagcagccccacggggccgagcccccctcctcattgcccgccaccgccgaccgcaggatggcatccggctgcacaaaaccccgccagcagctctctgtgggaggctgagcccgggaccccggcctcggatgggcagaggtggccatcgcgggtgccccggtcaccgtctggatggcctacgacacagggtacactgagcgctacatggacgtccctgagaacaaccagcacggctatgaggcgggttccgtggccctgcacgtggagaagctgcccaatgagcccaaccgcttgcttatcctccacggcttcctggacgaaaacgtgcactttttccacacaaacttcctcgtctcccaactgatccgagcagggaaaccttaccagctccagatctaccccaacgagagacacagtattcgctgccccgagtcgggcgagcactatgaagtcacgttgctgcactttctacaggaatacctctgagcctgcccacccgggagcggccacatcacagcacaaagttggctgcagcctccgcgggggaaccaagcgggagggactgagttggcccgcgggccccagtgaaggcactttgtcccgcccagcgctgg

SEQ ID NO: 189979 - DNA, 1287 bp, Homo Sapiens
cactttgttgacagggcgagcagtgcgcttctctgttgagtccccagagagcagccggtggcgggccctacgcacagccaggtcactgatggcttggctgtggctccctcagccagctgtgaggtcccacggcctcgggtctccatagctggactggaaccactgctccggccaacagcttcctcatccagctttggccgctgctcccctgagtgttcagtgacaggcccagataccccctctccagatgggggtgtcaggacccatataccctcctgtggttgcctcctgagggtgctgctggcctcctcagggccctccgggaaccgaggcgcatccaggaggcctgagcagcggcgtcgcactgtcattggagggcttgagtcactctctgtgtgggatgactcagacaccgacagccgcttccgtaatatctcaggggagccaatcacccagctccggtctcggcctttgagccctgccaggccatctgaatggtcctccttctcctcactcaggctgcgcttggtcgggggtggtgtccggcgctcctcgagcagtgagagccgctccatgctgctgtacaccttgttgaaccttggagagcaggaagagaactggcggatctcaaggcagccatcctcactcacttcttcctcatcctccgagtccatgtggtggtatcgctctgagcgggtgtcaaaatagctagtatcatcctctgactccaactgaggaataaattcagccttctggcggagaagtcctgtccagtccagaccagtaaagaatgggtgctgcttcacctcataggcactgcctgtgccaagtctctccagagggttctggtggagcagtttggaggtgaggtcctgggcgtctgggggcagtgcctcatcaccctcaggccacacaatctcatcactgatcacctgcccaaagagctcctccggagtatctccaaaaaaagggacgcagcccaccaggaactcatacaggataatgcccatggcccaccagtccactggcttcccatagccctggcgcaggatcacctcaggcgcaatgtattctggggtcccgcatacctgcttgtccaggaattcccgggcatccttttcaatatgaccctcatacaagttcgttgtcagactcatgaggccaattttggacagtccaaagtccgtgagcttgatgtgccccatggatgtaattaggaggttgtcaggcttgaggtcacggtgcacgatgccatagttgtgtaagtactccagggccagcacccaa

SEQ ID NO: 189980 - DNA, 1415 bp, Homo Sapiens
ttggctttatccactccttgattgatgggcatttggggttggttccacattttttcaatatgtgaattgtgctgctataaacatgtgtgtgcaagtatctttttagtatgacttcctttcctctggtagatacccagtagtggaattgctgtgatgcatgtatttgtgcgactatttgattaatgctcatttccttgactagatcacctcatgtgaaaggtatggattggttttgcttttacccagttagctcccatgcctacctcagtacctggcacattgtaggtcccccagaatcatcatctactgaaagtggaatgaccacttcagaagggcaccctgggtaagatttctctttctgtttttacagctatgttattttatcttttgaaaacaatggtgactacatggacatgaagcaggctgatactacacagtatgtccccatgctagaaaggaaagaggtttctaaatattccgacatccagagatcactctatgatcgtccagcctcatataagaagaaatctatgttagactcagaagtcaaaaacctcctttcagatgataactcagaaggccttactttattggatttgttgagcttcacctatcaagttgcccgaggaatggagtttttggcttcaaaaaattgtgtccaccgtgatctggctgctcgcaacgtcctcctggcacaaggaaaaattgtgaagatctgtgactttggcctggccagagacatcatgcatgattcgaactatgtgtcgagaggcagtacctttctgcccgtgaagtggatggctcctgagagcatctttgacaacctctacaccacactgagtgatgtctggtcttatggcattctgctctgggagatcttttcccttggtggcaccccttaccccggcatgatggtggattctactttctacaataagatcaagagtgggtaccggatggccaagcctgaccacgctaccagtgaagtctacgagatcatggtgaaatgctggaacagtgagccggagaagagaccctccttttaccacctgagtgagattgtggagaatctgctgcctggacaatataaaaagagttatgaaaaaattcacctggacttcctgaagagtgaccatcctgctgtggcacgcatgcgtgtggactcagacaatgcatacattggtgtcacctacaaaaacgaggaagacaagctgaaggactgggagggtggtctggatgagcagagactgagcgctgacagtggctacatcattcctctgcctgacattgaccctgtccctgagaggaggacctgggcaagaggaacagacacagctcgcagacctctgaagagagtgccattgagacaggttccagcagttccaccttcatcaagagagaggacgagaccattg

SEQ ID NO: 189981 - DNA, 835 bp, Homo Sapiens
  misc_feature (400)..(419): n is a, c, g, or t
caactttagtacaaaaaagttggctcactacagtgtcgccgcctctgcctgcgtagccccggccatggctctgtagcctcgacccctttgtgcccccggcccgtctccgcgctcaccacgcctgcgctctccgctcccaccttctttcttcagccgaggccgccgccgcctctccttgctgcagccatggagtcttccactttcgccttggtgcctgtcttcgcccacctgagcatcctccagagcctcgtgccagctgctggtgcagcctctcctgttgccatcagtgcccagcacctgtgctacagccatgtcactcctggcgaccctggggctggagctggacagggccctgctcccagctagtgggctgggatggctcgtagactatgggaaactnnnnnnnnnnnnnnnnnnnntggctccctatgaggtccttgggggagccctggagggcgggcttccagtggggggagagcccctggcaggtaagggcaggtggaaggtggagctggggagtggagggcaggggaagatgggggaggaagaactcatccatgtattcaataaatattgagtgcctacaatgtgccaggcactgttttaggtgctgaggatacggctgggaacaagaagaacatggtctgtgccttccagcagctcacactgtggggagtagaccagagataaattaaatgagagtgtattggaataagtcaaaaacacctagcagctgagctacaaaatgacaaaggggacctaatatagaatgggtagccagaaaaccttctccaagtaggtaacatgttgactgagcataaatgatgggaaggaa

SEQ ID NO: 189982 - DNA, 663 bp, Homo Sapiens
ttgggtggtgacttcatttataataatacagagaatagctataagctcattgacagtaaaaacaacaaaccaggattctactgtttgaaaagaagtttcgttttaattttggaatttagaatgtgtatttgcaaagtcaccaattttcatctaaaaggttatattctagttgtgtcaccaaatcatcaaaaaaccttaaaaaagaagtaacttgctttgtaggtttgtattgttgatctaaacctgatacatgcttcatttaatcaggaataatccttttttttctgctggacatgtataaatttcactggattgtataaatttttatctattgccttaaacatttacatgattctcaatatgttttagctgtacagttttggtgttcatcttagaggattcttcagcagaagtgatatttctttactgttttgtgaggtaatactgattttgaaaatatatataagctaaaaacagtatttcgttgatatcagtagtcattgtgttaactataaagtcaagtgccagcaaagaactttaaaactgtaaagctgtgtatagaactgttttgtgtagcatggaaatattctgtcagctttttaaagtcactaaatgttcttgattatcagcttgaaggtatttttgtattacaagttgacagtt

SEQ ID NO: 189983 - DNA, 1639 bp, Homo Sapiens
ttggctgggagagaacttctctcccagggcggtgcgacccggagctccagcgcccgagtctccacttcgtttgctgaaacttgctttctaccagctaagaaccatgctgcgagtgattgtggaatctgccagcaatatccctaaaacgaaatttggcaagccggatcctattgtttctgtcatttttaaggatgagaaaaagaaaacaaagaaagttgataatgaattgaaccctgtctggaatgagattttggagtttgacttgaggggtataccactggacttttcatcttcccttgggattattgtgaaagattttgagacaattggacaaaataaattaattggcacggcgactgtagccctgaaggacctgactggtgaccagagcagatccctgccgtacaagctgatctccctgctaaatgaaaaagggcaagatactggggccaccattgacttggtgatcggctatgatccgccttctgctccacatccaaatgacctgagcgggcccagcgtgccaggcatgggaggagatggggaagaagatgaaggtgatgaagacaggttggacaatgcagtcaggggccctgggcccaaggggccagttgggacggtgtcggaagctcagcttgctcggaggctcaccaaagtaaagaacagccggcggatgctgtcaaataagccacaggacttccagatccgcgtccgagtgattgagggccgacagttaagtggtaacaacataacgcctgtggtcaaagttcacgtctgtggccagacacaccgaacaagaatcaagagaggaaacaaccctttttttgatgagttgtttttctacaatgtcaacatgaccccttctgaattgatggatgagatcatcagcatccgggtttataattctcactctctgcgggcagattgtctgatgggggaatttaagattgatgttggatttgtttatgatgaacctggccatgctgtcatgagaaagtggcttcttctcaatgacccggaagataccagttcaggttctaaaggttatatgaaagtcagcatgtttgtcctgggaaccggagatgagcctcctcctgagagacgagatcgtgataatgacagtgatgatgtggagagtaatttgttactccctgctggcattgccctccggtgggtgaccttcttgctgaaaatctaccgagctgaggacatcccccagatggatgatgccttctcacagacagtaaaggaaatatttggaggcaatgcagataagaaaaatctcgtggatccttttgtagaagtttcctttgctggaaaaaaggtttgtacaaacataattgagaaaaaatgcacacccagagtggaatcaggtcgtcaatcttcagatcaagtttccttcagtgtgtgaaaaaataaaactaacaatatatgactgggaccgtcttactaaaaatgatgtagttggaacaacatatctacacctctctaaaattgctgcctctggtggggaagtggaaattaaacacaggagaaacagagtaggcttttgttcccaacgtttggaccttgttacctgaatctttatggaagccccagagagtacacgggattcccaaacccctatgatgacctgaat

SEQ ID NO: 189984 - DNA, 1213 bp, Homo Sapiens
tcaacaaagaaggcgagatcattgggttcccagcccatatcccaaaagatgaagcagggctgtctgaacacaggataaggcagggagcaaggactgtcatttaggctactaaatcctttaactgctttgaccaaaaacagaacaagttgatagtaagtgtctcgaatttctttgtgtagatcagcaccacagtttccaggtgtccaaaataattggtaaaatctttctgacaggtcagaagttccaacaggaaaagtatgaaaggtggatggaagcagtggggctgcccaagggattctgcacagtgctgagttatcttcaggacttccaggatgcttctgggcctgggctttcctcagggaaagaaccttcacaacactcctgtgcgagagcgactgatccttaatgaagtccatgacgtccttcagcacagggtatttctctttcactgtgggcaccagtctggcctcctccatggatcgaaaggagagcagccggagtcgccctcgggtgaagggaggccggcgggtgggtgtggaaggtgacaagggctcttcagctgtggcaggggacacgtctgcagcaggaaggccactgctggatggcagctttggctgggtgcccaggccaggactctggtctcctgtggcagggggtgcggcttcagtgggagatactgaggcttggaaatgctcttccaccacagagcttgtcctctgacgcttgttgagtggctggagatgactggtttcatcagcagtctccaacttttcgcagctttcttttgaacttatgcccgtgggcagaaattttagtaatagaagactcttctcaatgcactcttttgccaggctctcagggttcacctcagtagcttctgaactatgtttttcttctgcttcattccccaggctcatcagggacttctgcttcatctctaacatccatattcgaatcccatctgccaaggaataaacctgggcaaactcttcactcagggctattttgcccccactgttgacatatttttgcagcttctcatataaatctggagtgcgatacaccagagcagcaaaggtggcgttcacagcttgatcaatagtggaaccagcaactatatctgtctttggggcctgttttctacatgcctgtatgaatcctttgaaaagttctgaatatggcccacagaagttctgagcaggctctgacccaa

SEQ ID NO: 189985 - DNA, 1373 bp, Homo Sapiens
ttggctcttcgggtctcgggcccttgggcgcagcggggcgcgcgccatggcgaaggcgaagaaggtcggggcgcgaaggaaggcctccggggcgccggcgggagcgcgagggggcccggcgaaggccaactccaatccgttcgaggtgaaagttaacaggcagaagttccagatcctgggccggaagacgcgccacgacgtgggactgcccggggtgtctcgcgcacgggccctcaggaagcgtacacagactttactaaaagagtacaaagaaagggataaatccaatgtattcagagataaacgcttcggagaatacaacagcaacatgagccccgaggagaagatgatgaagaggtttgctctggaacagcagcgacatcatgagaaaaaaagcatctacaatctaaatgaagatgaagaattgactcattatggccagtctttggcagacatcgagaagcataatgacattgtggacagtgacagcgatgctgaggatcgaggaacgttgtctgctgagctgactgctgcccactttggaggaggcggtgggctccttcacaagaagactcaacaggaaggcgaggagcgggagaaaccgaagtcccggaaagagctgattgaagagctcattgccaagtcaaaacaagagaagagggagagacaagctcaacgagaagatgccctcgagctcacggagaagctagaccaagactggaaagaaattcagactctcctgtcccacaaaactcccaagtcagagaacagagacaaaaaggaaaaacccaagcccgatgcatatgacatgatggttcgcgagcttggctttgaaatgaaggcgcagccctctaacaggatgaagacggaggcagaattggcaaaggaagagcaggagcacctcaggaagctggaggctgagagacttcgaagaatgcttggaaaggatgaggatgaaaatgttaagaaaccaaaacatatgtcagcagatgatctgaatgatggcttcgtgctagataaagatgacaggcgtttgctttcctacaaagatggaaagatgaatgtcgaggaagatgtccaggaagagcaaagcaaggaagccagtgaccctgagagcaacgaggaagaaggtgacagttcaagcggggaggacacagaggagagcgacagcccagatagccacttggacctggaatccaacgtggagagtgaggaagaaaacgagaagccagcaaaagagcagaggcagactcctgggaaagggttgataagcggcaaggaaagagctggaaaagctaccagagacgagctgccctacacgttcgcagcccctgaatcctatgaggaactgagatctctgttgttaggaagat

SEQ ID NO: 189986 - DNA, 1168 bp, Homo Sapiens
ttggcgccgtagcccgcgcgcccctggcactcaatccccgccatgtgggggctcctgctcgccctggccgccttcgcgccggccgtcggcccggctctgggggcgcccaggaactcggtgctgggcctcgcgcagcccgggaccaccaaggtcccaggctcgaccccggccctgcatagcagcccggcacagccgccggcggagacagctaacgggacctcagaacagcatgtccggattcgagtcatcaagaagaaaaaggtcattatgaagaagcggaagaagctaactctaactcgccccaccccactggtgactgccgggccccttgtgacccccactccagcagggaccctcgaccccgctgagaaacaagaaacaggctgtcctcctttgggtctggagtccctgcgagtttcagatagccggcttgaggcatccagcagccagtcctttggtcttggcacaccgaggacggctcaacattcagtcaggcctggaggacggcgatctatatgatggagcctggtgtgctgaggagcaggacgccgatccatggtttcaggtggacgctgggcaccccacccgcttctcgggtgttatcacacagggcaggaactctgtctggaggtatgactgggtcacatcatacaaggtccagttcagcaatgacagtcggacctggtggggaagtaggaaccacagcagtgggatggacgcagtatttcctgccaattcagacccagaaactccagtgctgaacctcctgccggagccccaggtggcccgcttcattcgcctgctgccccagacctggctccagggaggcgcgccttgcctccgggcagagatcctggcctgcccagtctcagaccccaatgacctattccttgaggcccctgcgtcgggatcctctgaccctctagactttcagcatcacaattacaaggccatgaggaagctgatgaagcaggtacaagagcaatgccccaacatcacccgcatctacagcattgggaagagctaccagggcctgaagctgtatgtgatggaaatgtcggacaagcctggggagcatgagctgggggagcctgaggtgcgctacgtggctggcatgcatgggaacgaggccctggggcgggagttgcttctgctcctgatgcagttc

SEQ ID NO: 189987 - DNA, 1775 bp, Homo Sapiens
  misc_feature (1502)..(1510): n is a, c, g, or t
ttggttgtgagattcgtgatcagattacaagtaaggaagcccagttaacatcttcaaaggaaattgtcaaatcctatgagaatgaacttgatccattgaagaatcgtctaaaagaaattgaacataatctctctaaaataatgaaacttgacaatgaaattaaagccttggatagccgaaagaagcaaatggagaaagataatagtgaactggaagagaaaatggaaaaggtttttcaagggactgatgagcaactaaatgacttatatcacaatcaccagagaacagtaagggagaaagaaaggaaattggtagactgtcatcgtgaactggaaaaactaaataaagaatctaggcttctcaatcaggaaaaatcagaactgcttgttgaacagggtcgtctacagctgcaagcagatcgccatcaagaacatatccgagctagagattcattaattcagtctttggcaacacagctagaattggatggctttgagcgtggaccattcagtgaaagacagattaaaaattttcacaaacttgtgagagagagacaagaaggggaagcaaaaactgccaaccaactgatgaatgactttgcagaaaaagagactctgaaacaaaaacagatagatgagataagagataagaaaactggactgggaagaataattgagttaaaatcagaaatcctaagtaagaagcagaatgagctgaaaaatgtgaagtatgaattacagcagttggaaggatcttcagacaggattcttgaactggaccaggagctcataaaagctgaacgtgagttaagcaaggctgagaaaaacagcaatgtagaaaccttaaaaatggaagtaataagtctccaaaatgaaaaagcagacttagacaggaccctgcgtaaacttgaccaggagatggagcagttaaaccatcatacaacaacacgtacccaaatggagatgctgaccaaagacaaagctgacaaagatgaacaaatcagaaaaataaaatctaggcacagtgatgaattaacctcactgttgggatattttcccaacaaaaaacagcttgaagactggctacatagtaaatcaaaagaaattaatcagaccagggacagacttgccaaattgaacaaggaactagcttcatctgagcagaataaaaatcatataaataatgaactaaaaagaaaggaagagcagttgtccagttacgaagacaagctgtttgatgtttgtggtagccaggattttgaaagtgatttagacaggcttaaagaggaaattgaaaaatcatcaaaacagcgagccatgctggctggagccacagcagtttactcccagttcattactcagctaacagacgaaaaccagtcatgttgccccgtttgtcagagagtttttcagacagaggctgagttacaagaagtcatcagtgatttgcagtctaaactgcgacttgctccagataaactcaagtcaacagaatcagagctnnnnnnnnnggaaaagcggcgtgatgaaatgctgggacttgtgcccatgaggcaaagcataattgatttgaaggagaaggaaataccagaattaagaaacaaactgcagaatgtcaatagagacatacagcgcctaaagaacgacatagaagaacaagaaacactcttgggtacaataaatgcctgaagaagaaagtgcccaagtatgccctgacagatgttacaattatggagaggttccagatggaacttaaagatgttgaaagaaaaattg

SEQ ID NO: 189988 - DNA, 789 bp, Homo Sapiens
ttggtgaactcatgtttgggaagaaataggcctctcccccagtcccatttagaatcgtggtccttctgttgcagctttatttaatgagcatggttcatgatacttattttattttcgaaagacagtcctatgtgtctcacccaccggccactgcagccctggtgagggcgggtgggcgccggccggcctggaagagcgccgtggctgggccaccacctgtggctgcgttgttgctcactgaatctgttggggagaggtcaccatagtcaccgcctgacctggctgctgctcttgcttcagagccacaagcaaagtttgcactgggcccactgccgagtccagaggccggagaacggccactggtgtgggaggggagcgcacgagtgggactttgcacagcaaattgtgtccccagctcctcctctcccgcctgcctggagccggccctgaaggtttctatgaagaaataatcccccaatatttttactacgtgtgtgattttcctgttttatattgaaaaaacttttttgacactcccaagaccattcagggaaattttataaaaaatgcagatactgtcttgagcagatcgaaatgccgatgaagtggatgcaatttccttttgtgcaagcagtgcacggtgcccccccctcgggtgtccgtgctgtgccttagcttccccaggtgccgggactcacacctgctaggggctgggcaaggccccggctctgctttctctgaaggcttgtccaagttcattgccctgttacaggtggtcaagacgtccgg

SEQ ID NO: 189989 - DNA, 898 bp, Homo Sapiens
ttggttaataatgagaacccctctccaacccagcaggaggctgcagctgagcatccacagaccgctgaggagggtgagtcttccctaacccatcaggaggccccagctcagactccagagttccctaatgtagttgtagctcaacctccagagcattcacacctgactcaagccacagttcaacctttggatctggggtttaccatcactccagaatccatgacagaggttgaactttctccaaccatgaaggagaccccaactcagcctcctaagaaagttgtaccccaacttcgagtatatcaaggggtaacaaatccaacaccaggtcaggatcaagctcagcatccagtgtcacccagcgttacagttcaacttttggacctgggacttaccatcactccagaacctactacggaggttggacattctacacccccgaagaggactatagtttctccaaagcatcctgaggtgacacttccacatccagaccaggttcagactcagcattcacacctgactcgagccacagttcaacctttggacctggggtttaccatcactccaaaatccatgacagaggttgaaccttctacagccctgatgactacagctcctcctccaggacaccctgaggtgacacttccaccttcagacaagggtcaggctcagcattcacacctgactcaagccaccgttcaacctctggacctggagcttaccataactacaaaacctactacagaggttaaaccatctccaaccacggaggagacctcaactcagcctccagacctgggacttgccatcattccagaacccactacagagactggacattctacagccctggagaagactacagctcctcgtccagaccgggttcagactctgc

SEQ ID NO: 189990 - DNA, 972 bp, Homo Sapiens
ttggggccgccccctcggcgccccaccggctcccgcgcgcctcccctcgagcccgagcttcgagccaagcagcgtcctggggagcgcgtcatggccttaccagtgaccgccttgctcctgccgctggccttgctgctccacgccgccaggccgagccagttccgggtgtcgccgctggatcggacctggaacctgggcgagacagtggagctgaagtgccaggtgctgctgtccaacccgacgtcgggctgctcgtggctcttccagccgcgcggcgccgcagccagtcccaccttcctcctatacctctcccaaaacaagcccaaggcggccgaggggctggacacccagcggttctcgggcaagagattgggggacaccttcgtcctcaccctgagcgacttccgccgagagaacgagggctactatttctgctcggccctgagcaactccatcatgtacttcagccacttcgtgccggtcttcctgccagcgaagcccaccacgacgccagcgccgcgaccaccaacaccggcgcccaccatcgcgtcgcagcccctgtccctgcgcccagaggcgtgccggccagcggcggggggcgcagtgcacacgagggggctggacttcgcctgtgatatctacatctgggcgcccttggccgggacttgtggggtccttctcctgtcactggttatcaccctttactgcaaccacaggaaccgaagacgtgtttgcaaatgtccccggcctgtggtcaaatcgggagacaagcccagcctttcggcgagatacgtctaaccctgtgcaacagccactacattacttcaaactgagatccttccttttgagggagcaagtccttccctttcattttttccagtcttcctccctgtgtattcattctcatgattattattttagtgggggccggggtgggaaaggattactttttcctttatgtgtttggacggg

SEQ ID NO: 189991 - DNA, 1306 bp, Homo Sapiens
  misc_feature (1225)..(1238): n is a, c, g, or t
ttggggaagaatttgccatcaagccatttcccccttttgtttctaaaattatttcagagatgtgtgctcctggagggaaaaagaaatacagcctcaacagattaaaaaacaaaagtcacacttaaggatccttctagtcacatcagcagtgttctgcctttatgtagtagttgggcatataatccttccacacagcccctgcagggaaaggctaatcttacggataatccacgtgagatttccacacaagagaaaagcacacgcatagtgaaatgtcagtcttttcagtaatgaggatacctttaaggcactcttggactctcggcaaccacaacataatagttgaaagatcaagattggctccacgaaagtgatacggaggttaggatgctacttgctgcaaacaagccctactttggccaacatcctgcttatttctcaaaaaagagggacagtgaaaacaaaaacgacattgggacatgctgctcaaggtagttatatatacgataagttgtatatatgatcactggtagcctaccaaagctgtagaaatctaggactgtgctaatcagtatcaaaccaaagatttctatctcttcccgaaagagagggtatgtgcaccagtctacagttccaaaggactgcaacaaatgtagatggttctgtcctcatccctgagatcagttctactgaaatggcaacaacaactccaaatacatctctcccttcttgaaatccctaaagcactatcgcactcctaaatgcatttctccacaagttagcacttgattgtatactgtcttttaatccttcattgtttcatgtatgaagtttttaatcaccccctaacccccaaaaaagattcggttgtcaagggatatatttctatccctgccagcacagtgctggacatagtgagtactgaacacctaagaggcactcattcagactgacttctacaggacttctacgtgtgtgataaaagcctgtgaatcgtgagtccctgaaatatggtagcctggcccagcttctaaagaggaccttcgtagccacaaggcatgctaaacctctagggtctgatgctgtttttgttccaaatataaacgaaaggcactagtcagccgcctgcatagactttctaaacagtgagtaaataccatggaacgtcagaaatgactttatcatcgtcatcttgaagaaaaatatgaacactgatgaaagtcannnnnnnnnnnnnngacatctttctgtggcaaagctcttagaattctttgcagttagctgctgaacagtatgatgatttggg

SEQ ID NO: 189992 - DNA, 257 bp, Homo Sapiens
ttggcccaagcccagcctctcgccagctgggagtcgcgcgctgcccacctcgctgcccaggcccccgacgccgcggcaggagccccccaagagcgcgggaagccccgtggacctggcgctcccggctcgggcgtggacggggcgggcgccggggcggggcgcgcgtcctcgcgggtctgaatggaagggtcgaggtcgtcgtcggcggcgagcagatcctgaagccagaactccaccccagcgcccgcgccaggcgg

SEQ ID NO: 189993 - DNA, 1291 bp, Homo Sapiens
tttttctccagtatgaattctctgatgttctgtaagggctgaactatgtctaaaggccttcccacatacttacattcataaggtttctcaccactatgaattctttgatgttgaataagggctgacgtaagtctaaagaactttccacactccttacattcataaggtttttgaccactgtgaattctttcatgtcgagtaagttcactacctactccaaatgctttctcacattctttacatttatagggtttttcaccagtatgaatcctctgatgtctagtcagggatgaactatttctaaagacctttccacatgctttgcattcatagggtttcttaccagtatgaattctctgatgacgagcaagttctctacatactccaaaagccttcccacattccttacatgcataaggtttctcaccagtgtgaattctctgatgttcaatgagctgtgaactaattctaaaaaccttctcacagtgcatacatttgtagggtttctcaccagtatgaattctctgatgttcggtaagctgtgaatgaaatctgaagtccttgccacattccatacatttgtaagttttctcatcagtatggattttctgatgtcgagtaagttgtgcatgcactctaaaggatttcccacagaatgagcattcaaagtgtttctcaccatcatgaactctttgaagtggagtaacttttccaactctttcaaaggtccttctgtattccttacatttatagaacttctcattatgaattttctggtatacattaaagtctttataaaaactacatgtattcccatattccatatatttacaaggtttcacaccagtatgaatattcagttgtaacatactggagttatctatcccaaaggttttccaacattgattacattcatagttttttccaccagtatgtattttctgatattcatcaaactctaagtcacaactgaagaccttctcatattccttgtattcatagggcttctcactgtcatgagttctccgaggtaaagtaagagattcatgagttttgtaactgggcacattttcagagatgattttcatttgactgaaatatcccacttcaggtccttgtacgtcaatcttgcttttgctttgccagtcatttctgaaaatggaaccttcaaggccacataacttgctactttccattacctcccactgagaaccagtgttttgaataatatcttttcctacagataaatgcttagtctcattcaaatggactccaaatccaacttttttgt

SEQ ID NO: 189994 - DNA, 1552 bp, Homo Sapiens
ttggctgcagccggggtacgagggctggcaggccctggacccaacgccccaggagaagagcgaagggacgtactgctgtggcccagttccagttcgtgccatcaaggagggcgacctgagcaccaagtacgatgcgccctttgtctttgcggaggtcaatgccgacgtggtagactggatccagcaggacgatgggtctgtgcacaaatccatcaaccgttccctgatcgttgggctgaagatcagcactaagagcgtgggccgagacgagcgggaggatatcacccacacctacaaatacccagaggggtcctcagaggagagggaggccttcacaagggcgaaccacctgaacaaactggccgagaaggaggagacagggatggccatgcggatccgtgtgggccagagcatgaacatgggcagtgactttgacgtctttgcccacatcaccaacaacaccgctgaggagtacgtctgccgcctcctgctctgtgcccgcaccgtcagctacaatgggatcttggggcccgagtgtggcaccaagtacctgctcaacctcaacctggagcctttctctgagaagagcgttcctctttgcatcctctatgagaaataccgtgactgccttacggagtccaacctcatcaaggtgcgggccctcctcgtggagccagttatcaacagctacctgctggctgagagggacctctacctggagaatccagaaatcaagatccggatccttggggagcccaagcagaaacgcaagctggtggctgaggtgtccctgcagaacccgctccctgtggccctggaaggctgcaccttcactgtggagggggccggcctgactgaggagcagaagacggtggagatcccagaccccgtggaggcaggggaggaagttaaggtgagaatggacctgctgccgctccacatgggcctccacaagctggtggtgaacttcgagagcgacaagctgaaggctgtgaagggcttccggaatgtcatcattggccccgcctaagggacccctgctcccagcctgctgagagcccccaccttgatcccaatccttatcccaagctagtgagcaaaatatgccccttcttgggccccagaccccagggcagggtgggcagcctatgggggctctcggaaatggaatgtgcccctggcccatctcagcctcctgagcctgtgggtccccactcaccccctttgctgtgaggaatgctctgtgccagaaacagtgggagccctgaccttggctgactggggctggggtgagagaggaaagacctacattccctctcctgcccagatgccctttggaaagccattgaccacccaccatattgtttgatctacttcatagctccttggagcaacaaaaaagggacagcatgccccttggctggatcatggaatccagctccctagactgcatcccgtacctcttcccatgactgcacccagctccaggggcccttgggacagccagagctgggtggggacagtgataggcccaaagtccccttcacatccc

SEQ ID NO: 189995 - DNA, 915 bp, Homo Sapiens
gaagaaaagggcttcatgggccactctcacccaagtttcctctaaaaggcatttgagctgatgccatcaggtgccaatgtgacatgggccatgacaacacccactggcacaactcttccttttcccttgaggaaggaagaggtgccatccactttttggatccagccctttgtctgctccaccccgtttttccttttgtccctacagtgtataaggaagccaaagtaagctcagctgccattcctgaccttattcttcctcaaaaaggaggcgaagtgcaggattgtgaaacactgaggagctactgcaactaaaaacccaatttttggggagagctggaccagctatagtccctactttggaccaggactcttatgcctctggattacctgtatccacagtttacccgctgaagttgcttttggataaacaaaaacaagaacagaacaaacaaatccccttccccaatcttttccatttcagctgccagctggagtccaaggttgtgggagccacacttcagtcttggtcctgtaccttgagtccccacctatgacctcagccaagggtccagggactagctcccctacccaggaatgctgtaagaacttccccgagatactcatagtctcagattatttacagagctgaggttctggggccactgtcccctgatgcactcttctggtctcctgggtccactcctccaggagtgggacaggttcacatggggcggtggtgggaccatcagaccagagggggtgtgctcttcggcaggttcttctgatcactcccaccacccggggccccttgcgcctatagagaaaactgcccgtcggaagtcttggactggcacccttggcacatccgtttgtgtctgagtaatcgatctgtccgagaaaaacactgagccaa

SEQ ID NO: 189996 - DNA, 1396 bp, Homo Sapiens
  misc_feature (890)..(902): n is a, c, g, or t
gttctgtgtttgtgcccacagtaaacagaatgtacagtgtgacccacatcgtggtccctccaggcattcctgccccaggataaggaaaacctgagcccacatctgattgccaacggctgtagccttctaacagtgggaaactattaataggcaagaaatttctgctttatcagtcatcacacaaccattcctgggcattgagactgtcctggttaggctgtgtgtctcctacattaacagctggggaggagggaaaagcttcagacttttaaactagcaaaacagttatttctctgcattcacaattctgatttcatgtatttctctgtacatgtttgatcattatcaggccattctgtttaagtttgaaactaagcattttaagaagtcttgcctcagttatttcagttttcaggtgactagagaatttcaggcaacagtgccctttgcaattacctttttgatgattaaggtgactatttttatttcttgttaagcatcagaagatgtcagcattcatcttttgggagtccagttacaaggtggaactagaaggtgttttcagcaatagccagagcactggaggaaaaataattgacaaatatttatacttttaaattgttttgaactgtatttacatacatcatgttttatcaggtacccaccaactttatactttctgccttcagatagagtttctaacattttctagtttgtcagttttaaaatataaaattcttttatgtttttaaaccgtcaaccaagaagtcaagaccactgtcccctgctgagttaggcaatcacttaaaactccaaagaactccaggctgaggagttcttttggtgctgaacagtggtctgacaacaggtgctagaattaaggtgtgggnnnnnnnnnnnnncagccaggaaggacaagatctccaatttgtgaagcttatgatacagctgaaaccagtctgatcaattttatgctacctgtcaccaaaaaattaactctaaatttttgaatgcttgttggcatctgtcaaatcaatactgaaaggatgcatttcggcttttaaccagtttggttctgatcattgcaacctctgtgcttttataattcaaagaacaaggatagctttcttcggtatcttttaatataagaacactgaattttggcttgaaatattgtgactaaattgcacaatctctggctattagcactgttcactacattaacatgcaagagagagagaagccctgttacatttcctgctatttaacaaactgtcccaattaggtcagcaggcctgttagggccttcactgctacgcccctggcccaataacagagagcaagaccagttgtccagagaatttaaatatgaatttagagctgccaaatttatttt

SEQ ID NO: 189997 - DNA, 1187 bp, Homo Sapiens
ttggcacactggcatatagatttcaagaaaccaaactctattaaaagctttactacaacaacaaaatcagtccctgacccagctctcacccttttcccaagaggcatctggtgttagtctaaaagcaaccatcttttaattttccacttgtgtttaattggaaaccagaggtcatactgttgtgtgactggtcattcttccgtgtcataaaagcatagtcagtgaagtttctcgagtcctccccatcccaaagaacgtccattttcctgtccctggactgagtttcctgggcaatgtgtgttttctgactctctcggctcaggcttctccacagactgtggcgctcacgcaggcgacggcggccgggcagcaggtgcagatgatccctgcagtgaccgcgactgcccaggtggttcagcagaaactcattcagcagcaggtggtgaccacggcgtcggccccgctccagactccaggcgctcccaacccagcccaggtgcccgccagctccgacagcccaagccagcagcccaagttacagatgagggtccctgctgtcaggctaaagacacctactaagcctccgtgccagtagtcagggcagcagggctgcctctcatctaaagcaaaactaccttcctcacagaaaacgctttattagtgaaccttgggaccatgtcacgcaagagattcagcactgggaaagatataattgaaacaaaatagtgtaatcattttattaaaatgcatcccacactgcaggacaaatggtccttatggagtgccgcgttctctgtactacgtggctcatggaaaaagtgacaacatggcttcctctaaatcatttcacctttcagtccccacccgcacccgtcccctagagccatagtactgtgttctgaaagccatttagaatttctttgtgagcatgtagtgctttgcacgccacagaagccgtctgccgtgtgtgaggagcatacaatggactttctaaagataaggcgtgggcttccacagtgtctgccagagtttagttctttataccttactgaaaaatgcctcgtggtcttcgcagaggggaaggcctgtctaaagtcaatcatccgagatgggttttccattccaaagaaaggcaatatggttccttccttccctcctaaaatatgacttaacttttagagaaatgt

SEQ ID NO: 189998 - DNA, 1367 bp, Homo Sapiens
ttggcatctttacacagcagccaagttactacagtgacctggatgaaaccctgcctaccatccttcaggtcttcagcaatatcctccagcactgtggtttgcaaggggacggggccaataccacaccccagaagcttgaggagaggggccgattgacccccagtgacatgcctctcctggaattaaaggacattgttctctacctttgtgatacctgcaccacactttgggcctttctggatatcttccctttggcttgccagaccttccagaagcacgacttttgttacagactagcttccttctacgaagcagcaattcccgaaatggagtctgcaattaagaagaggaggcttgaagatagcaagcttcttggtgacctgtggcagaggctctcccattccaggaagaagctaatggagattttccacatcatcctgaaccagatctgcctccttcccatcctagaaagcagctgtgacaacattcagggcttcatcgaagagttccttcagatcttcagctccttgctgcaggagaagaggttcctccgggactatgatgcactcttccccgtggccgaagacatcagcttgctgcagcaggcctcatcagtcttggacgagacgcggactgcctacatcctccaggcagtcgagagtgcatgggaaggggtggacagacggaaagccacagatgctaaagacccatcggtgattgaggagcctaatggggagcctaacggggtcacggtgacagcagaggcagtcagtcaagcatcatcacatccggagaactcggaggaagaggagtgcatgggagcagccgcggctgtgggccctgccatgtgtggggtggaactggactctctcatctcccaagtgaaggacctgctgccagaccttggtgagggcttcatcctggcctgcctggagtactaccactacgacccagagcaggtgatcaacaatatcctggaggagcggctggcccccaccctcagccagctggaccgcaacctagacagagaaatgaaaccagaccctacacccctgctgacgtctcgccacaacgtcttccagaatgacgagtttgatgtgttcagcagggactcagtagacctgagccgggtgcacaagggcaagagcaccaggaaggaggaaaacacgcggagtttgctgaacgacaagcgtgcagtggcggcacagcggcagcgctacgagcagtacagcgtggtggtggaggaggtgccactgcagccaggcgagagcctgccctaccacagtgtctactacgaggatgagtacgatgacacatacgatggcaaccaggtgggcgccaatgatgcagactctgatgacgagctc

SEQ ID NO: 189999 - DNA, 1552 bp, Homo Sapiens
ttgggttgtcatttctagtctattgacatgcacaataactagccagtgtaagtggcatatccctgaggacatgcaatgcagccgccctgtggaagaacaggagggaacactaactcaggtgcctcatgggagtggcatggcgggaagctgatggagtttgggctcatgctgggctgatgccctcagcttctctcgcttctcttccctctcttctgccctctcccacaggcttccttggtgaaggggacgctgtcaccaaagccatccaggatgctcggcagctgctgcacagccacagtggggccttggatggctcccccaacacccccttccgtaaggacctcatcagcctggactcatccccagccaaggagcggctggaggacggctgtgtgcacccactggaggaagccatgctgagctgcgacatggatggctcccgccacttccccgagtcccgaaacagcagccacatcaagaggcccatgaacgccttcatggtgtgggccaaggatgagcggaggaagatcctgcaagccttcccagacatgcacaactccagcatcagcaagatccttggatctcgctggaagtccatgaccaaccaggagaagcagccctactatgaggaacaggcgcggctgagccggcagcacctggagaagtatcctgactacaagtacaagccgcggcccaagcgcacctgcatcgtggagggcaagcggctgcgcgtgggagagtacaaggccctgatgaggacccggcgtcaggatgcccgccagagctacgtgatccccccgcaggctggccaggtgcagatgagctcctcagatgtcctgtaccctcgggcagcaggcatgccgctggcacagccactggtggagcactatgtccctcgtagcctggaccccaacatgcctgtgatcgtcaacacctgcagcctcagagaggagggtgagggcacagatgacaggcactcggtggctgatggcgagatgtaccggtacagcgaggacgaggactcggagggcgaagagaagagcgatggggagttggtggtgctcacagactgatcccggctgggtgggcctggccccttctcctctggggaagaccttgtcccaactcgatgggcacagccagccaacctaagactatgttggtacttggacttgttcgtgccccagagatgggcaaagctgtgcacttgcagatacattcatgaggggagaggcgccctcccttcctgaggagctgttggcctgggtgggcaggaactgcagtatggccatgggctgagcaggctgagcacctcagcctttagggcttatggccaggggacactgtatgactctcctctcctgcaagtgtctatccacctggggtatggcatctaccgacctgtctccctggggtcacatgctttgtttccattcttgtcctggctggaccagccactgtgggaccaacacccctcccacactcccccagactgcttcgtctatcaccaggatcgcttttgtactttgtgcaaaaggtcttggctgtccct

SEQ ID NO: 190000 - DNA, 1319 bp, Homo Sapiens
ttggggatgagtcctttgtgattgacagacagagcgggagactgaagttggagaagagtcttgatcatgagacaactaagtggtatcagttttccatactggccaggtgcactcaagatgaccatgagatggtggcttctgtagatgttagtatccaagtgaaagatgcaaatgacaacagcccggtctttgaatctagtccatatgaggcattcattgttgaaaacctgccagggggaagtagagtaattcagatcagggcatctgatgctgactcaggaaccaacggccaagttatgtatagcctggatcagtcacaaagtgtggaagtcattgaatcctttgccattaacatggaaacaggctggattacaactttaaaggaacttgaccatgaaaagagagacaattaccagattaaagtggttgcatcagatcatggtgaaaagatccagctatcctccacagccattgtggatgttaccgtcaccgatgtcaacgatagtccaccacgattcacggccgagatctataaagggactgtgagtgaggatgaccccccaggtggggtgattgccatcttaagtaccacggatgctgattctgaagagatcaacagacaagttacatatttcataacaggaggggatcctttaggacagtttgccgttgaaactatacagaatgaatggaaggtatatgtgaagaaacctctagacagggaaaaaagggacaattaccttcttactatcacggcaactgatggcaccttctcatcaaaagcgatagttgaagtgaaagttctggatgcaaatgacaacagtccagtttgtgaaaagactttatattcagacactattcctgaagacgtccttcctggaaaattgatcatgcagatctctgctacagacgcagacatccgctctaacgctgaaattacttacacgttattgggttcaggtgcagaaaaattcaaactaaatccagacacaggtgaactgaaaacgtcaaccccccttgatcgtgaggagcaagctgtttatcatcttctcgtcagggccacagatggaggaggaagattctgccaagccagtattgtgctcacgctagaagatgtgaacgataacgcccccgaattctctgccgatccttatgccatcaccgtgtttgaaaacacagagccgggaacgctgctgacaagagtgcagccacagatgccgacgcaggattaaatcggaagattttatactcactgattgactctgctgatgggcagttctccattaacgaattatctggaattattcagtttagaaaaa

SEQ ID NO: 190001 - DNA, 1370 bp, Homo Sapiens
  misc_feature (344)..(362): n is a, c, g, or t
tttcgggaacatagccttgctccctgctccatacgtgccaggagatggtgagaagtgatgcttcttctgtgcgttattaataagcaagcccgaggcactcaagtgcaggtgtggtgcccgctggccagccagccagtcaccaagagttcttcacatcttggattccagcaagtcctccttctcctaaaaaagcttccgtttttttctcctcttgggtccagagtggccatgctgaagggtattctctgtgctctccctgaacaagtgtgaataaaagcagcagccaagcagccagcccctcaccaacatgtcctgatttgtattatccaagtgaggtatttgcnnnnnnnnnnnnnnnnnnnggaaaattttaagaaattaacatctgccatctcttcactcctggctatgttgtgcttcattttacagaacttgctttcatcccactatctgcagggattaaggacgtctgcactcagcttaatgagcaacaggcctcgatcgacataaaactctctcagagaccagtctcagcaaacacaggtggcgccgttgatcaacagcacatggaaatgtaaacttcaatgtatttacaagtttatttaaacgactgaagaaaaacagtgctttatattgctgggattttgagaaggctagtttatgagatttggaccgtctcatgagttcaagcaaacacccttcaccatcatttccccaccagcagtttccaggcaggggcggcaaaattgttttcaccccattgtgtctatctctttccctagctccttcctcagccatatagagtgtggctccaggccttttatccccttttccatccctcactcctgatgtcctggatagagaattacaagtcagtaaactctgggctgggaaacactggctggtgctaccaagacactatgtaactgttgtccattcacaaagtattatctacactacatacagaatacattttcccctacattttaactgatgctcgctttagagcaactccctttgtttggacaagaaaggaatcccatctccctgtgagtggaatccagaatctattaagaaaaatcaaccttttccacacagttttagtttaataaaaggaaggaaaacccaccaagtacatttcatgtcgaaagagaagcaaaaaatttgtactgcaagtagtcgtgtgagttaccttgattcccaggaaaagaaattttaaatgctggtacatttgcaagttgcagcatcactcattgtaccttaaggactggcaaagcctttccaataaggaagcatcctggttctagcttattttaaaacaaagtgacaggacaccaactgtgaatataaaacaggtaaaaataatccaa

SEQ ID NO: 190002 - DNA, 1419 bp, Homo Sapiens
taaaagccaactttgtacaaaaaagttggtcaagttgttcctcaaaatttaaaaaaagaaaatccagtcgctacaaacagttgtaaaagtgaaaagttaccagaagatcttactgttaagtctgagaaggacaaaagctttgaagggggggtgaatgatagcacttgtcttctgtgtgatgattgtccaggagatattaatgcacttccagaattaaagcactatgacctaaagcagcctactcagcctcctccactccctgcagcagaagctgagaagcctgagtcctctgtttcatcagctactggagatggcaatttgtctcctagtcagccacctttaaagaacctcttgtctctcctaaaagcatattatgctttgaatgcacaaccaagtgcagaagagctctcaaaaattgctgattcagtaaacctaccactggatgtagtaaaaaagtggtttgaaaagatgcaagctggacagatttcagtgcagtcttctgaaccatcttctcctgaaccaggcaaagtaaatatccctgccaagaacaatgatcagcctcaatctgcaaatgcaaatgaaccccaggacagcacagtaaatctacaaagtcctttgaagatgactaactccccagttttaccagtgggatcaaccaccaatggttccagaagtagtacaccatccccatcacctctaaacctttcctcatccagaaatacacagggttacttgtacacagctgagggtgcacaagaagagccacaagtagaacctcttgatctttcactaccaaagcaacagggagaattattagaaaggtcaactatcactagtgtttaccagaacagtgtttattctgtccaggaagaacccttgaacttgtcttgcgcaaaaaaggagccacaaaaggacagttgtgttacagactcagaaccagttgtaaatgtaatcccaccaagtgccaaccccataaatatcgctatacctacagtcactgcccagttacccacaatcgtggccattgctgaccagaacagtgttccatgcttaagagcgctagctgccaataagcaaacgattctgattccccaggtggcatacacctactcaactacggtcagccctgcagtccaagaaccacccttgaaagtgatccagccaaatggaaatcaggatgaaagacaagatactagctcagaaggagtatcaaatgtagaggatcagaatgactctgattctacaccgcccaaaaagaaaatgcggaagacagaaaatggaatgtatgcttgtgatttgtgtgacaagatattccaaaagagtagttcattattgagacataaatatgaacacacacgtaaaagacctcatgagtgtggaatctgtaaaaggcatttaaacacaaacatcatttgattg

SEQ ID NO: 190003 - DNA, 1024 bp, Homo Sapiens
ttggcttctcgtctactgcaagcggaaatccagggtcaccgggagcaagaagtccaccaagaggaccaaatccatcaacggctccctctacatcttcaggggtcgaatcaacactgaagtcatggaggtggagaatgtggaagatgggacagcggattaccatagcaacggctataccgtcaccaacggctggaagatccacaacacggccaagaataagtggtttgtctgcatggccaagacggcagaggagaagcagaagtggctggatgccatcatccgcgagcgggagcagcgcgagagcctgaagctgggcatggagcgtgatgcctacgtcatgattgcggagaagggggagaagctgtaccacatgatgatgaacaagaaggtgaacctcatcaaggaccgccggagaaagctgagcactgtccccaagtgctttcttggcaatgagttcgttgcctggctcctagaaattggtgaaatcagcaagacggaagaaggagtcaacttgggccaagccctgttggagaatggcatcatccaccatgtttccgacaagcaccagttcaagaatgagcaggtgatgtatcgcttccgctacgacgatggcacctacaaggcccgaagtgagctggaggacatcatgtccaagggtgtgaggctttactgccgtcttcacagcctctacaccccggtgatcaaagaccgtgattaccacctgaagacctacaagtcagtgcttcccgggagcaagctggtggactggctgctggctcaggagactgccagactcgggaggaggcagtggcgctcggcgtgggtctgtgcaacaatggcttcatgcaccacgtgctggagaagagcgagttcagggatgagtcccagtacttccgctttcatgctgacgaggagatggaggggaccagcagcaagaacaaacagcttccccacgacttcagctggtggagaacattcctggccaacgcctgctgatcctgccccagaagaagactatggcttt
